United States Patent Application Publication US 2021/0254056 A1 - sequence listing, part 31

SEQ ID NO: 60898 - DNA, 1746 bp, Homo sapiens
ctcctgagtagctgagactataagtgcatgccactgtacccatcttgaaactcaaagtttaaaataacaggcaaagaaaggctgggcgtgatggctcacacctgtaatcccaggactttgggaggctgaggcgggcagatcacctgaggttgggagttagagaccagcctgaccaatatggagaaaccccatctctactaaaaatacaaaattcgctgggcgtggtggcaggtgcctgtaatcccagctgctcgagagactgaggcaggagaattgcttgaacctgggaagcgaaggttacgtgagccgagatcatgccattgcatttcagtctgggcaacaggagcaaaactccatctcaaaatttaaaaaataagaagaagaagaagaaaaaaaaaaggcaaagaaaaactgctacagacccacctctggataacgggcaaatactggattgtcccattctgagaacaaagactgaagcgattcgctactaacagtatcatccacagtatctagggcaaaagggaacaggtaaagttggcatccagaaccacagggaaaggagggaatggcatttcctgtttggtgagccatagcctcaagaccaaaggtcacgtacattgtttctatgttctacaaatgttcagtgtttgctgtatctctaaattattttgatctgttactttttaaactagagttggtgactgtatcttctggcattacagcttttctccaaactgttaaaagagatattgtggaatactgacagagaagctatggctcaaatttatagccttactgcctttaagcaaaatataccttatctatttttaaacatacacacaaaattgatgtctgtagctttttttgaagagttttgcttacataaaactacagcaacttggagtgcaagtccagcctttttaaaaataagaaacatgtcccctaatcacaagacaccacagactatgcataatcagcaaatattgacctcaagtctggaaaagtaatttctgacctaaatgcatgcgctgaattaattagttccgctgttaaacagggccgtggggaattcctgattccagtacagcacagctggcactgatcaagcttaatgcaagcctgctttgttttttgagttaggtggtacgatgtgtactgtgtgccccagcactctctgccacccttacctctgttatcctgtctcatcacagtcctctctgctcgagctctcggaaggaaaggaagaacaaggtcgcttctaaaaggttgacacctgtactgagaccctaaatataagaaagaaaaacctagaaatgtgaacttaaaatacaagtaaactctttaaaaatttaatcacataaaacctctttctgcacaaactgagtcaagacataaagcagactactaaacactagattgagaatcagaaatcctttaatgaaattatgctgtccatataggactctatattaatgcttagttccattatctattcataccagacagaatgaagacctagaataggtcactgtgattctcactggggggcaattttgcacgaggggacattggcaatgtcttgagacccttttttttttttttgagacggcgtctcgctctgtcgcccgggctggagtacagtggcgtgatctcggcttactgcaacttccgcctcccgggttcaagcaattctcctgcctcagcctcccgagtagctgggattacaggcatgcgtcaccacac

SEQ ID NO: 60899 - DNA, 1328 bp, Homo sapiens
tctcggctcactgcagcctgcacctcccgggctcaagcaatcctccagccttagcctcccgagtagctgggattacaggcgctcgccaccatgcctggctaatttttgtctcttatgtagagatggggtttcaccatgttaaccagcctggtctcgaactcctgaactcaagtgatcctcccgccttggcctcccaaagtgctgggattacaggtgtgaaccaccgcgcccggccagaaggtcattattaatattcttttggtctttacagatgggcataaactaccttggtaataataatgatggcatggggctgcctgaacttgattttaagttttcctgcaagtgaaaacacaaaaacaaaaaacaaaacaaaaaaaaccaaaccctaagattccagtgccattaaaggtctccccttcttctccatcagtgagagccacgtgggtgggcccctgcaggcggtggggccggttttccaaactcgggacaaatcagggctcttaactgcagaatttctgctgctttctaagctaatgcactaagcagccggcagcaactgacgggtaaacgtttaacaagtattccgattaatgtaaacccaatgatttcctgatgacgcctcccagcgcctgggactgacgggacgcacgggcctggatccagggcacgggggcctgggagggccgcgcgggccgagtccggggcagcgctgccttcccgccaggcccagcccctccctggccagccccgtccttgtccccaaactgggcccgcccggccgccaggccgccgggcctccggggccctcgcgcatccggctccgaaagctgcgcgcagccatcatcagggcccttctggtgttagaagagaccccggcatcatcttttcgtcgcgtgcttcccccagagtcacctggagtcccgcttaacaaattctccgacaccaaccgcctcggacgccgacgcgcgcaccttggatcttgaggctcgtgcgtgcccacgagcatgcgcttcggagggggcgcgccaggccgcgagacaccagtgcgcatgcgcaccagttgttccagccaaggatccgcatcccagggttcagtgaaccggtacctacagtctcaatccttattcccttttggcatggtgttaaagactatgtcgtagcttttacttttgtttttatttttttttcccgtgttttccctttccttttttttctcattttcacctttgctcttaactaccgtttaattcaatatatattttatgtgtttacttattgtcttctctccctagaatgtaagctatgtgaaggtaaggagtttatat

SEQ ID NO: 60900 - DNA, 2367 bp, Homo sapiens
tcagctactcgggaggctgaggcaggagaatcacttgaacccaggaggcagaggtggcagtgagctaagagtgcgccactgcacttcagcctgggcaacaaaacagggcgagattccgtctcaaaaaacaaaaaacaaacaactttaaaaaaccccaaaaaccaacaaaacagaaaacaaaacaaaacaaaaatgcaggggtaaagtgatggagtcaattcccggagggtactgaaaaggactaattcaagagaactcaatggaactcaatggaaagtcgcccttctttctcatagaggagagggaaggagagagagagaggagagagggagacagacagagacagaaacagaggagagagggagaggaggaagaagagagagagacagagagagagagaaagagaaaaagaaagccggtaaattctgctgagggaagctgtgggagttgataatcgggaccctgagtggagtgggaaacgtctggagctgcatatacggagaggcggtagagtcaactagggatgaaaacgaggaattaaaaaaaaaaaaaagactgatctggagggtccaccaaggaatttccttgtaacgggtaacagctgtaatatgacatgttgaagtattaacactgatgactgctgtctacattattttccatgtgcatgaattgagtagttacagggaaaaagcgaactgcctgttccaaacggcttacacagatgaactgaagcgaagaagaaaaatgaactttcttttgatgtcaacaagatagagtatcatttactgttgaagccaggttatactgattattttcgatctggtagttaactttatcatcattacatttggctgagtcattcctgggccctaagtagagacggctagaattaccacgtgagtaaaacattataatatcaaaataattagattggccacaaaaactaccacggaaagatactgcgtagcaaaaacgttggcagcaagttccaaagccttggcgaggacaagcaaggagcgcgcgcgtgcagccatacctggggcccgcccagcgcagccgagcgcgcggagaaaggccagcagcagccccgctcccgccaggcgggcggacgccggcatcctgcggcggaagcacgcggaggcacagccagggcctccgccctttgccagacaagggcacaccccaaggtctgggagcgtcgttctcagaaaagtacaagttcttctttgaaggagctccagaaaagcctctcccgcccctccccggctccccaagggcagggctggaccgagctgcagagttggccggacactgactgggtcaagtgaccttgggctgaccgcacccccacccccggtcgccccgggtcgctggtgcactgcgcctgcgcgcgtctccccgaggagttcgcggcgaggggcggagcttggcgcgccagtgcctcggtttccaggcaccgggaataacagaagccagctgagagcgcctgcgcggctgtcggttgatggggaggtcaggtctgggaaactaggccctggggttttccctgagcaggagcggtgcccgagggcctcaggtacgcagaagggcggggagacatgggatcagcacctccacctcctaagggaccgaagggcaggagagcgagaggacttgtccccagaggtggagtccgaagtgggggcgccccagttgacccttcgggacaaaacgtgacttcagccttaaggatctaaaaccggccgcggtcaggtcaggtggccctcaacgctcaggttacaaaacttttacagtctgcgccacggggactcctgggatgagggtttgacagccaggcacctgctccaggccctagcagcttttgtgctctttggaatcaagcacggttccagcaggagggaagccctgagagttctttgtgccagtcactacctctgggccacagctttctcacctgtaaaatggtgaggctggactctgcgggaacccttcagtttacaggggaagaaacgggggccagcaagggagaagtcgcttgtcctgttacaggcctagaacctgactttctagtcaggtgctctttccacctactatagagtatactgtgcgtggcagaggctggtgctggaggaaaggaaagctaggtggcaggaacacctgtagcaccttcgtttttctaccctcagggcctaacacagtgtcttgtgcataatcactcaccaaatggtttttgaagggaagctttggcaggtccagcaacactgtccccagaaaagtttaagggaatgtgggcagggcaaatgtagaaatagtttgctttagcagccgagagtgaacctcagacaaactcttcccgtgtatctggtt

SEQ ID NO: 60901 - DNA, 2600 bp, Homo sapiens
agcaaccccagcaagttctcattaaatgtttaccctaaagtaagattttatgatcaaatctagtgtatcgttagtttttggaagtagaataatcactgcagggttttacactagtatatattaacttgggattccgtgatccatggatctctccaaaggatgtgcatatgtgcaaatgtgttgatggagggggcaagattactttgcttaggttatcaaaggggtccttgtgccccccaaattaagaactaatggcttagaatataccaacaaagtatttcccatgcataaaccctgcaagataaacactgataaagaaccaacacacaaagatcttcccaatgagcttcaagaaaagcttccaactgagtgatcactgctgaacttaaagataatgacaaaaataacggagttgccacgggtgtggggattttgaagctatgcccctcctcctcaccccgaccttggagaactatatatacagcatgagaggaaggaagttttggcaatacctcacattcgtataccactttaatttacagaacagagccttcgtttgattctcaagataatcttaaaaaaaaaagaaaaagatgatttcaaggtattatcagtaagcccattttacagatggggaaactaaagctcaagagacggttaggtgacttaggacaatcaaaaatgactagtcaaaccaatgatctagccaatttctagtgccggtgagtgggaagagtggtgaagaccctaagacatataccccgtgggcgcctaaagcactaagctcacgacgctgggaaagcggggccgagaaggagggactcggggcgacccgacagcgccagacagggcggccggcgccgagggccgctacctcggtgcggcggtacagcgtggcttccccgaaggcgccgcggcccaggacgcggatggggatgtagtgcagttcctcctgctccgccgcgccgccgccggctcgcggcccctgactggcgctaggccccggactcgagtccccgcaacccccggactcgctcccaaagtccgagttgatggaatcgcagtgtcgctcgtactcgcccagcaccgacatggcggcggccgcgggccttggggaccagcctgcgtatgcccggaggccctggccgcgctgcgtcccgctcgcttcagatgccggcccgcggatccgtcagcccagcaaccccgcgaagctcgatggtggctcctgccccccgacccggaaacagttctctgtgtttccggcctggctgagtttcctccgcctttgcttaccctcttggctagtctagcggccaaggcttcccgctttcggggaaggcctgcaaagtgaggcctcgggctagggttggcgggcgcgtggtgggaaccgcgtggaaccgaagggctcccacgggaacaagggcatcactgacggtacggcctctcgggtctattgacccttctctgcctccccggtccggactcatacaacttggaggcccagaggtcgtccagtctcatcttgacgtcaggtctgtgacaagagggtgattggggaagcattcccagtgtacaccttcttccccattccaacgttggacagcattcttttttagagagatagtatagtaaagataatatggccgggcaaggtggctcacgcctgtaatctcagcatgttaggaagccgaggcgggcggatcacctgaggtcaggcgtttgagaccagcctgaccaactggtgaaaccccgtctctataaaatacaaaaattagccaggcgtggtggcaggcacctgtaatcccagctactccagaggctgaggcaggtgaatcacttgaacccggaaggaggaggttgcagcgagccgagatcgcgcactacactccagcctggataacagagcgagactttgtctcaaaaaaaaaaaaaataataataatatagacagcctaaatgtctgcctccggtcatctcggtccctgggccgagttctttctcccagggccatcctaagtccctccctcttctacacaactccaaaaatattttaagtcaactctcctgacactttccttctcccccgtctctttttccagattcaatttattctatgtgtttttccagatatttgaccatatgatatcatgaaacattctttgagcacttggtgccacacactgtttgggaacaggaaatctgcaataatgttctccctaccgtcaagtaggaaaacagcaatacggtgaacaataggtgttccatcagttatgtgaccttgggcaattatgtgaccttgggcaacttctcatctccaagcttgttttgttgtgagaatgtggtctacatcacagacataacagctaacatttattgagtgttatgttctgggtactatgctaaaggttttttacgtattatctcacattattatgtattatcctatgtattatgtattatgtattatcctaacattcccattttacagaaacagaggtacctaagtaacctgcttaatgtgacagacctagtaagagggagctgggaagttgaacccagcaatctgaaaaagcaggatgtgatggggctaagagaaagcc

SEQ ID NO: 60902 - DNA, 537 bp, Homo sapiens
atactcacttccccaagattctcactttataaagcataaagacaaaatttaagagcaaagaagaagttcaaaaaggtagacagcaggaataacagatttttcacattccaagccaatctagagaccctaatttggatttggactttcctcctaagaataaagttgcagacaacattgaacttgggtaacataactttccagatttgctcattgcattggcttaattctgaaggaagaaggctaataattacaggttgctgaaaatgtctaaatgtaagtgaaactggtagaggacagcctggaataagcatcaaggtgaaagtactgaaaagagtcatcacagatttcatcatctccatgctaaggcaaggaaagagactaagtcattggcctaggacaaacaactgaatttaacagtgtttgcaggatttgcacacatttgcccaaccaccttatttcctggaagaagagattataatctcttaattttcctccaagatatgaacagtgtccttcaaaaacttttttttattttaa

SEQ ID NO: 60903 - DNA, 1538 bp, Homo sapiens
agtataataataattttgaaaaaaaaaaaagaatctattccatctgtgacacttactagtttatcctacctctgagtctcagtttcctcatttgtaaaatggggctaacagtacctacctacttcatagggtagtgcatgaaccaaatggtaatatatgcaaagtagcacagtaactgacacagcagatgctcaataaataacattttattaatcacggttagctctgtctcctttactttcctgcaggtatcgcggtatcttatgatgccaatccgtataaatattcaacaccccaacatttatttggagaaccaaattacggttcaatgtatctgagaccaaaactggtataggacgttgacaaccgccccagctcaggtgtcaccacatccgccaaagcctcgcagcccttcttggggttcccaggcgttggtgacccgccccgccccgcgacaggcaaccagcggggtgagggggcgggctccaccgcacgtcctttgcgctcccgggaggccagaacaactcccaggcctccgccggcccgactcccccgaacccgagcctcccctcgcctaagcctgccgtcttccctcccggccccacgtcgcccaatgccgcaccttgaggtggctgcgcaggccgccagcgcccccagactggtcggagatctcgtacgcgccagtcactagcaggtccttgtgaatctcctcacggaggcacttgcgagagttaatgggcagatggaaggagatggcaaggaccaatctggggccgagcaggaacaaaagcagcaacgctaacggaaaagggccgcgccgggctggtgggccagacaaaccagacatggtgctggagactcgttcaccaccgaaggcctcaaccgcgccggaaccggggggacccacgtgactcacctctgaccttctgatgccgtccgcgccattttggagactggcatgtagagaaagactctatagcgaatcttttgaaaagggaagaaaggataggtaccatgtcaaaaccgcaagtttaagcagttaaagaagctttaatagaatactattgcaacagttttatttttgttgaagttagtgactactgagtcggccatggcaagtatgggcagccctggaagtaattctcctttaatttccgaaagatgtacccacgagtttaaaggcgagtgacaccatagcaaccaagccccaataggaaacagccacaaggcccttcgctgggcccgcccaccggccgcctaggcgcgagggcggggaatgaggctgtgtctccggggatggggcggtttgcaggcactcccaagcgcctttgacaccttgatgacacctggggcactgagacactagagaggaaaatttcgaggaaagatttcaacttggctattagacagtgtggaccttagagaagaagttttaggggtcacctgatgaatgtgtgccgggcagacatccggttcatgtcccatagcagggtatttgggctggagtaattgtctggctaactgaatgtacatggtat

SEQ ID NO: 60904 - DNA, 489 bp, Homo sapiens
aggtgcatcagttttgaggcttactctcttttctgaaagccgtcagctctatcttgacccctgagtttccagtaaaagcaatcgcttgggtgaaggcaatgcagagaaagagcacttgaaccaaataagagtttgacttaactaaattttatgataggaaatgcttccaggccaaaaacctcaaaagcgatcaaaggttttcaaagactggatccagtgagtacagtttattaaccctggcctgtgtccgggccaaggtcatgcccagaggatgtggcaaatgcaggatctgatttttttttaatgtggtcttttagagggtatatattgacattcctggttgcccaacttagtatcttagtgtaaggctctgcacatcctaacggtcctgtttgcccgggactaagatatttcctgggatgtgggacttggcagtgctaaaactgggacaatattgggcaaactaggacgttggtcatcttacaccct

SEQ ID NO: 60905 - DNA, 1166 bp, Homo sapiens
tgtagtagcatgatcataactcactgcagtctaggcctccttggctcaagtggtccgcctgcctcagcctcccaaagtgctagaattataggtatgagccactgtgcctggacagattttgttttagaagcaggagttaagtgtccatgagtagtaggaactcaggtaatccagcccaaatggacttgatcaaccatcccctgatcccggatctcagcgtgatgggagtctaggaaacctgccctttgacctgaatctggatgacgttagtaatacaggaataggtgaaatgccagccacacctggctggcccatgaaaaggaaatacttcccacgctttgcttttgcacaccaagggcccccaggtaaaggcatccagggtgcaagccgcctgctttaatgcccgggtgtggctgcaggaacaacccagtacaaactggagtgaacctgttgccctcttccttccctgctgccaagccaaacagaacacagggaacacaaatagaatcatcacagtaaaccagctgttggagccagacactgggagaacccactccctggcactgccaccccattcacgggtccagacatgatgaagtgctctgagggctgaggaaggtgtggcccgtgggcattcctgtccagcaagaacccctctggcttgtctgtattcattgccacccacatggacctctctatggttgcttgccaaagccgggagggagaagggtctccccttcctccaagcccaggatcaccgggaaatgcccttcccacctactggacttgactaatgctgcttgtcaagaagggaactcttcagacacataaaaatcctaaaggtagctgaggtttgaaagaattcgtgctggacgtgcttccctgcagggtcaggcattggggaggagggagaagaggaaggaggagctggttgtaagtgacagctgcagataaatctgtgtggagctgtccagggagctgttgaactcaggtagtgccctccctagcctggggcaggtcagagtctccccgaaccacccaaacctttctgctgcgtgtgctctggggcatgtctctctttgcctccttggatcttgagccaatgaggaaatataggctagtcccagaaggcagggatgaatttgtgttctttgtggtgtcagcac

SEQ ID NO: 60906 - DNA, 963 bp, Homo sapiens
atgtatttggcttcataacccctttccctcccgtccccctctttctttctgtaatcaaggatagaattagaagtaccgaaggccgcagaattgctttaggattcagagcagctccaaggaatctgtgtttacgtattatgtgtgtttttccgtttccctccctttttatgagtgagaaaaaaaagcgcctaaattcccaccaacataaaccaatgacatacaatgatgaaattctgttttcacctctgcctgtgacagggaatgcaaaaatagcaagtggcccagttccacgaatccccgcctcctgccctccccgctcctgccgggttggatctctaagaatggaggttagcgcacagcctcgcgcgggccgctcagcccccggacccggcggatgatgtcaggcgacgggagcggccgcggccgggccggggaggccgcggcccaggggagctgggagggagggtggcctcgccaggccgacggcgcgcccggccgcgcggcgttgcctggagacggccctggcggcgctgtgttgctgtaaacagccgcttccctgttactatctatagcaggatctcctggctcccgggcgcggcggctggaggcaggtctgcggtccggctccccgcgcgccccgaactatccgcccgccggcctcatcctgcctcgcccctctccaggtgcccaccgcgggccccgacccccgggcccgaagagtggagaagggaagaccggggctgtgcggggacatgcgtcttcgcgccctggaggtggccagcgcgctggggctgagccccggcagcgtgaccccggctgtcctacgcagcagggcaggagattggggggcgtggcacactctggagcaccttgcctccccaaagccccgtgttccaggacgtggagccgctcctggggtcccagcagtcgaggtattccgcccaggcgcagctggacactgtc

SEQ ID NO: 60907 - DNA, 1152 bp, Homo sapiens
gtacccagtatcgtaaagtaggttatcgtattctcttattttggatcctccactttctgcttccaaacgcaggaacagtgctagtattgctcgagcccgagggctggaggttaggggatgaaggtctgcttccacgctttgcactgaattagggctagaattggggatgggggtaggggcgcattccttcgggagccgaggcttaagtcctcggggtcctgtactcgatgccgtttctcctatctctgagcctcagaactgtcttcagtttccgtacaagggtaaaaaggcgctctctgccccatcccccccgacctcgggaacaagggtccgcattgaaccaggtgcgaatgttctctctcattctgcgccgttcccgcctcccctcccccagccgcggcccccgcctccccccgcactgcaccctcggtgttggctgcagcccgcgagcagttcccgtcaatccctccccccttacacaggatgtccatattaggacatctgcgtcagcaggtttccacggcctttccctgtagccctggggggagccatccccgaaacccctcatcttggggggcccacgagacctctgagacaggaactgcgaaatgctcacgagattaggacacgcgccaaggcgggggcagggagctgcgagcgctggggacgcagccgggcggccgcagaagcgcccaggcccgcgcgccacccctctggcgccaccgtggttgagcccgtgacgtttacactcattcataaaacgcttgttataaaagcagtggctgcggcgcctcgtactccaaccgcatctgcagcgagcatctgagaagccaagactgagccggcggccgcggcgcagcgaacgagcagtgaccgtgctcctacccagctctgctccacagcgcccacctgtctccgcccctcggcccctcgcccggctttgcctaaccgccacgatgatgttctcgggcttcaacgcagactacgaggcgtcatcctcccgctgcagcagcgcgtccccggccggggatagcctctcttactaccactcacccgcagactccttctccagcatgggctcgcctgtcaacgcgcaggtaaggctggcttcccgtcgccgcggggccgggggcttggggtcgcggaggagga

SEQ ID NO: 60908 - DNA, 3029 bp, Homo sapiens
ccattagaaaggaaaaacaaagcaaaatcagtatccgcaacaaccttgcaggcacggaggccctcagaagggacaggagaggccgggcgcggtaatcccagcactttgggaggccgaggcgggcggatcacctgaggtcaggagttggagaccaacctggccaacgtggtgaaatcctgtctctactaaaaatgtaaaaaattagccgggtacggtggcgcgcgcctgtagttccagctacttgggagcctggggcgggagaatcgcttgaaccgggaggcagaggttgcagtgagcagagatcgcgccagtgcactccagcctgggcgatagagcgtgactccatctcaaaaaaaaaaaaaaaaaaaaaaaaaaaaacaaaggaaaagaaaaagaagggacaggagggcctccttccgctcctgaccagcccctgctggcccgtgggcagagggagagccggcttccagggacctcagggagggacgtttgggagtgctctctcagcgtcccctccaccgccctctctacacccttgccgcgcccctgtcctcgtcggccaggccaaggtttctcctggcccttcccagcttccggccctttgctccagggcaggtcgcagggccagacggtgccaggagctcgcgagtcctctgtttactgtttggtttccacggtgacacgtaggcgccgtcagcgactcccgtcaccgccccgcagcgcggcccccacccggcgccgtgacgccggcccgccgcttccgctctgcccatatttggctcagccactgcgccgccggcccggggtaggctgtgggcgggactcccgccgcgccccgcccccggtccctgccccgcccctggaatgctgggcgaaggctccgagccacgagacccccgcctcctgtcccgggacccacccaggcggaggcaagggcaggggcgctgggggcccagagagagggcgccgcgatggatgaatgagctgtttccagcattcctgtgcgtctgctggttgtagctgcagtcaagatttggggcggtctcgtttgttgtgggtgggtgatctgggatcacgattttctcactctgtgcccggaaatcatgccatctctcgcccaacgctgtattttataggcttcaactcaaaattttccttcatggcacagtggaaagctttgaagacggcggttctggggtcagtgttgcccctcgggggataagtgaccttgggaaggccattttccttttcctggcatgataaaacgaaccgtgggggtggtccataatggttgcagcactgtcatcaggcttgtgaggggagcttttccatcaccctctaaccaccccctccccaggacataactggaatatcagtgaagttctttgagcatcgaccccctacagttctgccccctgtggtgattggatttgtgtgtctctgcaccttgctcctattaggcgcttaatgaactttagttaactgattattgaatgaataatacgaatcaccttcataaatccggacccctgcaattcctcttccaggccgggcgagggggagggtaggggatgggggagaatattgagatgattaataatcgcgcggcagggttgctgatgtaaagcgatttgcagatctaaagggcaataagcattcctgggagaaatccagcgagattccagaagtctctgagggagccgtgggtgtgtaccgccgggcccagagggcgggggtggggcaggcagtgccgcagtggccgctgctggggagccgattgcaattgcgaggagaagcgtggggttaatccttcaagacgcctgtcaccatcctcccacccccatccctgccccctagattccccagttcctctggctgaaggagtgtgtgttttccagagtttcagagctggaagtcacatcggagacttttaatctaatttaacctatttcgccaacagggaaattaaagctcagagaagttggttcgaccatccaaacttgcacagctagttagaaactgataaaagtcaggatatctagcttcaaatagtgttccacatcgcctaggtgcttctaatttcctgtgcttcagaaccctgttgcctggctcagctggtgggttgtacatttaggctaaatattgacttcagggctcttaaagaacgccattgtcacgtctgctgccacacgcagcccacaccatgacaccagggcctgggggggatggccaagaattgtgtacttcctaaagcctcaagcattcctccttagagcagctggaatggtcacccctgtccagggaacaggagtcggctgttctgaaaccagtcttagtctagcagttggtcacttttcatagttacccaagccttgcattaaacttttctcagccaagattacagcaggaggcaggagtagccctaacccttttctgctgtttggaagtcttttcatggcacatggagggttccttgctgggggtggggaagagtgcctcttcaatgcttctctctttctctttcccctttcagtctcacccaacttcctcttacacgctgtttcttccctaacttctaggctgaatatgaaggcaactcggactaagaagacgactgctttccaactgccctcccgtcctgcagccgcctgatttgaggaaggggctgggatccttccccttgccctctggttgttcttggagttacagcagccccgcggcagctctgccccctagtgcacatgtgaggcagcgcgcccttctccaatccagaagcctcgtcgcggtgctgccagcaagggagtttttctgtattcactttggtggaaatagcaaaacttgacagaaaaaaaacccaagccaaaccaaaacacacgaaccattctagccttttctctctttcgtttctttctgaggatctggccgatttggatgcagaaaacatgcctgttgcttctgctgcgaaatctgctctttctcttcctgctatcggaaccctgtcccttctttcaaagcctaattcaggccag

SEQ ID NO: 60909 - DNA, 1452 bp, Homo sapiens
ggagcataggtgtgaaaacaggaattgtggcagccgttttctcaccatgagaaaagcctgcctgagcatgaagacaacaccatggagggcagagaggaaaacaccaagaagaagaaggggttttgatgacattgtggtgctattgagtcaaacctacactgaagcctccttgagccctcggctttaggcagcttggggctgcaatgtgaaggaccttggggcttagcttttattctggggcaatgggaaacaatagacagcttcaaggaggggggcaagcccactggacctgaattgtaggaagttgtctgcagtgctgagtgcaaagagcctgggccaaagccagaaatgaggacctgagccaagacaggagaagaggaaagagtctgagagccacttgggtgacagaagccagactaactggattaagagggcatgaggaagagggtgtgtgctttaggaagaggctaaaactcttagcctgactacatgaatggagaaactccccttcccccttcttttgcctctatcactgtccccctgggaaatcatgtccactgccaaaccctgtattctcctcttctgcagattcatgcctctgattacaattctttatgggcatgcctggtcctttggagcagggaccatgcctcgtcatcttcacatccccagggactagcctggcacatggttggcaccgggtcaaggctgacttggattgagttctcgctgagctaggcatgagctgcaccctccccctgcccccagggcttagtcatctgtttcataagcagcttccaaaagctgcagccccaatacccagcttccttgttgttggcaggtgttggcagccctgagtgccagaacgccagggagccagccactgggaacatgctagggtggtgagcaggagccaactaatcagggctcatatacatttacgagaggcgtgtgtgtgctccccaggagagctgtaacgacactccctttccaggaaacacaaaccaggcctctttcctttcttttttctcacctgtcctgtcttgtggccagaagcacattcattggctttccatgcttctaaaataaatcaaattgggggccacacccttccaagctactttaggtttgctccgtggaagctttaaccccttatcatcccaccaggcctgaaatgcttgggttccaatttacaaaaatattaactttttatgtcctttcagaagaaggatctcagttttcctgatgtctgctcccctgccctggaatttctccctctgctcataattcatcccaaggatgttgacttctgtgttttgggatggtcaggggctaagtggcatggagggcaaatagattaaccttttaccaactttccaaagcccttcctccttgttcttttttgtttttgtttttttgagatggagtctcactctgtcacccaggctggag

SEQ ID NO: 60910 - DNA, 520 bp, Homo sapiens
ccctgaggccagcgcagaggtgtctcctcttacaggagtgcattctaattgcaaaatcatatcctcgttttttaaggagagccaattcctccagttccgagtgtgggggccttttctggtctatggggacctattctggtctcagggggtgagtttccaggagcccagggactcagcggggagggcggctctctagaaggtacactttggctgacttagggcagggtgctgagacatgcaggtgtcaaaacctggcccggattgcctggagctggaagagccttccaagaagtgaaaatcccacccctcccccgcctaggcccacacaacagcccagtcataggggcctccttggctcctccctacacctctctctaccacaccaccaaattgttgagtgtaagaggaaacgctacctcccgcagaaaacctaaagggactttttttccccttcaataaacatttgctgaaataactttttattggtggttgttttaaaatgcatagcagaaaaagagtc

SEQ ID NO: 60911 - DNA, 2600 bp, Homo sapiens
cctgacatcactctcagaaggaggccgaaagtcgctgagtataaaaatcgtcactcctatctggcttaggcagaaggtagggggctcgatgggtacccaggagctctggaggtaggagatgccatctagggaaccccgttctacctgagggctctgtgtctctgcctttgtatactggagggcaccatggatgtcgccttccctctggagtccccttcaccatttcctctctagaaggatggaaggtgggagtggggttggctattgaagctggaacggggaagaaggccacttggggtctgctgagggctgggtctgctcactgctgtgtccggagtggaaaggagaagcccgctggagcagggtacaagcccaagggtcaaactgcgccagcagtagagcaagccgcggtctcaggctgcagccctagcagaggtcaggctggtgcagccagccgtctcggggcctaagggcgctggcgggggccggtgggtaggggtaggagtccccaaatgccttcatctcagcccatccttctccaccgaaaaataaagcaggctggcgagatcgcctcctcacccgctcagtcctgaagtgtccaaggatgaaactgtgcggaaattctccctgtcgctctcagtttgtgggggaagcgccgggactgaggtacatggttaacacaggctgtgcgtgaaggggcttttgacttttcccccggctccggcctctcgcgtctctctcctagggctgcggctgctgctgcctggcgggcacaagccgggcggcggtgcgcggggggtgcgcttacataaccgctcgccgcgtcctgctttctcgagcgctcctgcaccgtggggtggcggagccgggggactgcatggaacccgggacgcccccgcggggagaggagcgcgagcggccgcgggaggagggcgcccaaggcggcgggggaggttaaggtcagtgggtgtgaagcgccggctccacaccccctcctccccggtcccctccttcccttcctctccgtccccctctgacgtctggagctggcagctcggccggttccgcattcccgacccctccccgccgcccaggggccgctatatagccggggctgatgcaacccgtcccgccgcccgccacagcctgcgggagggacgctcggcggccgcgacggggggcgctggcggcggcggacgctgcagcggcggcggggctggcgccgcggcggctcccgggccgggacaggcctgggcaccgggcggagctccgcggccgggcggcagcggcgcggagcgggcacggcgcctgcagccgggccccggccccgggggcgccgcctccccccgcaccttctgcacggtgggtgcgagggcgcgcgctgggggcgccgggacgggcggggcggggcagggcgcggcgcgggcacctgggacggccgcccccgcacgggcggagcgcgaggagccccagcccagccccgcggggaggctcccgcagcccagggacctcgagctttccccgcgccgggcgctgcagccgggcccctcccgcgaggcgcccggcagcctgaggcttccttttggttcccgccccgggacgggaggctccgtccgctccctggacagccggggtgctccctccttctccctcccgcgctctcctcccccgtccgtttgcagggaggtgctctcctcgggcggcggggaaggcggggtgagtggggagaaaagtgcccgcggagatgggctgtgcgggtggaggtggagggtgaagggccagggaggtgcggggttggggtcggggttagattgtggagggatgacaaggacctcctggcagtgaggaagcgcgactcccggaggacccggacccggaggagagtattgagaagggctcgggatttccatccaatgaaggcagcttctctcatggccattgcttcggagctctgggctgggaggggatctaggggtggccggggtcccctttgggctctcctgtctcccacgccaggttatataaggaggcaagcaggctcctgtaggtaaccagcctctcccttgcccagcccagcttagaaggctctcctctgctcctcccttcaaaggaggttgtcgaggggtaggggtgcagtggggggtgggagagtgtaggggtggattgggccttccacctggatccctggaccctgggatggcagagccaggctttgcctgggtcagtaggaggagcagggaagatgaggaggctggggaagatggggaggtcctggctcttttgcagggatggagaggctggtggaaggagaaatcagccgacccccttgggtcatctccagttgcaagatggcgtggcccttgcccagggtgctgccctccctgttggaatccagggcatggggctatggcccgaccacgtgtgctcagggcaaatgtgctcaggtctatatctcagaaagggcttgcagcctgcttaggcgtgtgtacccaggcttaaatcttggtggtctctccctagggtcttaattggaggagcatcaggaattgggaagctttgaaccatgtttgggtacatttgtacccaaacgtcctttaagc

SEQ ID NO: 60912 - DNA, 815 bp, Homo sapiens
gttcagtcactcagggtcacactgctgggaagtgatagcgctggggcctggtgtggtggacgatggctgccgttacagccgggtctcacttgtgctgagctaagccctaggcacggtactaggtctctttgtgaagtaccttgtttaccctgcacaagtaccctctgaagtaactagtgttgttgctgttgttatacccacattacagatgaggtcaacaaggctgagggaggtccaaggtcactggctgggaaatgagctcaggcagtctgccttgagcccaagctttaaccacatgccgtgtggcctcccatgcctctataccccttccaggcttctaaccagagctctgttgagctggggaggctggatgaacctggccgcagaatgttcgatcattttgatgacattgtctgatgagtgctgagccctgcagtcctgcagccttactgtctcctagttccgagagagagagagagggagagagagagagagagcgagagagcgagccggctgagccgctgtgcgggcagctctgtcagagctggttcttgggttgtttgccttgcagaggccagcagtctcctgggctctgtccaaacgcatggagcaattcagtaaaagaaaatgggaggaattaagttcaacgacaggttttgtgaattataaagtgctttgtgctgatgtcattattattacatggtcaacacatgacgttaaactgttttggtgccaactgcttgcctgcagtccctttgttcaagccatatttgttaagcatctactatgtgctgagcactgcaccaggcactggg

SEQ ID NO: 60913 - DNA, 1658 bp, Homo sapiens
gcttctcaccagtcttttgggggtgatgagggtcttgtgggggccaccatttctctccttttctcatcttttgaagtgactgtcaattggacaagaaaacagattgattgcctagtgggaaactagaccccactaagtcataaatatgaaatgggcctgaaatagacatatttcagcaaaagacatccttccccaaatagctcttctctagcaaaaggatttcctagcaatcatcatctctttttctcttcagtgttaggttttctgtctgtgccaaggtgatttttcctgtgtctcctggattctttctcacttttgtaataacagtgtttgctctttccttagcaaaaccggctgtaaatgggtgtcaccctgcctagctggctttctcaggctttgttccaaacacaatgctgtcttttcttagccgtggaaatggggctgttctccactggtttttgagagaatggccttttcctattctgttcatataaaccagcctcacacctcggcggcctgttgtttttggggttctcttaatgcaaaagaaggtttttactatggacaaggggagttgggagggccctggtcagagacatgctgcatctggctgagatacgaggagactgaggagtcagtttggaaggatccacctgtgggctctgatgccccacaaagattgtagggtgtcaggctttcagttcatacagaaggtgtcccctgcctcttcccagaaagcagtagccttccagttggtcctgtcactgtccgacccaggaccggggcacactcattccccttctctgaccttgagttcctggcctgaggatgcagccaggatctagggtctctgggtcttctcagttgcagaatctaaggctggagcttagtttgcagccctgcttcccacactgtttcctgcagatgctgtgcacacagggcaatggcttatccacccgtgcccccagccatgggagccgagtgactcatcttggcaggtggagccattgcctctgccagctcttgttcagagccttcacctggtggttggctgagctgatttgagtgagcacagcgtccagtgtgtgggtttgttcacaggtgaatgtgcttgattacatcctgctgttgggggcagctgaagtgaagtggaaagaaccttggacttggagtcaggagtgtctgggttcttgcccaggtcaccagctctgtggatcaggcctcccttcctccctaaccacgcaaggtgctgagcacacaaaaagtcaacaagatgcagactttgccctcgtggaactcccagtttaatggaggagtcagaaactgtgaatagaatataatacagtaggggccaggatacgctcagagcagagggacacctcctcagcctacagggtgtgaaaatcagggagggcttccagtgggaggtgatgctccagctgcatgtacaggagacatgagaagtaagccaaggggacagcagggcaaaggcatgaaggccagggaagtgtatggtatatggcacctcagtgtttcaggagcatagagcggaaccctgggatcaacaggtggtaagaccacagcaggtggggccaagtcccagcaacctcatttgacataggagcttgggcctcatccggagggtaaggtgcacagta

SEQ ID NO: 60914 - DNA, 1308 bp, Homo sapiens
cctgtcttttcccagcttggcagcctcgggcagacactccacctcgctgagcctcagttttctcacttgtaaaataaggcccctgagacccaccttgcagatgtgtttgaaggtcagtgagaaatgggagctacttgtgcttattaaagatgagccccaggaccggagaggtgacctgattgactcgaggtcacagagcagggcactgtggtgaccagagcccaggcttctgaggacaagcccactagggtcagctgactgccagaggtcataaatcagcagccgtgggccagtgcagcccacagatgtgttttgtttggctcatgcggtgttcctttcaaaatggaatttgttgctgacattcaaaagtgggagattttacttcaaaaatttatattttcttgaaaacttggaagaattagcagcactgagcctgcatcccactggggctagtgtcccctcccatggcaggaggggtggccaccgccccatccagccctcccccctcactaatggtgagttacttgcttgacccctgaggtgatgtgagtctgcaaccccagccttagactgaccatttgtcttgaattttctcctaaagccctgcccgctgttcactgaaacagctcaatatttcacagctgaggcccagaccttggccactgagtaagaaggcctggcaagagatgacgggagagacaggagggcagagagtttccaacagctcagccccatgggggatgctgggagggcctggcccctgcaggctgccgggggtcagcaagggagttggctgagggcccctggggtttcctcattcctccctcctggagtgggaggaggctatgggcctagccggctgggcaggctgagatcttgtccctgaattgccctactttgttgatggggggtgggggagtggggagggactgcagcccctggcttagtgcagccctgtttatgtaggggaatgtctggtatgtttggtatttgggtgtttacttcccagggtgctcatgggtccctggtgttgaaatgtggctcctccatgcagggggggccctggtgggcctggctggctgtgtgaggcctgaggctagatttggaggctgcggggctgttactccaggcctgctcactgacaactcagcacgccctgaactccccagcctgctcctccctctccgcagtactcctttctgtgccgcattctgcccggaggcaggccagtgtgccgctgctgcaatagcaccacctccgccttgcctgcgaaggaaggcagggaagctggcatcacggaactcttcc

SEQ ID NO: 60915 - DNA, 4872 bp, Homo sapiens
gctaagaacttcatccatacgctgtaatacttagaacgcttgtaacatttataataacctgtttggttatttgactatgttttcttttttctgtgagagcagagtctctgtcttattcatatttaagaattctgctctgtaataggtgataaataaatgttaatttaaaccgaatgaaacataaatatgactattattgtcctgaaagggctttcaatacactaggataatgcaggtcataagtgccataaatgaagagcaaagtgaattcacttatgcattcattcgtttgaaaaccatttactcggcatctgttaggtactgagcatatgactataaacaagagaaacacagactttggtttttacagggcccacttctcaccactttcatcactgtctaactggcctatgctgccagcatcttttgtttggatggttgcagtaatccaatactgaaatcctgactcatctccctgcttccactttgctcccctatcgtaaaatctcaactgtgtccagagagatcctctaaaaacctaagtcagatcatgtcactcctctgctctgacacctccaatggcttctcatctgtaggagattgtagaaattgccacaattagttaaatttttcctatcgagaagtgaagtctgtttctcaactcattgagtctgaactggccttgtgactctcctcggccaatagaatgtggcaggttctgagttctgtgctagctctgagcctgggttccatggggcttcgaatgcttctgctcctactcttggaatcctgccactatcaaataaacatgctccgaccagcctgttggtggatgagagaccatgtggaggagaaatgcccaaggcaaagccaggccagaccagtcaattatcagccaacctaccagctgtctgaggacacatgaccgagcctagccgagatcagcctagcccagcctatccccaaagaacctttcagatgacccacagactcatgagccaaataaatggcttgagtcatcgaagtttctggtagttttttgggcagcgaacactgatagactatctcatttagacaaaaagtcaagcttctttttactaactgtatcctcagtacttagtgcctggcacatggtagatgcaccatgaacgtttgttgaatatattaataaaggtgtaaatggttttaacattctattgagggaaacaggaaaaagataaatcagtaaacgaataaaataagtataaaattgggtaactgctatgggagaaatgaatagtagctgaggtagaggataagaatgaaggtggaaggggaaaccctccatgggctcactgtgtctttcagaatgaaagctaaaatcctgatgttggcctctaaggccctccctgaccgggccattacctcactgacctcatcgcctgccacttttgctgcctctgatatccaactacctggcccccctgctctttttccaatactcaagcacacttccacctcaggtcctggaatgtccttccctgagacactcaccattcactccctctctttcttcgaatctctgctcaggtatcccctctttgggcaaggcccttctgaccacccagaattccctaacctccaaccctgctttattttcctccataggaaaggaattttgtcttacttaatttaaccttagggcaatattgtcttagtctagaaattcagctcatggatacaaaaatcctctaggagccgtaacttcctgtcaatcctaaaatttaataaggcaaatgtttggcttcgagccatactgggaataaggtaaggccttttgaaaaagccacgatgcccaggtgagggttgaattgatcactgagaaccctacaaatgcgctcatggcaaggctgggaataccctacacttaccctctcggtcatttacttcagagtctgcggggcattctaatccgcgttgtcatttgctttgtgccacattcctaagaggtaggcagggcaggttttatcatcctctgtttacagatgaagataatgaaggtcacatagctcaagtgagctacccagggccacagacatacaaagtggtagaaccagaatttaaatcttggttggtctgactccaagtgtagtatttgtttcactttttctttctttctttctttcttttttttttttaactgtttctgcattctgggttctgaccaggtgaccttgaatcataaagattcagggcctgtcttgagctgctcaatatggaaggcatcttttctctaaagagtgtgagctccctgccaagcagcacaggcgcttaataggctttcagagcagcaattctagaacctcccttgtggctttctgatctcccacagcccttgtgtttgatggtcaggaaaggagaatacccttggatcgtcttatctccagaccaccccgaggctggctggacttaaggggtgaggaaagacaagatgggtgagcagctgctttcggctgaaaaccagaaagaaatcccagtgtttttgctttattttggtttaaaaatcaagtcgtatgacaatggaaacattttcctggttgtcctctcctctctgcccatgttgacagaagacggacttgctaattctggctggggtttttccctgcctgggctgtttttctcttttatcttcatcaattgaagagggctgctgtgtctttcaaactgtcggaaggtatctgtatttttttttctttcacataattctgtaggtcttttcccagatatgtatttttctctctaacttctaactcgctgaagtttccgcccatgtgacttccagcgtgagttaccagaaaccacaagagagagagagagcgtgcaagccccaaagcgagcgacatgtccctttggggagcagtccctctgcaccccagagtgaggaggacgcaggggtcagaggtggctacagggcaggcagaggaggcacctgtagggggtggtgggctggtggcccaggagaagtcaggaagggagcccagctggtgacaagagagcccagaggtgcctggggctgagtgtgagagcccggaagatttcagccatgcctcacagctccgacagcagtgactccagcttcagccgctctcctccccctggcaaacaggtagagtcctcctttttctctctcctaccttctgattctcctgggggatggaaagagagccaggcttccttgtcctgcccagggagctgaggatggaggaagtggctcgttgcacgggcactctgttagacttaggacatggaatttgctactaagctgtgcatattggcagagatcctcatccttccacccattctgccaaagcccctttttctctccattttccaaggctgcctatcacctctgcctcactggggttgccaccctaaaaagctttctaggaagcaaagaggaggatgaacatcaaagaatgcagagaaaagagtctactgttctccaaggctgtagaaaagtgagaggagttttcaagtgggccgctggcatgcacagctcaaatcctagatatgcagtttcccaggagacagccaatagggaaggggagaaaaggggttagggaaaagttaaaaaaaaaaaaaaagaagaagaagaagaggaagaaggaggaggaggaggagaaacccaggctagcatagaaggatctctctactggggcactgcctctgttgctagcacagccagcaaggggagatgctagaggtccagccaatatctctttgcttgtggcttctggataggagcaaggaaatgaatgaggaggtggctctggaaatttgttggaagacatttgctggtagttcatcttagctctggggaaaccagagagactgagatagggattgtgggagcatttggagtctagattgtgacttccaagtccaaaggttttagcttgaggattaccaaaaaaggagtgccctgcccatctcacagcttctagggttttgttctgcaccacactcttgacatcccttgctgtaggaagccctcctctttctcatccgacatgtatccgtgggttaaaattttctcaaccttcatagtttaaaaacttcattctttccttagcacagatatccacaagggttttcaaaatgctgcagccaaaataaaagtatataaatattgaacagggcgtatatcctaagcctctaataacggagcagcaggctgggatgagtctgggtggagacctctagaaggcacagaatccagtctgctgctcaagatggtgtcagagtggctctgactgcctggaagtttgtacttttcttaggaaggaaattactcatggcttccatggtaacctggtgccccatcccccttagaggaagagcacttccttcctatctatgccaatgacctcctaccacaaaggcctgaaagtattggacatgttggtgagcccagtacttagtgatcccagagctttgcccttggatctgtgcccctctagcctgtgggagacgtggaagggaacagggcatgagttgccaggactcctacacctacactgcagcatctgggagagaactggagctaacctctctgcccaggcacaggacatgcctctctctgggtgtaattagagaacacccaaagatccccttatcctaccaagcacccatctactgcccaccacagccaggtcacctccaccattaacgttctttttggcattgatgtgccaggcattgtgctggggccatggggaatgtcacagtggctgagcacaacggaaggaaagaggaggcagatctgggatgcaccctcagctcaggaatgcagcagaagaccacatggggtgcagagtagctagcggggaaggg

SEQ ID NO: 60916 - DNA, 1975 bp, Homo sapiens
tttataatatagatatcaaaattctcagcattgatcattaccacacatgcattaggaggatttcttttctaattttgacatcaaacattgaataatcttccatcacgacatggaagagtattcaatcttgacgttatcttttgaacatcatacataaatatctcagcccttgggagaaccaactgtaagttgggatttgagtgactctaaggtccacagtactatatgataaaagatggcaaatccgtttcctttgtgtagccatcttggttggttggtcatggctatctggtgccgtacagctggaaggatttcaagtcaaagaccaggatcagtggaaaagagagctgaggtcaattaagaagctttattcatgaaaaggctaaaatcagtggagttgccgggagcagtggcaaatagcagtgttagccctgagccgagctgttgacaagtcatatctggcctggtggatggagctgaaagcaagtgagagtaacagccaagtttgaaagcttgagatttaggtactgtcttagatggaagtgggccaggtgcttgcctggggctgcctcctgaaggagtctcacaccagtataagaaaaaagagaggtttacaggctccagggatgtgctttgtcatatatgacagaaaagtcatgagtataaattatgcattaaatgaagctttgagctaacactgtgagaaatacggtatttacaattggagaaaaattgagtaatggaggaaaagatgtttgggtagcactattgttcttggccttctgaggaggcagagaaggatgcttacggtcctatttcactcctggaattcttttgctctctctgggagaccatgccataatgtttgttggcacagataagtcacaggtcaggaatgttcaggctagttccacccttaaaaagttcaatgtagaatcagtgaaccatctatggaaagagatgcgacccttctgtctccattgctatgaatttcttttaagaaaaaaccatgttaattgaacaaacgactatgtattaaccactgtgcctcaagtgctctccctgcagcatctcatttaatctgcataaaagctgtattttataattccttgcattaagtaacttgatggagatgacacagcttgtgactaggtctgtctgacgtcagaacccattttcctaaccattaagttttactgcctctttcttcaaactctgatgaagatgtattcatcttccctaacctatattttccttgaatctctacatgaattaatttttttgtcttttaagcaatatcctccaaaatctacactgtcccccagccatcatcaggcgtgatcaagaaagtaaagacatgtttactttcaatacagtatatccattgtacaattgatatcatatatgtcatatatatcatgatatcaacatatatagataggtactatatatagatagatacaattggtatatcaaatgatacaatatgtcaattgaaatcttttttgagaagtctgtgtagcaataaatgttaacatctttcacaggaattacctttgacacaacagagtttgaagaaaaaataatttacaaagatgcttagttcatcattatctgtgaatagtaaatactttaacaatgctataaaacttgacagggggcttacaacagaagatgaagcatattatgatacattcatacaataaaaaaatttatgctggtactaaaaatgattatgtagatctgtatttatcagcatagaaagatgtcagtgatacagcattaagtgaaaaaggcaaattacaaagagcatgcagagtataaccctttcacgtaaaatttgtgggttttgggcatggtcgcatgcataaagagatatccggaaggatattctccaaaatgctaatagcagttatgagtggttgagtttgggtagttcatcttattcttggtacttttctctcttttttattat

SEQ ID NO: 60917 - DNA, 5112 bp, Homo sapiens
aaaaaaaaaaaaaaaaaagaatgactgtctgtctacataggatgatggtcctaggtcacaaactgacagctgcctgttcagcagatgtcttgatggagctattctcagcagcacccagacttccttctcttgagcagaatgggagtctccccagagtgcccttgtgcaagcttctcagaggttttcttactcccctcttttgaacttagtctagtcccctgcttcctaggaggggtgggttgggtccacagtataaaggccccttcagattgtgggatatctgtagagggttccactacgggttcacatgatggcttgtggagggaataacaatcataatagtcatactaccttgttgataaaatttcagaattaagtgggaactcagagatcttctagggtgacttgccacatttccaatgaggaaactgaggacgcccaagaacccaaacctcttgccttcccaccagtctgcttttgtttcatgccactttgctgaacagagctttactaggcaggtgtttacataaggcctattgcaaaggtgggccaagaagcaggccattaaccagaacacttgaactgcctagacactcatcagctccagaacatacggctatacatgagaccagaaagagagtgagtccaaacttgacaggggctgaagtgtaaatgtttctttgtttaaagagattttaaagttgtaatccaaaattagaaagggcagtgacatattggggaaaatatttgcatcaaattaaagaaatgaaggtttaatatttatgctacagaaagaaactcttataaagcaaaacatcaggactccaatagacaagtgggcagaggcaatgaacagaaagcttacataatatttttcctaccaaaatgaaaataccctaatttcctattctgattatgaaaacgatacacactaaggcagggtttctcaaccccagtggaactgatacttcgagtccgataattctttgttgttggggattgtcctgtgccttgtaaaatgtaaaatttacccacaagatgccagtagaacaccccctcaccctgcttagtttgataaccaaaaatatttccagaacttgctaaatgtccctggaaaggcaaaatcagtcctagttgagaacgctacactaaggagaaagacacatggaaagttgttctttctccttaatacttgacaacctgtaacattaacatgaaattaagaagccttcatcaagctaattggcaacaagtaaattatttaaaattataacacctaaatgccagtgaggttgtagtgaaatggatagaagcattcgctagtggtgacattatatacttgatatgaccccttttcagtaatacttctcaggactgggaagattgaatgcctcctttgcctcattcatttcattcctaggaatttctccaaggaaatcactgaacagagacaaaacccagtgtgcatcacgatgttcatctcagcattatttttaatagtgacaatttgatagcaaccaagatgtccagcattagaagaccactttaagtaaattgtggataatcaatttgatgatgcagtcattaaaaattatgttgactatgtagatgtgacaaagttatgacagaaagcaaaatacaaattgtatgtgtactatgattgaaattttgtaaaaataagtatgcatgtttgttcaaaaggatgagatggccaagtgggatggttcatgcctgtaatcccaatacatacggaggccaaggcaggaggatgacttgagaccaagctgggcaacagagtgagatcctgtctctacaaaatataaaaataaaaataaaaataattagccaggcgtggtagcttgcacccagctactttagaggctgaggtgggaagatcacttgagcccaggaggttgaggctgcagtgagccctgattacatcactgcactctggactgggtaatagagtgagaccctgtgtcaacaaaaaggatgagatctcaatatgtgtaaatgaaaacagctgtattaagggactaggatcatgggcgtttttaacttttaaaaaatatctttaatgtagttatactgtatttttttatttttaaagaaacagaagaaaatggccaaatagagagctgaaggaactctggaggacatcaagtacaaagagacaatattactgagctcgaatttggggatcaggttttggtaggagaccttataatttataccccaaataggaatacttcgagagtggaagatggaacttgtaaatattacaccaggaaaacaggtgtcccagtaaatgtctggtcaccctagacagggaaaccaagaaagatgacatgaagctcttatgaaaactcagaagtgataaagttcagagtcaagtagaggggactggattcctatgaccaaaatgtgatttcctgcaactgaggaccctgtaactaaaaaagggtactcagctggcataagaatatgtcttatcattaagagagtaggatgacacagaaaattataaagcaaaggccatattatcagtactagagctgagatcagcggaagtgattcatctactcaacaaatatttatcagccaggaacagttcgttctaggcactgagaatattgcagggacaggacagacagagtctctgatttcacgaaccttacagtcagttggaagtcaggctggaaaacaaataaacacactaatcacatgacatgtaaagtgcttcaaagaagatgaaatcatgcaatgtggaaagtgtctaagggacgggattggggcagcgatcaggggaggccttcctgaggccctggaatttgagatcaaaggtgaatcaaagaggagactggaaagatctggggagagggtgatctcagcctagagagccttgaggccaagctgcgaggccaggcaaaggtcagaaaggtgcttggtaaggtggagaccaagttcaagaccataagggagtgaggaggaactcagtaataatggcaattgtagggctgagcacagtggctcacacctgtaatcccagcactttgggaggccgagttggttggatcatttgaggccaggagttcgagaccagcctgagcaacacagtgaaaccccatctctacaaaaaaaaattttttttaaatatccaggcatgcacctatggtcccacctacttgggaggctgaggcgggagatttgcttaagtccaagaggtcgaggttgcagtgagttgtgatagcaccactgcactccagcctgggcaacagggcaagatcctgtctttaaaataaaataaaataaaataaaataaaataaaataaaggcaattgtgctgctaggagcaggaactggatggggcatgtggtggggacccaactaattcaaaccctgcctgggggatttctctgaacctaaactctgatcataagttgagaagcaatagcacctcactaggctgtttgaccgtttaattgagagggcaaatgtaagaacaaagcaatattgtcattttttttttacactgttcctttgtttaatgcagacagcctgcccttttcctagaaatcaatcagatatattatcctacatgaacacacacgttcttctttctggttgcttataaactctttaaggatatcagtagtttcaggggcttggcctttcacaactaggcaagtctcctttgttgggtatgaatggagagagggtcaaatttgaactagggaaatggcacgacgaagttcttaaagtggttgtaattctgccactcccacgctgttggttcagtttggggaataaacagaggtttgacctaggccttttgaaaaaatgaatctcttggattcatttggaagtatcccagatttacaaagtagaagctattaaagtgtttgagtggtggttaatcactctctaggaattctcatggacatcacagatttactcagctgacccttcttcataggcacatctcagattttggaaaattattccagattataagttggcagtcaagcaacgtgatttgatcgaacacttactctatggcaggcactgtccttgtcactgagaacaaaacagtgaagacaataatagctcctgccctcacagagctcaacaatgtaaatggtaaggaaacgaaacggttaaagttataattaatgaaacacgaatagatccctgagctcttgcctttccattatatgaatgaactgtgctggactatttagaattgtttccaccaatttaagaatataatagtagtgtgcttaaatggacattttgttttagaaatttttttaactagaaatagtctcccaactctttaaattttttaatattatactataaatgataaaataaaatacatatttaataaaatgaaaatatgtaaaaatataaactctttaaggatatcagtagtttcaggggcttggcctttcacaactgggcaagtctcacaaatttaatttgtttgttaacaaacaaatttaataaaatcaaacactatatagttatgttatatttttattattttgagataaggtttcactcttttcccaggctggagtgcagtggtgcgatcatggctgactgcagcctccacctcccaggcacaaatgatcctcccaccttggcctcccaaatagctgggactacaggtgtgtgccactatgcctggttaacttttaaattttttgtaaagattgggtatcactatgttgcccaggctggtctcaaacttccgggctcaaatgaccctcctgccaaagaagcctcccaaagtgctaggattacagcaactgcacctggccttatgttattattaaaaggaatccactatgaacatgattttttgcccatttggctcacttaggaagcatttttaaagtcttgatgcctgcaaccactccagaacaattaaattggaacctctgggggtctggcatccaggaatccagactgtttaaggctctccgggtgctggcagtgtgcacagccagggttgagaatcagaagcagtacatttgcagcctatcaggtctgtacctgaatatgtggagtgagtagaatgtgtggagtgagcagaatgtgtggagt

SEQ ID NO: 60918 - DNA, 1381 bp, Homo sapiens
ccctgagggcacggctgatgtggccaatcttctgtaaatgcaaaggtgcttatggccctagagcttcagctctaagacatgaaagtgaaggttcctccagaatcacacacgtgcattattcagcgcaaagatctgtggtttggtgattcttcttctcctttcataaggtgagaggcagcagttggggtgaatttccccaggaatggtgggagatgtgggcctagatcctcccgctgcttgggaagagtcgtacttttcagttggaagcctgctccaggaatggcgggctccaccctctgcatgtgacgtacaggggctggtaactgatggagcctgaacatatatctgggtgtgagggataagcttcgaacgccacttaagtgtaggtgggagccaaaaggtcaccctgccaatacatgattacatgtcctgttgaggagaaaatacacagggactattttcacccttctggaaattgtgattagaaaatgcaaggagaaggccaagacactaaactggagctggtagggaggaagcctcagccctgctcagggtgcctggacagtccccaccagggcccagctaggaaatgccagccttgtccttggtcttcgtccctaatggctcccggcgggtgagggaactgcctggggattccccatcgttgaagcgctctgtgagtgaccccctcctaagcccctccagtaggggatttcccagaatgttcccacgcccccaggaagcctcttccttagccacccccaagctgcttgcggttcatggtagaggtaggtggcatcaaatgaccccacaggtgagggatttgcctgaggtgggaaaagagggaagataaaattggaaagccaccggggctgaggaattatctcataggagagaactgtcaaacagtataacgtttaaacagactttaaaggcaagaaaggatggagggcacagactctgaagccagagtgcctcaattcaagtaccggtgctgcaacttccaagctgcgtgatcttgagccagtgacttaacttctctgttcctctgtttttcctcttctgtaaaacggagataatattttctaccacacaagtttgttgaaaatatcaaatgtaatgataaccataaaatacttaaaagagtgattggcacacggaagtattcaataaatgttagttattggccaggcatggatgattcacgcctgaaatcccagaactttgggaggctgaggcaggcggatcacttgcggtcagaagttcaaaaccagcctggccaacatggtgaaaccccgtctctactagaaatacaaaaagttagccaagtgtattggcgggcacctgtaaccccagctacccagaaggctgaggtggggag

SEQ ID NO: 60919 - DNA, 2854 bp, Homo sapiens
ccaaagtgctgggattacaggcgtgagccacagcacctggccaactttctagtgttctcgggagacctttgcccactcaagtctccagtctctcgggggaagcagtcagtgtgagagaaggaacacagggccccgagccaagccctgctctgcgcctccctcgcgggcaatgagtctttgcatcaaacactcaaagtttctgaacttctgagaaaacaagtgccttgaggtgaatcctatagcacagctgtcaccagcctgtggtcattttggagggtatgtggcataggtttgtcccagggtctcagttgtcctcatctgtagagtggggataataacagctgaccttccctatcccacacagagcgttattgtgaggagtctgatggacctggatgaattctgaataggagaaagatgggtacatggatgcccaaatgcaggctcacccccacccctctcagtagcagaagacatgcatatgggagaagctgcatttcctcccagcctcactgtgctctaggtgtccagccctcattgttaggggatgtcactgttgtacctctggataaacagctgctctcatgccacctttgccagttgtcccttcagctgggcgagccctttccagggcatgactgccccaaggagggccagaggggactgggcaatagcagggacatggagggacgaggccccagatcagccacttcctcctgcaagggaagtcaaaccctttctctcataagtgtcaggctggctgcacggtccctgggctggcagggcaggtttcttgggggccctagcaggaagcactcttgcttcccaaggtaaagacaagtttcttatcactggcggtggttttctggttagaggcagcaggcagcggttacaaactttgcctagagctctgggatctgcaagccagggagggggaggcagacgacagagctagagtgagctcagcagagcttgcttagggaggaaggacccgctgtcacttcccgaaagctgggccagcctctaggcggggagaaggtcagagtggccctcccttctgcctcggggtttgcccaggctcttcagagcacagaatttacagtaaatgttgtcaccagtggaaactctcagagggggcgaagaaaagggctagaggaaggagccaggactcccggcccccagttcccgtcttaccaacaccccctagtctcatcgtgttgcttgatcttacctttcggtaaagaggggatgccctccttctgggatgtgccaggaaatacccaaatggtaaaatgaatgagccggccacaccttgcagaaggcagggctgtgactccatcatcgtggctcttgataactcctctgccccgttttagaggggcttcctttgtactgaccttggcacactttctagctcagagccccattcaagaaatgccaggttgaggctgagcatgcttgtgtctgtccttcacagatgatggaacctggcttgatgagcaaggccatgttggtatatgcttctctgccatttagaaagaccccccccaggatgtggggtttaagatgattgacagtataaccgattaacctcattagcctacagctcatgcacctgatggattcgttagggcaaattttattttattattttattttattttttgagagaggacctcactccatcagtgaggctggagtgcagtggcatgatcatggctcactgcagcctccaacccctggtgctccatagctaattttcttttatttttattattgtagatactgggtctcaataatgttgcacaggctggtcttaaactcctgggctctcaggaggtagaggttgcagtgagctgagatcgcaccattgtactccagcctgggagacagagcaagactgtctcaaaaaaaaaaacccaaaaaaccaaaaaactgctgggctcaagcgatcctctcacctcggcctcccaaagtgctgggattataggtgtgagccactgcacccagcctatttagggcaaattttaaatgtcaagttatcttacatctgctcaccacccaccctatttttgagttaccttcttcattccagcagatgatgtcataagtctgtcagtcaacaaacatctgagttcatactatgtgccaggcattgagccaggcattaacaaataggcatttaataagtgcttgaataattaaaacaaatttaaaataatatttaactagtgctttccaacttgcctgatcattagaatgacctgtggcactagttaaaaatccaaatttcactccctagtagtctagtggctaggatttaaaaaaaaaattattattatttttttaattcagctctgcagccaggcatggtggctcacgcctgtaatcccagcactttgggagaccaaggtgggcagatcccctgaggtcaggagttcaagaccagcctggccaacatggtgaaaccccgtctctactaaaaatacaaaaactagccaggcgtggtggtgcctgcctgtaatcccagcaactcgggaggttgaggcaggagaactgcttgaacctgggaggcagaggttgcagtgagccaagatcacactactgcactccagcctgggtgacagagtgagactgtctcaaaaaaaaaaaaaaaaaaaaaaaaattcagatctgcagacttcactccgcaaatcccaaaaccactgattcacattcctagattttaggatgggcctgaaattctattcttaacaagccttcaaattaattctcatgatatggcaagtttgggaaatactgacctaatccaaatagatttagaaaggtaagacctggtctccaaatatcaggt

SEQ ID NO: 60920 - DNA, 2064 bp, Homo sapiens
tgtcttctggattgccctcccatgctcccctcacggtgacctcccaccttccattcttcactgctttctagaccatgagcaggttgtcccctagtccgggagaaggcccagtgcaggatggcctcacctggtgaggtggtaagtcaggttgaccttctcgtctcccactcatgactccactcacccagccaactggctccatcctgacagccaagtctccggatgctgcaaccaggccctgtgccaggctgcccttcacatggaaggcggtgtcttcctaatgctctcaaggggcaacatgcagcttgggtccacagggacttctctgccagtggtgtacatgtcctgctgaagactccacctcccttagaaggcggtgatacagagcacaggacttgtcctgtccccgcagggctccgcaggctgccatttgagcactttgagggctcagggaacacagggtcatcttcagtttggcagagcctgaaaccagcatgctccacccccctgctcttcagagatccccaggccaagtgcctgctggcctgcctgacacagccttacccacaccactgcccacgagcaaagcctgcagcagggcctggccacacacaacccctgctgagccagctggagacaaaagcaacggagatcattgtgccaggcgcccacctgattgagctccttcagtagccaccctcagtctcatccatttgtcctttagagggacagcctctgcctgctgcctccccggtggcatccctcatggggtgacagaagggaggagaagtcctgcttccctgtgtcagtgccccctgaacccgctggccaaccactctggccggtttgaggccaagtttcaactctagacctcccctgtgtgtgtctctcctgcccctctcagatgatgccagtgttgggctattgtgattattaaatgccatagaagtttggatgagctgcatcccagcaggtggtggggtcacagccccttgggaggagtccaacccaacagcctctgatggcacattgcaatctttggggctctcaccagagaagctggtgcccatgggagcctaggatgtggacactgggctgagccccgtaattcagagcctgggaagacagcccagaagacgttccctgagtgctggcatttctcccagcacagaatcttgcattgtaacctttggtctcccaacgaaacgtggcaaaacaggctcccctttcagtgcagagcctccatgtggactgggcagatgtgtcatgaggaggagctttcttaatttccttcagaacctggattttggtagctaacgctctgtctagctctttcccacccctctgttaacgagaagagcaaagaagccgatcttcacttcagatgttgcagtcataaaatataattcatttttctttcataattattattttttctttttttgagacacggtctcactctgtcacccaggctggagtgcagtggtgcaatcatggctcactgcagccttgactacccacactcaagcgatcctcccacctcagcttcccaaggtgttgggattacaggcatgagccattgcacctggccttctttcacgatctaaagacgtagaactttgagtccagctttctttgctactatctctgccagggcctggcctcttgtgggcaggctttctttgaatcagagattttcatctccacccatgctctagcactgtgattttccccagaaacccccacagaaggcacatgacttctgccggcatcttctgaatgacattcagggccagaactagaaaagcagagttcacgtgcacggttcccatctctcagcaaggacttctcttcccctttcattctctactttctactgaccccaggcagttccacttctcctgtctagtcagcccggtagaggtagcaggtagctgagcctggagctggtgccaaggctgacttcatgtccatgcaggcaaattggagaggcagccatgaatagaaatttgaacatccgtagctttaaccttggatgtttcaccaaccaggttctgtcccagc

SEQ ID NO: 60921 - DNA, 5004 bp, Homo sapiens
ctacacatgccaccacacccagctaattaaatttttttttttttttttagagatgaagtttcactacattgcccaggctagtgttgaactcctaacctcaagtgatcctcctgcctcagcctcctgagttgctgggattacaggtgtgaatcaccatgcccagcttgggtaatttgtagggaaaaaaaattatttctcatagttctggaggctgggaaatccaagagcatggcgccagcatctggcaagtgttatcccatggcagaagggtggaaggtggaagcaagcacatgagacagaaagggaagtgagccaaactcgtcttttttattgggaacccactccaaagataaacccgcttctgtgacaatgacattaatcgagggacccattaatccatgagggctctgtcctcatgaccgaatcacttcttaaaggccccgcttctcaactctgttacaatggcaattaaatttcaacacgagttttggaggagacatttaaaccacagcaatcattgagagaagatgacagagaccagatatctacttacatcgtgcccaaaacccccagtggtgactcatggtggacagttaaatggctgtccagataggccattcactaacccatgagtgagggcagagactatctgtgtcttgtttactgctatattcctagtgcccagcagagcagatatgtgatatttataggtttgataaatgaattaattaatcataaatataaataattcattcattcatatattctcaagccttgtctacttcaggttgagaattttgagtttggactgtgactaaattacctatggctccctcaaaggtttgtgtctcattgtttatccccagggggtgggggaacaagtccataagagccctaaatgcccaggaagcaggactgactgggatgatctggtggcctcaggaaggtcactgcactactataatggggatctagttctgtctgggtctaaaacctggggctgaaggcaagatgtcacggaattgtgacctagagctgagatgcacctgattacagtgacccccacacacttttttttttgctacccagaatccatttcttctccttctccttcttctcctcctcctcctcttcgtcctcctcctcctcccctttctcctcctcctcctcctcccctttctcctcctcctcctcccctttctcctcctcctcctcctctttctccttcttcgagatggagtctcactctgtcacccaggctagagtgcagtggagtaatctcggctcactgcaacctccaactcccgggttcaagtgattcttctgcctcagcctcctgagtggctgggattacaggtgcatgccatcacgcctggttaatttttatatctttaatagagatggggtttcaccatgttggccaggctggtcttgaactcctgacctcaagtgatccacccgcctaggcctctcaaaatgctggtattataagcgtgagccactgcgccccggctctattactccttcttctgacaaagcatctgcatttcctttctatgtgtagagctgtcaatcaaggtgtcttctctgccttatctggccaagatacaaccaaacacccagactgggccaatcagactactgggaatctcgctttggagcagagcaaagaaaagacccagaagatgtttggagcccctctactctaactgtgaagccctggccagagagagaattcctgtggtggagaattgtcctggcttctgccttgttctgggccttgttctctgggcttcttttgaattctgtgagccacatacatccttccaatacattcatttactgctgatgtcaaccagagtaagcttctattgtgaaaccaaaaaaatggtgactcattgtacctgggtttcccagagagggggcgagggggcagggcactgcatcctaattctcaggggctaacaggagtagactgctttctgagagggtttgagggtgttctgtgctccaccagaaactgggcatgcagccagaaccacaccagcctctggattgcccaacctggatactacccattactgcttctggaaggaaccccaggctctaatttgaaaaccatcactgggagttgcaactcagcctccaggcttcactccccatcctcttcagtccattctatgaggagctcagcccatcagctaaaaggcaatattcaaaatccaggccaggcactggcagtcagaatggggtcggagctggagcagggtgaaggcatgcgtctgcgttgttgcatggaggggcactagggtaggggctatcagtcagccagatgtacatattttaatatttcaacagccagttcaactgcaccggtgcgcaccatctcgctatcagcttagcacctacaggactgtgggggtcttggagggagggactctccagtgtgttcttgtaattctcctcgcctctccctcttcttccccacctgtctctgcctcgccagaggtttgcacagagcagatgattaacatatttgtaaataaaaatcccaagatagaagaaagaaaatgaagaggaagagaatgggtgcaaggaggggaaggaagattaaaaagttgggtctgttctaaaaaaaaaatcacaccatggaccattcctcctgccgcctcactcccccaccccaaagtgttcatctacatatgctcatttaaaataagcattaggggcacccttgaaagaaaagaaaagtgcaaaataaaggtgatgtatgaaagagtgaggggtcatcttgctaggggcagggatgatactggctgccatttatgatctcattttctgttcactctattattttaggaaagattattatccccattttacagataaagaaagactccgaagaggctaaatggtttgcccaaggtcacacagttaaacgtggagatgggactcaacctctctttggctgcttgcaaagttggagctatatatagcaagcgcaagcgcacctggggaactccccacattccaggattacagccaggaccattgggacagcggtcccgggttggtgctgccacctagtgacagagaactgcagagatcaactttcctccctctcctccgttccccctccctcctgcatcctcctttcccagcttgagagagtcctgaaccatggcagccaaccatcacttgtttgggcagaagcttgaatacagagaattgacctctagatgcaagctggcgcctcattcagcttcctcactctatcctagggcatagctctgaagagatgtttgggtgagtgaccaggaatgcaaatctgcacagatttgggcatcaacctggtttccaaacacaagctctgcagatattttactgtgaaactccgggtagccgtgaacaggatgttggctacatcctgttttagggtgataactacgttgtacctgcacagtcccaatcattgaatacctgctagctccccggtaacatgttaatagcagcctctcatttcctttttgccctatcttttttccttttattttagattcaggggtacatgtgcaggcttgttacataggtaaattgcatgtcacgggggtttggtgtatagattatttcatcacccgggtaatacacgtagtacctaatacctgataggtagtttttcagtcttcaccctcttcctgccctccaccctcgagtaggctccagtgtctgtttgtcttatctttgtgtccttagctcccacttacaagtgagaatatgcagtatttgtttttccatttctgtgttagttcgctcagggtaatggtctccagctccatccatgttgctgcaaaggacatgatcttgttcctttttatggcagcatagtattccatggtgtatatgtaccacattttctttattcagtctatagctgatgggaacttagatgggttccgtctctttgctattgtgaatagtgtctaattttatgtgaagcccaaacaccaacacatgttgcccaagctcactgagcaaggccttcagccctgatcttcagactccaagtgcagtgcccttcctactccgctgccctgtgctgtgccccgctcccccacaattcaactcaccctgtgaaaccttgtttttgtcagcctagtcatccagacatgatgactcaagggtcgctgtggaacaggctgtcaggggaggacctgtgtcagcacagtggctttcttgacctttatggcagtggggagttacctcagtctaaaacgtgtggctgccaagtgacttcagtctcaactgaagcacggacatgatcgatgggcagataaggaaagccattcccactccctgagctttccacacctccttcagcgtcttctctcttctcctaagtccaagatcacctggaacatagaagccacgggttaaaatttttcattcagacctggctctcagaatcttgttgcaaatggagaataaagggtcacctctagaaggcaaagtggtctcaccaaatatgtgcctcaccctgtccacaattaatctagtaatgtctctgtctagtcctgcataatttgtgtcaggaaatccactttagttacccatagtgatgaaataaacacaacagtcagatctgcacctagcacagtgtatatagtcagggcagatactaggtgacaagctcgaagtagatttttaaacctgaaatgtatagattatccatctaaaccgtgatttatttcatctgggggtcattgggctgctttgactatctgatgaaactgtggactcccccgcctctccctttataaaacatgtttcttttttctttctttctttctttttttttttttttcgagacagagtttcattcttgttgcccaggctggagcacaatggcgtgatctcagcccactgcgacctccacctcctaggttcaagtgattctcctgcctcagcttcccaagtagctgggattacaggcatgcaccaccacgc

SEQ ID NO: 60922 - DNA, 3506 bp, Homo sapiens
aaccacagactgtgcttgaatagctaggctacagcttgaatgattacagacttgaacgagaattatggctcttcttgccagctgggaccttcagaaagaagttacttcacttctctgagtctgggttttcttgtctataaaatttaggccagcaatagtaactttatcacagaattcttgtgatgcataaatgagctaatgcattcaatttgtttagcactgtacaacaaatgttagctttttgctaggatagccagcattcgcggaatgcttactatgtggcaggaattttctaagtgcattcgtgtattaattcattcaagtctcagaacaacacggtgaggtaggtactattatttcatcatttccattttacagatgaagaaactgaagcgcagagaggtggagttccttggtctacagtggcacctcattgtagctaagctggtgtttgaactcagggagaatttgggctccttaccaggatccctcgccaaggacagaggtcagtgcaacgagtcgagggtttgccctttgaaatgggctaggaccggcaggtggcagactagggctgcttgagttcaaagaccgcttccaagaccaagcccggagccagctctgtgctaagcgttccatcacacaaccgcggacagcttcttcggcttcttcaaactctcctttccctcccccgcaccctagggtcttcgcccagaatccatcaggaaaaatagccccacataacaggttcaaatctaacctccccaagacaaaaccacgtccgcagggaaagaagcgagtaaagcgagttttctgtaactcccctttaacccaggagcgcaaccagcccgggaaatctacaaatctctctttagttcagcaaagggctgggagcctaagccaagggggagaaagttggggaatccctcttgaattccccagaacacttaggtggcgccgggctttggtgcacgcgcgcagggcatgcggacaggcaccggagaggctctattttgggcattacttcgggaaggcggatcttcttgcagggtccgctgatagcgggtggcaaatgaatatgaggggcagtgcaaagggtgggggttaaccgggcggtttccatggcgcccggggcgtgggggaggaatgcatcccgcaagctgtggcgaaacaactgctctgcccggaggaccgggctcgagaaggcaagagacactgggtcgggggtggagtggtggcgggggggttgggggcggaagaagccaggcaggacgggggcggggcggtcacgtgtgcccgactgggcgaggccccaagctggcccgggagaggactctgcgggcgaagtggctgcgcaaggagagaacttttcctgcacaaggaacgcctcgtggggagacccaaggcaggagcggtccggagccggctgcggcgtgtgcggccggccttgggacagcgatcgccgcgggtggcaacagagagccccaagcaaaagtgggagcaggagcttggaggtgagcacaggaagccccacttgaggcttttacgcagcctctagtctctgtttcttctggaataggcaagtgtcctttcaactctaagagaccagcagaggccactgtcccttaagactgccggagtcctcaccacttctccaggattccagaggagactgtggcgatggtgaatgaaggtcccaaccaggaagagagcgatgacacccctgtgccggagtccgcactccaagcggaccccagcgtctcggtccatcccagcgtctcggtccatcccagcgtctccatcaaccccagcgtctctgtccaccccagcagttcggcccaccccagtgccttagcccaacccagtggcttggctcaccccagtagctcgggccctgaggacctcagcgtgatcaaggtgagcaggcgccgttgggccgtggtcctggtgtttagctgctactccatgtgcaactcctttcagtggatccagtacggctccatcaataacatcttcatgcacttctacggtgtcagtgcctttgccattgactggctgtccatgtgctacatgctgacttacatccctctgctcctgccagtggcttggctgctggagaagttcggcctgcgcaccattgctctcactggctcggctctcaactgcctgggggcctgggtgaagctgggcagcctgaagccgcatctctttccggtcaccgtggtgggccagctcatctgctctgtggcccaggttttcatcctgggcatgccctcccgcatcgcttccgtctggttcggggctaatgaggtttcaacagcctgctccgtggctgtctttggcaatcaggtaggtagaacagtttgtgaatgttcccaggggcgtgtgttagattgcacctaactattgggtgtggtaggctataatttgctgattgtccaacagtgtttgtgactctgggtgacagtaactgggtgtgacaggcagtgattgtgatgctgtaagagaggcgggaaacaaaagcagggggacctgctctttcatccacagttgctcttgccccagccaaaagcatgcttctagaacatactataccttcgctgtgtcgttctcgaacctgtgtcagtccaccaacttagacctgtaatttcaggaatgctcttctgtctggcagcagcccctgggcatcagactattctggtgtcatcagaacttggcagtgctttcagttggaccaaccagctttcctagagtgcagtatctcctctactgcatagaattgcaaagccatgcctggtggtgtttggcactgcttttaccttgttttacacacagctgaagccaggacagtgggagcagtgctttgtgccaaactccttgcctgggatttagagccaagtccagcaggatggagtagaaatctcactctgagtttccatggcctagaaagggtagttcatgtcttaatctttttctctttctttcttattggaaggagaagctcaaattctttgcatctcaatgtggttatgatccagaaagctgggcaggttgtgaacctgaatgccgtctccaaatactcgaagcaaatatttatgggaatatttaaagcaaacgtcctttagccagaccactgcctcccagtctcgcatctttccaagcacgtacagtcctggctgtgtgtttaacaaaggattggtaatcctgtctcacacgtccatgtgaagagaccaccaaacaggctttgtgtgagcaacaaggctgtttatttcacctgggtgtaagcaggctgagtctgaaaaaggagtcagcaaagggtggtggattatcatcagttcttataggttttgggataggtggtggagttaggagcaatgtttttcagacagggtggatctcaaagtacattctcaagggtggggagaattacaaagagccttcttaagggtgggggaaattacaaagtacattgatcaattagggtggggcgaaacaaatcacaatggtgg

SEQ ID NO: 60923 - DNA, 1253 bp, Homo sapiens
gaagccaggagatctgctttctcacctccactctgctagaactctgggtgaccctcaacaagtcacagagctcaattaacctcacttggcctttgttttctcctgtaattattgggtttgtaattataataaacgattacagatgaactttcaaactgtaatattctatcattttaacccacaaatatggccagttgtgttatctgttgtatttttgttttaacatttttcctgctaacagattattaagctccttgaaggcagaaactctgtcttatacctcttggtactttctaaaatatctagcagagtacgttttaaagatgcatttggttaattgattacatactggtataaagaactctacacagcaactatgagtgaccacttttgtgaatattccagaactgagaaccactagtaaacatcttgaatggctgtaattgacagaaggaaaaacgaatcaagggggtcagcagattggcagttgatggatgatgtgaaagtgaggagcgaaagcaaattgtttctttacctgtagctctttcaagtacaacaaaggaaaaatgagaccttacgacaaaggaattactcatcttccttcactcttggaatctgaagcttgcctgagttcacaagctattttcccatttccgcctcaatattatgtgcagcagaagggcttttgggaattgtatcacagccagtcagtactgaagccaagcctttctgacctcggaaacacccaagtcatgttatctgtcggtcactggagtttggactccaacccagataagaaatggtttagcactttgggaggccaagacgggtggatcacgaggtcaagagatggagaccatcctggccgacatggtgaaacccgtctctactaaaaatacaaaaattagccaggtgtggcgcacgcctgtagttccagttgctcaggaggctgaggcaggagaattgcttgaacccaggaggcggaggctgcagtgagccgagattgcgccactgcactccagccaggcgacacagcgagactccatttaaaaaaaaaaaaagaaaaagaaaaaaaaaagaaatggtttaatttgttgggggtgtgtgtgtgtttatagccattttttacgtgcctatctcctatgtgtataaatttatgcagttatgtgtgacttcacactacagatgctttagaagttactacgttattcacacaataaactgaagcttccatgcttgtaaatgtggtaaca

SEQ ID NO: 60924 - DNA, 754 bp, Homo sapiens
atgttggccaggctggtctcgagctcctgacctcaagtgatctacccgcctcagcctcccaaagtgctgggattacaggcatgagccaccacacctggccggccactactgttaatattttatatccatgtacatttaatgattgaggtatttggtaagataattttacatccctttttttcagctgggtgatattatatgggctatgataaacttagaaccagcaagacagaggtttttattttcagttagtcacctgtctaaaggttaaccagctttcttcctaatacttgaaagttccacctcacatgttaaaggtttcattcctgcctactgaccccacctccagagtcaagcagttatataattgggtacctcattcaaccgttctcattgcattgttccccaccaagaatccaggatgagaaagcttttgctgcttttccatcatgtgttgctagtgtgttttttcagttctctgtggtatgttatttgctggttattatgagtttccttgatctttgaacactgcctgggaggtccagtgatttcagccttccagaggtgatttaaaaaaaaataatcagggctgggtgtggtggctcattcctgtaatcccagcactttgggaggcaaaggtgggtggatcacttgaggtcaggagttcaagaccagcctagccaaaatagtgaaacctcgtctctactaaaaatacaaaaattagccaggcattggtggtgtatgcctgtggtcc

SEQ ID NO: 60925 - DNA, 2003 bp, Homo sapiens
ctggtctcaaactcctggcctcaggtgatctgctcaccttggcctcccaaagtgctgggattacaggtgtgagccactgcgcccagccaaaatctgcattcttaatgcctgttctgtaattgctgatgttccttcctagaattgtgccagagtttcattttaggctcaacaatacattttatctcaactaaaatgtttatctgctgaaacactagataagaggtggcttcatcctggtagaggggcaatcctgtttttcaggcatacatagaaattaggtgacctttcatctggaatagctgtaggtttgtcttcaagatcttggtcctccgttcctcatttcctccagtttctcaattctctgagtatgtctccccattcatccgcaaaataaagacaaagtttccaatgcttagagaagtccaactaaggaagttacaagttccccatcaccggaaggtattcaagcatagatgggactaaccacttgatgggaatgttgtaggggatctcaggctaaagatggatagtgaaaccagatggcctttgggggcccttctagactcaggattccatgactctaagagcttttactttcgctagagttggacatcatgagtgcattgacctctgacaaccataaatcttgctgcatctaacaagaggatatttgaggcctacctgggattctagggcagatgagtgcttcataaatattttctatagctgaaaatggtgacagtggtgataactgggcaatggtcccattccaaaggctgtggtcctcagtgctggaggttgttggtcttagggccaggtcactgactcatgagaacaagaaacagagacaaaatgtaccagaaacattgttgctcctggtcatcgaggggtcaagcctaggccatgctgtggggagcaaagctactcctcctccttcctctcacatgcctgtttgcttacgtggtctttaatctgacaaagtagttttaatcctgtacttctggacacttttccttatctatttgattaaatgataaccgaggaaataaataggaaagcacttcttgaatggtggagtaaggaccttagaaaatccgctcctctatagaaacaagaacaatggcaaaaaatatccaaatgaattttttcagaacttttaacaaatggcttgcaacaatccaagcagcatttattcaagagaaatggctaaatatcagtaacaacagtgggccttgtgttttcacttgccctattccaatccctttctccctactacagccttgcagccatggggctgtgacatccagcagcctcgcagccgtggagctgtgaaaaccaactgtctcatagccattggagggagcaaagtcgatttggagctccacccctgagaattactatttgacctacctagcaggtccccggaaaagccctattcataggacatgttgctatttaacctgacttggagtttgctaatgggaaaagccctattgccagggcatttgttgaaaacagtcaatggcactgcttaacattgtagctgcctgcagtggggataacagttggggtgaacaagaggctgcctgaaaatgctgaaaggaaactctggagaatgtgatgtccatatggggttctttgccaaaaagaaaatgattcttagacttaatcacagatttgaaaaaatttttgacggaggaatcatgttaattgctttacatgcattatctcatttaattttcaaaacaaacccatgacatagccctttgtttcattttatacatgaggaaactgaggctctagagttttagcttcttgcctatagggcgagaactataggcacttactccaactgttaatctttgctttcttttcctactgtgtttgttccaaattaaaacaaacaaaaacaaaaacaatttttttttttaaacagagtcttactctgtcgcccaagctggagtgcagtggcatgatctcggctcactgcaacctccaccttc

SEQ ID NO: 60926 - DNA, 6226 bp, Homo sapiens
agtgggggttgttggaaattccaagggaatcgcagacctggcaccttggacagtgatttgatggttagttgaggtgagttttcagctgtcagaatgtggagggaaaaggggctttgcttctgtttcagtcccgagagtgagcctgaaagagtggcactcggagctggatcatttgtggtggccttggcatcatagaaagcttgcccctttttccctctgatgacctcatgatgttgggtggtgtgtgtttgtgggtgcatttatggcaggggctggttgcttcttttcttgttctctttcttggctctctgggatgctgagtggcccccggctcttgtattccccactgattagtcatggccaggcagctgctccagccagggtggagtgctgtgcctttacccacagcactgcctgtttgttttgctttatagaaactccaagaggaggaggaggagagcaacaccagcaaagtgcccactgctgtgtcagaggatcatctctgagaggaaggtggtgacaactcagggaacacgaacaccccaccttttccttcagcacagctctcaccgccagcacaaagggcttcgctagagatgtttttggagggaatcagtgggactatttgtggcatggatggcctattcctcctagaacccacgtaagagcttggatgatttagttggagaaaattgcacctatcaccaaatgcaaatttgattcccacctccacccccttttaggttatgggagttggtgttgggacagggtggcagagaatattggagtcaatcctagcttggtctcttgccttccctcttttcctccatccatcgtggacaatgcctgcaaaattttcacaggaagaaagcctattcaggatattaacttgaaatttccagtgtcctaagagcctctcatgaagcccagttctaataagtggcaagctgctctgccggggtcatctcctgggtcatcggactgattgctcaagttctgcaggagaggaagcaccattagaacaactccatcagaacagctccaccgggacttgtgggcctaaattttcctggcctaacgggtctgtctccaaaccctctttcctaagagctgagcaaaccaaccataataaacttgacaaaagactttgttgtggccatgacagagataccgactcaggagggctacctacctaggtgtgatcatgctgggggctaccttctgagtatatttgtgaaagcacatatttgggaactctggtagcttgagttgggaatgggaaggttcttttttacagaagtacttccccagggacttctgtgtgtcacagtcacctctgatgcctttatcttgatgttgcattgggaatctcagccatcagcccaagtgcttgttttattccaaggcagggtaatccccgtcaacttactctaacctttgctgaaaactaatcttgattcattctactctgaaaatccaaaggtgcttctgagagataagagggaaggggtagaaggaaaggtgccccttgaaatgggaattgagcctgttagaattaaaagcttatctcacctctgctggggacagtatttgcaccaccaacccctctcctcacctgctttgagcgataatctttatcagatattctaaacttaaagggattccctttaaaccaactcaagctgatctttcctatctagcctgctgtttggctgtactcatgggctttggtaatatctcctaaaaatgaggttttggtaatttttcctatgcattgggcaactgtgatcgtgaccactgtgctgtcttgctccagccactgccctggcctcagcatatcagggcagcctgtgctggctgcaatactgtggtgcttgggccactgcctgagaggagccaggtttgtgtgtgtctgcatgtgtgtgtgtgtgtgtttgtacagattcaagcaatggatgcaaggaacatgctgtatgtaatagaagaaagaagtccacgttttcggcagaagtagtgagtcagtgtggaagagaggtgagggtgtgctttactttttgataaagagaaagatgtttactcataaacccttcaaaaggtattaacaaaatgtttaccaaacctattgctttattttaaaaacataatttgtgttttctatttgtaagatctgacatttcgaggcaataaaaacttctcagaaagtggtctgccttatcattcagtggggcagagatggctcttagaagtccctgcaagactgtcacacattcctgaggctcctgtcttaggtgtggggaagggctgggctggggcgggggagtgtgaggctagagaagcagcaactgtggtcttccacaggagcatctcactgttgccagaccttaccatctgggagggatattttttaaagacaaggctgtaaaggttactgtttgcctacatggagggactgcaactcaacatccagcacgaccctgacctctttccatgctgtgtacgcgctggaatgtgagtgactgctgatgagagagtccactgttgtttctggctctgcctcaaagggtggttgaaatgtttgttctctgattacctcagccatgcatcagcttgctgtggctggggcccatggctcagtcccagcagctgcagtcttgcgttaccatttttcttcctaactggccaacgtcctgttactcatccctccccagttgtgatcaccttgtgcgtgttacttgaatatgctgctactatcatctgtgttctgtacattctttccatagagagttgtactgtgcctgtggtattctagcatcatatttatagcaactcgtagctggggaggaacaatattatgattctattttaaatgatctaggaagggacccaagcctgggctgttaagaaatctaatatccatagtgtctgctaaatactctaactgtacatctctttagatcctttgggtccctgcctttactaatctggaatcacttttttttttttttttttttttgagatggtgtctttttctgtcgccaggctggagtgcaatggcgcaatctcggctcactgcaacctccgccttcctggttcaagcaattctcctgtctcagcctcccaagtagctgggactacaggcacacgccaccatgcccagctaatttttgtacttttagtagagacggggtttcaccatgttggccaggatggtctcgatcttttgacctcatgatctgcccgtgtcagcctcccaaaagtgctgggattacaggcgtgagccaccacacccggccagggcatcacattttcatgacacatgctcagaggacctaaatcatccaatgttttcattcactcctttcataaggtcttcatgtggatctgtgttcaaacattaactgtcatcactgcttttttactgcctcctaacaatatagctgacaagtaaagaaaagatagttcttaccattgagatatttttctagatacagtgttctgggcatatgaggcctggaatttctgcaaccaactttggtaccataaaagaagtcagcctgaggatgccagcacacataggtagtgctgaaagaatcgtaaagaaatggagctggagtcttgatcaaacccttcctgaagctaatcttgtaatttttcagttatatgagccagctatctttattgtttaagctagtttaaggtaggttttgtcctttcacctaaagagacttaactgataagagaattcccaatgtatttaagtgtaaacatcaagcttcttatcacacccttataagccccttgcctccttttctgaccttttctttcacttcctaactcttcaccatgctgtgattacatagttcttattccttgaataagactattctaccttccagttgctgctccctcctttctaacggcctgctccatatcttaagacatttaactcctgggcattcaagtctcagctcaaatcccacctcttagcctggacaacatagtaagaccccatctcttcccacccccaaaaatgttagctggatgtggtggtacacacttgtagtcccagctacttgggaagctgatgcaggaggatcacttgagcccaggaagttgaggctgcagtgaggtgtgattgtgccactgcactccagcctgggtgacagagtgaaaccctgtctctaaaaaacaaaaaaatcccatctcctcagggaggactttctgatgatctaatttaagttacgttccccactgcccaccccacattccttcttgaccaaaataccttgtgtttgttagagttcttatccctatttgaagttctttatttttgtgttggcttgttgattctgttaccttgactataatataaggcccacagggcaggggcattgcctgtgtcgttcatttctctttcccaagtgtccggcatggagaagtactcaacaaatatttgctgaaatagcaatggccttttggatacacacactgtgtatgagggtccagctgggggaggccctctgggtagggtttaagagcaactgtccattccagtgcattctcctcggggtttagttgtcttcttcccatgtcatgcagttgtttcatctatgctgcctagttctatttttttgtctctgctctctcaagaatctgtttcttctttaggaggaaataagaaagggcacttagtgtttagttgtgaacgcagactcttgaaggtgagaaaaaagaagatttgacttcaagaatacaagaggaatgagcaaatgacagtaaggagccggaggcagccaggctgacctgtgtcatgagctgtcctactcactatggtgtattcaatcaggcataaagctgtgattctcctagggctcagaggaggcagccatgctcttgtcttagcagaggtcaaagtacaagaactgatcagagcagagggtttttctatttattacaaaagttgttacacaaatacagctgaccagaaggtctaaaaacagcccagactcttccaaccctcatgcatctgtagatagaaggagagctgtggtcttgctcacacacaggggagcccttcttagaagaactgcctgtcccttggaaggttcagagtcttgggtccagcagcagagaggagcccaacctgcgtggacaaccccttgaggcagcccttggtcacagctgctctgggtgggcagcaggtttaagtttcatagttcacatgttcccaccacacaagtcaaatcaaggcatgaaaataaaagggaaaaaggggaaggctggaaaagggagcctggaagaggttgcaggtaggggaaggagacacagtgggcttccgagaagctggcaatttcttgacttggatggagttacgtagtattcactttaaaattattctttaaattgtacgtacatgttatatacttttcagtatgcatatctttaaattttaaaaattaaaaaaagaggctaaaagtgaataaaagggcagatgatggaatagaaaagaaattaaagaggagagacgacgaaggaagaagatggccaaggtggaaaacgagaaagtcctggaggtgataatgctggcctcagtttctcttcttctgtctggatactggttctacttctagataccggagcccgaccagcatacccaggatggagaaaccttaaatacagaggaaagactagtgactaacatacatacggtacctttcttctctctctctcctgtgtccaccctctgtactagctctagagctggcacagctcctgtaggaggtctagggtggttggatgcttacttgccaccatcaggggtgccaggacgccaatcgtgggagctgcagttccatagacaaacaactcagagaggaaatgccccagggcaaggaggaaggtccagagtgtgatgtgatagagcctataaggaagcagacagaaatgggaaccaaagttactgtttgttcagaacagaggaaaagtatcagacttcatacagacaaataagaacccaggatgtcattaagacttaaaagaaaggacacttgttcctgaggaagagctggttatttgatcacaacgatattctcatctagggcaaaactgaaggtttcaactgctaaactgagaggagaatggttcaggcatccagaatgaacgtccaggtctcagcaaagtggtgaactcagctatagcaaagcagagcctgaatgatgacaatcgc

SEQ ID NO: 60927 - DNA, 1860 bp, Homo sapiens
aaacttaatcaggagaaagggattcttatcctggccctaccacttagtagctgtgtgaccctgggtaagtcatttacacttttcagtctcggtttcctcatctgcaaaatggagatagaaatatcaacccgaagggctattgtaagaattatatgacaaaaagtgaaggctctttgtacagtgctaggctcatagtggctgctcattcgctcatccattccttcgttccttgaattcaccaagccttctccatcttcctagctcccccttgtcatcgcctctcgaaaccttttccccccaaaaggttgccttccagttatcttccttccatcccacctccatttttccagactctccggatcctctcaatcagaagcaacacagacacctacatccctcttctcccccatattctccttacctggcgaccgggcccccagcacagcagtggcagcagcagccgctgccgcaaacaagctcccccaggacagctccagcccggagtccacctgagccatttgtccccgccccctccctcagccctgctccaggattgggccgtttccgtcagtactctctctgattggctgtcccggtttcgcccgagcaggagatggggagtgaacccctttactgccaatcagcggttgccgctgcctaagcctctccccaggtacgccgctcacgccgtaagccctcctgttggacctagcggaactccgggtttggagtcaacctcttaggggcggagaaaaaaacagcggaaaaaaaaaaaaaaaagaagactcccttcagctgagggcagggctctgcgcccgcgctgcgcggcggtgacgacattcgcccgcgtccgcagctgagcgttatgagcgcctgcgcagtggctccgagcgggcggttgcttgttggttgttgtagtaaccggggaagcagccgtcggcggctgccctgagccttcctggggaaggaggagggaggtaggcgcagagcgcggtccacgcctgctcgccccgaaccatgggaagatgagacaggtaaacgcctgcgcccgcgcgcttccctaccctagggaggagcattcccgggtccgggctggcgcctgcagcaggacttcccgctcagagcccgggagtagctgttggcttccgggcgcgccgcgttgaatcgcggctgcggggtcgtcccgtccttcccggggggagcatctgcggacctacgtgggattggggtgagctgggggtggggctgagaagcagattcctttcgggagaggagtctccttaggtgagtatctctactcttcttccgatagacctgtttctccccgctctgcaggcagcctaggagaggttggcatcccttcccgtttggaggttttgtttgtttaaacttaaagggcttcccagcattttgggaaagatcaagaaatcccgttgagaatcccctgaagaaagccattgaagttgttagacattgcctattgcgccgaagatctttgatcattatcggggtctgttttttttttgtcttatttacagtctcatcgtatttatgaatgcatggaaaagttaagaaggattgacagcaagtaattatcgctgagtaatttgggattatggtcatttaaacatgtttcttttatttgtagttcctatttcttcttctgacacacacaacgaacatgtacttttttactttagaaaaaatattttaagttagaaatgcagtgttggaaatttcctaatttcatcgtctatttgagagtcgtaccaaactttgtgatttttaggaagaataatttttaagagtggaagggcattcctcccctcccccacctatttatatggacctttgattcaa

SEQ ID NO: 60928 - DNA, 2146 bp, Homo sapiens
agttttgtgatataagttattttgtgtaaaattttttaacacaaaattaaattcgtgaaaaccctagtttctgtatagatgagtgttttcagttgtccttattgttttattaacataagaagtgggagagctctcactgttttctcatgtgtgggtatagtattgaagaagtgttgcaattgtccccctggtatttgggtgcagctttttgtgattcccacagtagccctcagaggtcccctgtgcttttgaattttacttgcgtgttgctgttttgcaccaccaggggacactcagtttccacagaggggtgctatgctctaccaaaatggtgcagattctttttcctgtcaggggtggactccaaaaagattttgtcctggattttacagctttaggtggatccagtattgggtttagatgagttgacagagccctttctgagatgaagctaatagccagattttcactgaaacaggaaaaataaaaatttcaaaaaaattaaaacaaaatggagttaaaaactaaatatgttgccagagacccaaagataggcagctctagcaacttggggggcatgcaagtatccatccagggagctgagttccacccatgcggcggaggtgggaagagaggattctgggaaggtcccggttggaatggccttttttctgcctcagccatattattcagtggaaattcagaaaagaccccaaaacatttgtagtgcctttccctttctccccacccccagttccttcttcagtagccttccttgctaattaacactggctctgcagggatatttaccttttctctgctggattcctgtggttttgaaagaattcaggtacttgctggttgccaaggaattcagattacctcacaggctgcacactgtccagaatctgccacagcagcaagtaggggggaagagacaccaacaagggggagaaaaccctttccagtgctcattgtcaccctccctggcaggcccttgctgtttgtgaagtttgagtcatttctggctctaaagacaagggatcaggctggtaatcccctcccagacggctctgtagggcgctgcctagtcactgcagcgctttggcagtctcccggctgcagctggttgacagcagatcagagagctcttgggcctcttgttctcttccataagatttttctgggtcaggccaggatgaaacccagtggctcctggcaaggctgcctgaggtgctgtctcttcattgtccaggcctctctgactcaaaatgcctacacctgttgaaggataactcatgtgccacagcgaggtcgaggctggccttctcttttcttggtacatttgtagtgaatgtttgtcagaaaatataactaccaaagaggatgttaagcttctacatctagaatgcctgtgactctgaccataagaagatattggtatcaaaaaaaagtttttaagaaaacagcaggacaaaaaaaaaaaaaaagaacatgtggggtcatattcttagaagaacaaactggtttttgaataggggaagagagtttaaaagatcccactaactctctgctttccttcttgttttggttccatattggtaaagatcttggagcaagcaactccagtgcagtttcagttaatgtttgccaagtccctaccatatgccaaacattgaaatcttttctccacacagacattcagacttttagacaaattatcttgattctcttgatcaaattatcttgatcactatcttgattctcagtgagaaacattagaaagcgaaaaggaaatgtaacttgtgatttaaaaatttattgtcaaaataaagatattgtccaaaacaattcatatttgttttcattgtggttaaaaaggggggagggggcggcaaatagttctatattcatcaataggctgcaaaatagtacctagggtttcaaatttaacaaagaaagtaggaactctcccaccttttgttagcttaaaggtcaaagccttaaaggtctgtcgtgagaactttcctaaatcttgatctcattaagagggagatacaagactgactccatcgtgtaaattttggtctacattaggataagtgtggtcatgtagtcatgtgctttataacaatgggcaaggaag

SEQ ID NO: 60929 - DNA, 830 bp, Homo sapiens
cttgttgtgattaagtccatgggttttggagttggtgtgatcttgaacaagttatttaatagaccacatttagttttcacatctgtttttcaacttggatacgatattatctacttcatagggttgctttaaggattgaattaagtatgacattataaaacacttagaatgggagttagcacttagtaggcacttggtatttgttaggtaatgatattaccctcctttattattatctcattgatcctcagttccagcctgtatttccttgaaactctgttcctggcatttaacctgtttcccttctatcaggtttgcaactgtgcgatatgatcaaggagccaagaacattcggaaccagttcatgcatctgacaaactacagtgtcaacaagaaaagtggagattacgtcaggtactggctgtgtctgagccagaagtcagaggtgtcagtctcagatgtgggtgttgtagaggtggaaaggtaacatgtggcactggaggacaactttacattaatgtccatgtaccatttatggaaatctgtcagtcatataacagtgttgaggcatatctcctgctgcttctccattgcctccccggttaacggtgtcacctttctctaccaaaatgtgccttcacaagtttttcttcctcactgccttccctcacttgacttaggaatgggaatttaataggcatatggaacgttttagaagttaagaaatgaggtcatttcagcacttggcaaacatatcaaaagcttaaaaaatgtctgtaccctttgaccccatggttccatttctaggaacttaaccttaaggaataaaa

SEQ ID NO: 60930 - DNA, 671 bp, Homo sapiens
ctatgcctttttgtctctcaggttttaggcattgagaatataatacttttattcttaaaaaattgctttggttttgtttcattttgaaaaggtgaaagggtatatagccgctgctggtaatttagccttgggggaggggaggaagatttggtaatctttctcattcgtcagtgctcacatccagtgcctgaaccattgcttctctctggtaatcagcattattagtaaacccccacttccccacaggagccactctgcccagaattagagcattctgcagcgggattggcgtggagcagcaggcttccaccataggaaagtcccctccagcaggggccaccgtgcagccgctctctctggcgggtgagactggcaaatggactttactctcctgctcacacatctgagtgattctggcgtcttttttttggatccaatagtttggctgccctcatttatcacccaggtgatctcacatagacacaaaacttggtgtaaaggcattgtaaatactgctttgaagtagtatacttcttctttctcagaagcagtgcttgttgtttagtacccttattggttaccccgtgccccgaaagcttgggttcactttccatgggaagaatgttaataatagctaatgtttactgaacatttattatgcatgccatgtg

SEQ ID NO: 60931 - DNA, 1675 bp, Homo sapiens
agaatggaaaagaaaagggaaaaaaaagtaaaaaaaaaaagatcaccagtgagtaggtggggagaagcagggccgggcagttgctggcccagctaaaggtgggggcagtacaggacacacttgtctctcaggcactccattcatgctttctcttttgtttacacttcctcgggggctttctaaatgactttgttcacgctgcctctcgtcttcattggctggggtgtggggttatatgcattggaaggcagggaggcaggcctctgagcgcagcagccccaatcatccactcagacgcccagggtcaccagcacctcggcttgtcttctgcctcggccattgcttctgtcccctgcttctctttaaaaaataaaaaggagaaaaaaataaaataaaatagaagccagttcacggcacgcctgctccggaaagctgttattccttctctcgcacgcctcttcccctgtctctgcctctctcgctcattcccttggacttgactctctgcttccctccctttctctctctccctctccctctccctctcgctcctctccctctctctctcacacacacacacatgcacacacactgctttctctatttctctctgctgaaattttatacctccctcccatgacgtctctggcctggggtgggggagggagggaccagcgcacgcagcctcttttgctgcacgatgttaatgttttaaacaggcacaggaaaagccgagcccttttgaaaaatactttgcgagtcctctcgttcgacgtggtagctgaactttttttcccctcttggaatcactcctgccacacgttggctgtttttctggaaagttactccgatgagccccctccctccctttcccccagccccggcgccctctcgccagctgtcagtccgcgccgtccgcggcccgcgtctactctccctcctggtcccccggtcccggggccgcccgcgggccaggcccaacccggggcagggtccgcagagggcgcgggacccggtaggggcggccatgccagcctcgcagaggggactcccagcctgcgagccgggtcggagggtcggcgtccgctccgcggcgatcctggcccgattcttcattgacaagatcggagtcgggaggcgggcagaagcctggagacgctccaggggcagtgaaaaatggtggcgttttccggaagatcgagggtgccctctggcgaggcgaggccgccagtgaaggagctcggctggtcgggagccggggaggctcgggggctgggggctgcggggtgggggctgaggggcgggagaaggggctgcggtagagagcgagaaaaacaagacccaggccccgaggaatcgcctccctcccggcccgacgtgcgcacgagcgcacctctccctccccgaccgccgctccggagccgctctcgcagaaatgtcatccagatgttcagcctccctccccgccgaggtctccgcagggagctgcgccagcgagcgcgaagtcagcagttggcccgagcccatttcccagatgggtgaggggaagtcggctctgtgctttcgctcctcttctcggcccgaacctctaggccttttcccacgagcagccaagggagggtagggcacgtggctccccgcaccccgcaacacagggcttgcctctgaactgaac

SEQ ID NO: 60932 - DNA, 727 bp, Homo sapiens
aagtaattacaagggaggaaactgatagcggaaagggctctgctctgactacacaggtagttttcaggagagctaagatgagaacacagctcttctgatatccaggccagtgctcttgctgtcacaggcatgctaacacacagtcctatccagtaacatgtgtgactgaactgagtgatttactggatatttaagaaatgcttgcaatgaggtttcaggggtgctactcccacttccgaatccttgcttttaacctgtgtccatccaggccttcccctcaacataatactggaatgttgtttgctttcagggctatcagcccatctcctatggatctcagccaaccagtgtcagggacctggccagtgatattgacttggagatctcatatgaagagtcaacaaagacgcaacttaaatgccccattaggctgggaatttgtggtacatctccctctgccagcctaggagaatggctggcacccagtagtatgtgctggagataaatactccagtaatgtctggtgtcagaagggcatttggctctgctgcttggcacttaggtgattttcctcaagccccttctttgtacctcagtgtgctttattgttgtgttagagatactactgctactcactttgcgggattattgggatttaatgagatattgaatatttgtacttttgaaagttattactactcagctatttgatgtgttgattcagcct

SEQ ID NO: 60933 - DNA, 1514 bp, Homo sapiens
agtagtagtgctttgcacttaatatattgatatatttaaacagagctacaaatacagacagttcctaacgaccaaattattttaccgtctcgcaggagcagcgttggcgagttttaataaccggaggttgcttccagatgtcaagcaaggcagatttaagaaagattcggtagtttggaggatggcacacagaatccaggaaccatgctgcgtaccctttaaaaattggggtggaggggcggggctgttagcagggacgcgtctgggccagtcggtttccaggaagtgacgtcaggcggccgcggagatggaggatttgctcgacttggacgaggagcttcgctacagcttggctacctccgtgaggaccaattcgggggccttgggggccaggatttggcgggtggggaggagcgaccccgccggccccgacttctctgaggcgactcagggcggcaggcctcgcgccgcgccgggtgaggcccagaaggaggcagcctcaccgccccgcccccaggccactgtgggctccgccgctgctggcctggggtttgctttctttaaaatcctcagaaagtagaaaacaccctgtccccgccggcgtctaggaccgtgggaaatttccgagcctttctccgttttctagagccccgagtgcgaacttccccagaacagatcgatcacagggtgataggggagccccggccggggtcgcactcgctcccatcctagagtttttcctttgggacacctcgtcgcagaagttcctgcaaaagccgcactgttttatgcatggaagggaggcaggcagggacggcctttcttcccggtaatccccgtggggaggtgggagttaacctcagttacctcagtagttaaggaaaccaagaccgatttgtaacgtgagggagtgattaggtgctcaggcactgaggccagatggagcatagagctgttgcctgggttcaaaaaaaaaaaaaaaacctaaaaaacgatttaacctttccgagccttggtttccttatgcctagaatggaggtgttacagtgaaaaggaaatgcaacaatacatgggaagcgtgtaactcagtgcttggcatatgttatcacggaagaggtcagaagaggttagctactgctgcctatgaggctgtggtttacccagcgttatagttagtaaataatggagctagattcaagacccaagttcagtgtctaccttcctcctttgtaacccccatcaggcctttttatctttaaaactggttaggatcgcacttactaaaagattgggccccagagcaagtctttagtgtctgctgtgaaatctctaagtgttttgaaggtcaccaggcctgctgatacgtgaatgttttttagtacctggggatgtgaatgtagttattcattcattcaacaaatatttattgagcccctactgtgtatcaggcagtgtcctaggtgctggagatacagcaatgaataaagcaaagttcctgccctcatgtgattatg

SEQ ID NO: 60934 - DNA, 1679 bp, Homo sapiens
cttgctctgtcacccaggctggagtgcagtggcacaatttcggctcactgcaacctccgcctcccaggttcaagcgattctcccgcctcagcctcccaaatagctgggactacaggcgcccgccacaacgccaggctaatcttttgtgtttttagtagagacggggtttcaccgtgttagccaggatggtctggatctcctgaccttgtgatctgcctgcctcgtcctcccaaagtgctgggattgcagctgtgagccactgcgcccggctggattgtcatctcagtagtggcccaaatgacatttgggtcagcagtgccttctgtttctccttacagagggccaagatgggtcgccgagctcaacaggagtcagcgcaggccgagaatcacctcaatggcaagaattcctctttgactctgactggagaggtgggtgctaaaaaaaaagaaaatctgaagaaatactgtttaagagttagtgattccttaatgaccaaggatttggtattccatatttcttctcttgaatgccaaccctttctcctgtcttgatttgggaattcccttccttggcatttgtccttgtagcaggaaatggaagaactttttttccttgatgccagactagtttctgtgcatttccttatattcttaatgtagaactttttatgttagctgaagcaagggactgggaagtttcaaaatccagtaggattccaggtttttatttccgctgaataaatgccagtgaggcagactggtgacgtaaggttggattacacaattggacattgctctcggtggtgacctgcgctttctacagtcttccggcaggaagcagatcatttactggccttactttcctggaaacttttccgagtagcctggaattatgggaaatgatccagcttctttgtggagggtgggtaattctgatgagcaatactttttactgccagggcactacttttggcagcttactcagagcccctttttaccttcctctgtccatttgaaaaaactttgcaaaagtcagcctcagggtcatcctctgccagaagttagctcttctctaacctctccaggctgacttagcagtccttcctttcacttcccatagtacctattgtgaacatatgccattatatgtgaattgtctttttacatgtctgtctcccccaccggacagtgagttcccagacagcaggaaacctggcttctagcttgctggcccatagtaggtttgcaacagatgaagagacccatgctgagaagcctaatgggtcaggcaggtgcatgagcaaatgaaccgggtacctgacatggacacacttcacttacatatcacataggtaggaatattcttcattttcgtaggaaatgcattctccaccactttcttaagctctccacatggccttgtccatttatctttcattttctccttttagaagtgtgggtatggagaatcattactttaagataacatctgtgctggcctagaaaaactagcagctgaccccttggcatcactgcctggaagaaactaggggagtgagttagggcagggggactgggaactggaggccacatgccccctctaaagggacaaccactacttagccaaagctggttggtgctgtcgagaatacaggcccagtattgccagatatgatt

SEQ ID NO: 60935 - DNA, 1282 bp, Homo sapiens
aaggcaatttgaaatgttctgagtaactcagtgcaaaacaacctcttccaaaggttgtaccagctcacagggtagacgtcattaagatccatttcccctcaacttcacagacccattaaaaaggtcagaaagcaagagataagctgacatccctgcctagcgcccaatttctggaagcccctaaggaagatgaggccagcatgcaggggtctttccccacgtggggcacctcaacccctgagacgccctttcccggccagaccctattcaacacccctccttgtcccctgccccatctcctggcttcctgtggctccgcccaccgcggggcggaagtgggtgtggccacgggcggaagcactgggtcaggggcccaatcgtgcagccagcccctcccactcgccaccgccccacccctccggcccagaccggaaatgaggtcagagagggaagccccggcggtgagagtcggcccaaaaagcggcggccgttggaggtggctgcggcagctggtgagggggaggaatgggttgagagtgttggggtcctgggggctagtaccagaggggatcggagcgccaagccgcggctgagcggctaagggcgtcttggggctgcggcagacggccggagggtgagggtggtggggccttgcttttcagggcccttgtccccatccctggggatgtgggtcgggccgtctccggggccacagccccctcttcccctttcttctttctgcctctctggggcgggctgcagcctgagggcttggtgtcccgagccatggtcgccccagccctcagggacgggccggggcgtggtggagagtccttcgaaacacagtttttgtcatatatgtggccatgttgcgacccccgatcccggagggagctcagtcgccaagacttgcattttggcagtttctgccctagaagagccgatccccgcccctcgtgagcccaaatgagcagttgcctcctgcctctcccacctcctactccgcccctcacttccaccctgctcctgtctctcttcttacttgctgtccaccagctacccgttccttcctgtgcgtgactcagcctcatctctgcccgggtgcgtgcctggccgccgggtcctctcgagagtgtgcatccgcgactggagatggggagttctagggttcttttgtcactactgttggaattacaggctttgaggcaggaaaggattctgcacaggcattcgactgcaagttgtttgatgacttcgttccatgttcaagtttgtgctgttc

SEQ ID NO: 60936 - DNA, 691 bp, Homo sapiens
cacagggatgttccacccctggttctcatgcagtagtgtgggagagtgctgaagccggcccagcatgcctcttagttgcctctggttctcatgcagcagtgtgtgtgcttacaggagtggagatgatgggatgggagagtgctgaagctggcccagcatgcctctgagtcacccctggctctcatgcagcagtgtgtgtgcttacagggacttcccaggctgcacttcccttccctgtgggctgcacccgtagaagtatagaaaatgtaatgtctgttgaatataaaatcgtaccactgaattgttctagtgatgaggttagattttgttgtcatgtgcattgtcaccatagtgacccgtggcatatatttttaacatacttggttgggtttgagagaaatctgtggacgtaattttttgtttgtgtcaagctctatgactcatgcagtgattggtcccatgatcatggcctattagtgaaaacctccaaaggtcaggtggccaaggtgttcccacattttttctatataacttgtttcctaatagtctgcctttctacctatgattaaaaataatttttatatacaacattatttacatttcaaacatctctacgaagtcatgccattttaaggagatgaaaacagccacagagttgagtgacttgctccaaatcacataactaagccag

SEQ ID NO: 60937 - DNA, 1089 bp, Homo sapiens
gttgctcaggctggtctcaaactccgaagctcaagccatccttccgccttggcctcccaaagtgctgagattacaggcgtgagccaccacgcccggcccaggtgcatgtttttaatggtctgcctccacaatacatttcctgaatgttctctctgaatgccaaggagtctggttaaaacaaacaaacaaacaaaacctcccgccagccagaggcataatggagacgtggggcttctacagatattcatagccaagaggagttgaattatgctggagagggaaaacataggggccacgtggtgcccagtgcccctactttctttcttcttattccagctcttcatttttattccccaatcctgaaatgtagttgggatttaccatgagccagcgggggctgaaagagccccgtttacctctaggccctacgttcctctggacgagtttcatttccaggaaactgctcccctcctggagacaacagggttttcagcagccccaggtccgcgtccattcagcctaacaaccccaggggaaacgtaaatggtagcagttggctgtctttacaaatagtttcaacaaaatccccagggttcattctctttaagttcctgagacctcacgctcctcctgcgcggatcgttgtggcccggagaacacagcaagctgattggccagagctggtcacgtgccccggcgggcgggggagggggcatgtcggggagccggggccgggggcggtcagccccactctaccaacattgatagaaagaaaagaggaggtcttcaaggaaaattagagcttcttaccagaggaaagagaataactgtctggcagataaatcccagatgtccactctaaccgtccaccttggaacctccaccttcctgtgctcgtcttagaggaattctagaactgtcgttggaggaacaccgctgttttctagaggtcccacagccgtccttctgttcatgcggagtacgggccagcagcttcattttcctaagagcatgttaattccgtttctcatctggctcattttcaaagccatgtttccacacttaatgaaaacacagtatctgtattac

SEQ ID NO: 60938 - DNA, 1459 bp, Homo sapiens
ccctgtcttcacttgcacccacaccagttaacatggttaactttctaaaccatgagcgggcaggttaaggtcaaactaaaatgggccaagtccagccccctccaccacctgtttttgtaagtggttatgtttagcatgtatcttcaactctcctctttgtacacaaagcctaaaatctttactgtctggtcctgtccagcaaaagcttgccaaccctgttatgaacccagaagtggctgctgtcctgcttctccttgcgtaccccagacttccctacacattagcatcccctgaagggactgaggaaatgcagatttctgggccccagcagctagagattctgattcagtgggtctggggtgaagcctgcaatgttcccacaccccaaatcgttctaatgtaggtggcccaaggtccacactttgggaaattctgctgtaatcgcagagccagcctgaagtccctgaaacatcatgggtactggccagcgagggccagtgctctgcgctccctgttctgtctgcctggaaagccttggaaaacgcctttctcctctgcaaaagtcgtgtcctcttcccagacctcccactcccataccagacaagcattgtcaccttctcctctcctgctccataaagcacctgtccctctacaaccctgatgatgtgcttgtgtgtctgtctcagtagccagactgggagctcttccaagatgacatcatttcactgcccccagcccttgcatagaaggccttaaatcaatatttggtgaatcaatgaatgaacagatggacttgctccaaattgctgcataaagcaatgcaaagtcaggactgagtccaaacactgggatcccctgtcgggtaacctccaggctgagccatcagttgctggagcacagtggttcagagcagagctggcctgggtgtgaatctagctctgtactttgctagctctgtgaccttgggcagcttatacaagcctgattacatcacctctaaaatgagaaagatgatgttaatagcacttacctcacagagttgctctgaggtttaaatgaagtaatccatggaaagctcttcagcacataggaagcatttaatacatgttaattatggttttattctgtcatatctctttgtccacgccaggcatgtgccaaggtggagcctgacaggaagcctcagcctttctatagtgagggcacagcagggactactcagactcaagtctcggggtcagccaaccccatctctctcttgtcactgggattctactggaaatcgccagctgtgggaagtcctgccaggtggcccaggaccctggaaataggcagatcttagagttcagctactaaagctcctgctccctcctcccagcccaactcaagaaacctaccccgcagcaccttattctttggtcaccagccaggagggtcaaggtagaattgcttcaggaga

SEQ ID NO: 60939 - DNA, 1269 bp, Homo sapiens
acgtgatttgcaaatgttttctcccagtctggctttatttttcatttccttaacagtatattttgaaaagcagaaatttttttgataaagtttagtttatcaatatattgttttgggtcatattttcttgcttctttgcatgcttagtaaattttgcttggatgccagacattttcagtaaataatgccactttatactaagctttaaatcaagtcataagtcctccaacattattcttctgtttcaaaattatctgagctgttctagctatgttacacttccatatggagtttagaatcagctgattgtctccaggtttggctataaaaataaaggaaccatgaacaatcatatacaggttttttgtggacatcttacagtaggtagctagtcagacataaacaaggcaggaaagggttcccccatcacacacacaccaggaatgtcaggcatccatcaggtgatgattaggcagttgccagctgtctctctaaaataatatttggtcacagcttgccccagggaaaggcagtgtccgaatagatagaaaaaacctgaaactggtgatcagcagcttcctgataagatctccagaattgggcgagtgggctcaagcatgtgcactaagaggcaaaatgacagagtttaactctaggaatgctagactgataagggaagaacacctcaagtgagcatgcgtacaactccagcaaacatactgcgcatgcgccccctcccaagtgctaccaggccactacacatgcttacagctcactgcaggggaaaaatcaggaaaaaagccaggcaagaccctgaacgtatgccaaggtatacaactccaagtcaaaggtcaaacagtgcactggatctctctatttgcctgcttggccctcttccaagtgtactttacttcgtctcattcctgctctaaagctgttcagtaaattttcacttctgctctaaaacttgcctcagtctctccctccttatgcctctccattgaattctttcttctgaggaggcaagaattgaggttactgcagacttgtatggatttgtggttggtaacatactttggtgccacatgactcagatacattctgctgctaacagacctaagtttttgtttctctgggataaatgcccaggagtgctatttgtgggtcatatggtaagtatatgtttgcttttttaaaaaactgatcaagtattttcgagagtggctatacaatttcacattcccaccagccatatatagaagatccagt

SEQ ID NO: 60940 - DNA, 2169 bp, Homo sapiens
tatctggaaaccaaatatgccaagtaaatataagtgggactactgtaatgtgtaggtgggggggcggggggggccctcctctgagatccctagaactctactggtctggaaacctctggactagtatactgtatcactaaggcattagaagagctccaggaaaaacagcaacatagttaaaagaatatgtttagttctctggaaacaattacttctgtggagtttcccacattcctcagaagtatggacacacaagacattcctgaattcactgagtgcctactgtataccaagcaatgtgttaacaccagagatacagcgaacaaaatggacgtggccctgcgctcctgaagtttgcattctaatggcagatacacagtaaaatttaaaatatttctatatgaaatatatattatcaatgacacacacattgcgtaccaattgtgtaaagttccacaaaggaaaaccacagaatatacaattggagccctcattcctaagtacttcttggtcctgtcccataaattaaaggcaaaaagtctgcgagttccatgggatctcagaaactgatggtcgcataaaaccctccgtaatttcaaagcccagaaatagagaatgcagacaaattatgaaacaataacgaaataaacaccccctctttgaggtatcgactgggcattgcccccaccccagcacatctccctctaaaccgccgggagtgggggcaggaatgctccaaagctgagatctaaatgtgtctctgattgaacgtccgtttttcaaccaaagacaccggtgagcgagagctgccaggtggcagtgaaaggcgagtgtgaagttaacctggggaagatcggtgcgtccagtacttcggccataaacctcccagagccgacccgcctcgcccgctgagaatttgggcactcgcctaggtccgagctactaccccttcccgacccgccggggtgctgacttggccgaccccacaatttctctgcacccccagggccaggaaagggccctgcccgtccacagctcctctccaccttaaccgcggccggacgccatctgacaacaggcgggaggaggggccgcccacgagggacgtcggccaggtccaggcctcgtggggtcaggaggggcccgcggggcaggggctcaggaccgcctccctacacctcggcactgcccggggcacggtagtcgtgaggcccggccaaccgcacgccgccccaggcccgcggagccccgcagaggcgagccctggccgggctcctgtctgtcggtacgcctggccggtacctgagagggcgcggaagaggcgcgtggccggcagcagcaggtaacacaagcacgacgcgatcatggccggccgcccgcgcccgcctccgctcctcactgcagccagcaggtcctccctcagctcggccccgcccccggcccggtccggcccacgtggtgccgccgccgcgcttcaacaacaactttattgggagcgcaggtctacgggtgcgcacgcaggaagtgggaggagccggttcccatggcaactagccacccctagcacccggctgccacccaggcgtcccgaattaaaattgagcgcctcactggaggccccatagtgttattcaaaggccacagtttattcccacttctgcagctgactaggtgtccaccttgttaccacactatagcctctccgcccctcagtttcctcacctgtaaaatgaagagctggactttctctaaggctccactgaaccttgacttctagcccttctcgacccagaaaggaagcgagttattcccccatttcccccgttttcctgcctctacttccctgtctcagattctaggtcacaaattgagtcctaccttgcttcaggaagtaagactttgtctccttccctactttctaaacgggccttcttttccctaatctagaaaaacagggtttcccattggtaaggaagtcaagaaagaaaggagagaggacaaagagaggagagagagaagggagagaggagagagacagaagagagaaacttccacaaggccagggaccagttctggctggttgtttgctcactttgaggtatctctaatacaatccaagcacctattgtaaccaagtacccagcttggaagttatattcttgttatata

SEQ ID NO: 60941 - DNA, 727 bp, Homo sapiens
ccactggacctggcctggccaacagtttttaaggggatcttggaggacaaggggctgaaaaattaggatcattgattggtcgggacaagggggattaaatcatcaggaggtagcagctgcatgcttttggtgagtcagctcctcttggggtccttcagaccagctgatgtcagtagtagtttcaccagcatctcagatggaaaactgaacatttcacaatgctgcaatgttatctgcagagcagtgaaaaggaactatgatcctgtgacagagtctatgtggttctggggcaacaggcagcaaacaactctgaggaaggggtcagagagcagctgacctcatgaccaatgctgtgtgtgctgcaagctgggctgattcccatttctcccctcccttcttccctgatcaattttataaagttgatagggacagtttcaggactgagaaataattctttaaaaatattatttataaaggatctgaaagaagaaaaggagtcagtgaattcaatagagaatgagtgactgaaagacaggagaagctacagaatggtagagacagccaaacacaagctgcaggaaaactgagttggccaagttcaatgatgcagacatctgagagagtgatgaatgaggaaggcaattctgtgcgtccatgtctattcagttatgaaatacatggcaagctccaaaaagtcttgaaatacactgtcattgttggttgctag

SEQ ID NO: 60942 - DNA, 2603 bp, Homo sapiens
atcacagcagagagcgctcctgggatctggcccccagggttggtccatttaaagaagccacacttgagcctgagcctagcagagctagtgagagaagagtgttggctccatgctggcacggggcctgcctgtccctccaccccttcaagaacccgtgacaaacaaccttgcctggtgcccaagtgcctgccaagccctgtcatattaaaaccctggaagactcggcaaggagtccaatttcagcccagcaggtggggaaaccaaggcaataagagcccaatgtgaccaaggtcacacacagctctggctacaaggccccggaggccgggcatccagggctgcaggctaagcaccgagcaccctcaccctcaccccagccaaggctcagctgggcacagaggaggaacaaacatcccccacgtcattcaacagcagagcccagagaaaggcccagcacttcccctccatgaatgctattgctggtcccctccctcccctggcgggagggggggatacagaggcactgagactccctggagcctctttggcaagtcatttccaagccaggcagcctgatctcaagcagctcccagttgagtgcctgaaacaccagacatcaaaaacctggcaggcctggggagaagggaagattagatcattacagcagaatgaagcaaaccaaaaacccagagaaggcaggagggacagaggccaagaatgtttcaaggcaacctgaaactccttcagatgagagcggcccgtacagtggcagcttcccctactgccaggaaagcctggcgtgtctcagcccctttttgggtggagtagggagtgtactggtccatacacgtgcgctcggaggtgatgggaacaggaagcatgttctggtcttccatgtgcacacacatttggacacataaacgtgcatgcacaggtgtccaggccaggcgtgtaagcccccaggagtgcatgcgtgtgtttgcgtgcagtctacaaacatgttttcacaaagctcaaggagaagcaatcagtcatctccaaggaatcttagcaacagccatccccagaaaaggctcctgccagctggggcagcgatgagtcagcagaggcgtcgtgggggaggcgggaggcgaggcagcctcagccctggagcctgagccggcctctcccttctcctgggaaggcctccagacccggcctggccgccacgcctgggtcactgctttggcactgatgtccgagaacacattcctggaactggccagcacaggcggctggagggtttttccctcctcctctctctccctctcaccctcctgtccgggccccacacccgcccttttatttttccttcttgctgcaaaaccaaaacaccgtgttcacgagttcaggcgctgtagccaagtggcaggagctggcagagcaattgggaaacaggagctgcctggcccaagcaggccaggggatgaggacacctctggccagccacagagagggccctgctagggcttgctgagccctggttaagtactgcagggcaaaaatgtcatcgcctggggccccagggaaccggagttcaaggtggcagctcccagagaaatggcctgtgtctctctgccccagtagcagagcccgaggtcactagcagaggatggcggctggaaggtgaccaaaggagcagagaaccacaattattaatcatgaatccattgcctgagtgcatacacagtcttcagagccacctcagggtagaattatgtccttatacagacagggaggtgaaggtgtgggcaggtgaaggaatttggcacaaggtcacgcagctagcttttagccacggagcttgatggaattaatccagcttcgagctgacttggaggctttaactgatgggccacactggcttttcttcctgggctgcagctacacagtatgccaggatcgcagcacttacaaaaaataaaataaaataaaaacaacaaaaaaagagcgagtgctgtctcctatctctcccccacccgcatgcaaacagatctgggggaagagccatctgcaacctcagcagcggaggtggtggcagcggcgtggcaggcggcggtggcaggggcagtaacagcccagcccgaatccctggcctctttactggaggcaggaaatgaataaaagctaaatgagtttgaaaatgccaggaggcagtgtttatccccttcccccaccccctccccctggcaaggaccgcgtatagttacagtttaatcttggaaatgccagacagctgttccccgttgctaagagactggcccacattatgcagatgtcaggggcctcaaatgtctgccggaaattacagatcatgttggaagagcagaggggccttctcttgactggggaagcgcagtgggagactccttgggtggatggcagaaataaggggcccaccctttccgggtctcttccgaggctctgaggctccagcctgtccctcctcccagctccccgatgccttggctcccaccccaggttccggcctccatcctttggcaactgtgccaatggccatgtccaccccccacctccagtgctccttctgggacatctttctt

SEQ ID NO: 60943 - DNA, 1041 bp, Homo sapiens
cttacttagaacaaggggcacctgcaacccacacactcacaggtagacagatgtgctttatggtgcaggagaaaggactccaccctcacatggcttgtgaaagaaactctacagtgagtaaaagccaaatagaactgcaatcaatttgtgaaagccacctgggtgcagcggctcatgcctgtaatcccagcactttgggaggccgaggcaggtggatcacctgaggtcgggagttcgagaccagcctagccaatatagtgaaaccccgtctctactaaaaatataaaaattagctgggtgtggtggtgggtgcctgtaattccagctactcgggaggctgaggcaggaggatcgcttgaacccaagaggcagaggttgcagtgagccaagatcacgccactgcactccagcctgggcgacagagcaagactccatctcaaaaacaaacaaaaaaattgtgaaagccaatttgaatgctaagacgaccaaaaaaccaaaatgacacatttaagggacaaagttcaatcagagtatgtgtcagcatgtgagaggttggtgtgactttacctcgttcccagcagtcttgggtggtgcctctagggagatggtatataaatatctagagagagtgcatttctatctcttgttggtttcacacactttctttctttttaaaaaaatattttcttttgggccgggcgtggtggctcacgcctgtaatcccagcactttgggaggccgaggtgggcagatcacgaggtcaggagatcgagaccatcctggctaacacagtgaaaccctgtctctactaaaaatacataaaattagctgggcatggtggtgggcgcctgtagtcccagctactcgggaggctgagacaggagaatggtgtgaacccgggaggcggagcttgcagtgagctgaggtcgcgccactgcactccagcctgggcaaaagagcgagactccatctcaaaaaatatatatattttttattttaagttctgggatacatgtgcaggacatgcaggtttgttacata

SEQ ID NO: 60944 - DNA, 2346 bp, Homo sapiens
ttgttgcccaggctggagtgcaatggcatgacctcagctcactgcgaattctgcctcctgggttcaagcgattctcctgcctcagcctccagagtagctgggattacaggcaggctccaccacacccagctaattttgtatttttaatagacatggggtttctccatgttggtcaggctgctcttgaactcctgacctcaggtgatccgcccgcctcggcctcccaaagtgctgggattacaggcgtgagccaccacgcccggcctcacacacttttttatctctcctcatttcacgtattcattcaccaaacctgggcatccccaccctgatccaagtccttgcagtctctggggtgggggagaattgggaggagtggaacagaaaagaatgggacaagggggtcctctcttcagacagttcaccgaccggccccaacccctattttctgtctggggaacacaggctccacctgcctgctgcccaagccaaagccctggcatcccttcttccaaccaagcaccaggcctggtcatgtgtacctcttaaatcactctgatctgaaatcactcacctcctaccgttgccctaggtcaagccacagaagcctggcctagcctctcggggtacacatcccacccatcctccaggagtcctccgtaggcacagccatctttaacaaacacacactggccttgccatgtcccactgaaaaagcccgtaggccttggagagcctgtcgtgcccctgcaaggcagcccctctttccacactggaccaggtgaagtatgtgcttctaggaggcaccaacgggtacttcccaggtgctcgtctccccacgcagggggcagcatggtgtctagaacacggtggcactggctggtgacacctgggccaaggcaacccgtgggatttttcttccctaccgcgctgagtaaccatgtggtggcaggcgaggccccgccgggactaaagagccggcaagcgcggggcccaggcagcagctggtgtcgccaaggaaaccgctcgcagcgcctcccggggccggccttttcacttggcctttttggcaggcttcctcagccaccctgaaacccattcatccgggtgcgccgggccctcgcccctgcccccaccctgcccttctgcctcactggccagctcttccccctccccctccccctccccttcctctcctctcctctcttccccgctgccctccctgctgcagcctttgccaaagctcagggaggggaaagctgggccaaggaaggactccgattttcaattctaagctgatttcccctctgcaggcagcaagccctttcatgcattttttccctattatcataaacgcaggaacttgcattaggatgaatgagcagaaactcctgtctttgtcaaagccttggcagaatgccaggcatagaatgacctaaaacactcagagctaaatggagctggaaagggggtggagatcccatgtcgggtgagaaatgggaaggggggagtgtggcccttggcctctaattatcataataaagtgtttgccctgtgctcaggcactatgctaagccctttgcacagattctcgtttaatccgcacaaaattcctacgtcctattcatccccccattttcatagatgccaaaactgaaaatcagaggtgtcaaggaacaggcccaacatcacacagtaaatgagtgatggagtgggatttgaacctttcagactctggagcctcaactgatgtcaaggtcaccttcccgagctggttcagagctccacagccagttctcaccgcctaggccctccaaatcctttccctaccctcacctcccctcacccacagcctcccttcaacggtgctcctgtaatttccatttgtcagtgtaattttgcaaagcaggcttttccaaaaatcagatatggataggagtccccggggcagagggaaagcggggctccccaagacccagccaaggcatcctgtttgtgctgcctggtgggcagagaccttgattttaaacttgcttgtcacatgtccagctacagcacaggcactccggcaccgagccagtgctcagcaatgttgatcaggtgctgccctgaatccacacttcctctctagatccatagtccaccctcctccaccttttccttaccctgacctctcaggactgtgccacagagcgttcttaccccttggcttcgggttagattcagccaatggaataaggtggcaggtgactggagggcagaaggataaagaggtcggggtatttaccccacactcacttccttgctgggcatggggtgccagtggctgctttcctctgcccatgc

SEQ ID NO: 60945 - DNA, 1433 bp, Homo sapiens
cccgcctcggcctcccaaagtgctgggattacaggcgtgagccactgcgcccggccaggagatcctgtttcttaaaaagacatatataattgaataaatggagtaacggggcagggccagtggcataggtatttttcagaagcttgtgattttgaggcacccctaagttttctaggtggataaagcacctggcagggtgcctggcctgaggttagcttagtgccagaggccggctgatggcattatcttgttcctttaagtttcctcgcccacacctataccttgggcctcccagtgatatcactgggaagccctgtggcatcctgacccaagggcccagccattccagcttctaacccatcccacaggggacagctcctggctgccacgccctcccttccctcctctcacccactttggaagggtgagtcaggacagaagaccaggaacagtggcctcaggccactctcccgctgcccaggcagcctgttctgcccagggctgtggcaggaaggagccaagccacagggcaggccaaggctgtgcgggcagctcagggcaggggcctggggtggggcggaggagctcccctttcttgctgggatctctccacaggccgccagcaggccctgagctccaaggggagcctcttccaccgggccactttcactttctcttttctccacagaagcagaaccagcaggcccagctcacagagatggggtgggagttaggagtcagaaaaactggcttggccaggcgcagcggctcaaacctgtaatcccagcactttgggaggccgggacgagtgcatcaccagaggtcaggagttcgagaccagcctagccaacatggtgaaaccctgtctctactaaaaatacaaaaattagctgggcatggtggggggcacctgtaatcacagctactttcaggagacagaggcaggagaatcgcttgaactcagaaggcggaggttgcagtgagccgagattgcgccattgtactccagcctgggcaacaagagtgaaactccgtctcaaaaaaaaaagaaaaaagaaaaagaaaaactggctcctggggggcctcctgaacatgggagaaaggcggctcaacagcctctgtgccccatagccatgtgagtaaatctcagcagagaaatagtaataatgacagtcccttatattcctcagccaggaatacctttatttatttatttatttatttttatttttgagacagggtctcaatctatcacccaggttggagtgcagtggtgcaatctcagctcactgcaacctccacctcccagactcaagcaatcctctcaccttagcctcccgaggagctaatttttaaaattttttgtagagatggtctcactatattgcccagtctagtctcacactcctggtctcaatcgaccctcctgcctc

SEQ ID NO: 60946 - DNA, 2163 bp, Homo sapiens
tgcattcatttctgtatttaatgttactgagcaccaactatgtcccacacactcttccaggtactggggatacagcagagccaaacaaaaccgagaaagtctctgccctcaagcttttattgaaggagggaaatagacaaaagagaagcaaacaaacaaaaaaggtaaaatcagagggtggtaaaagctatgaaggaaataaagcagtataactgcttaaggagcagggacctctgcaggtggatggcaagggaaggtctctctgcagagacgacattgacattcatgctgagacctgggccagccatgcaaagaaggggggtgtaggcagaagtgccgcagtgggaacaggctagaagttgggcctggtgctgggacagtcccagttcaggcatgtcctcctggtgtcgtttttaatagctcatcctttcacaatcaagagtggctcatgccggagatgagttacccgcaatgaggggctggatttattctaagggcagagggaagccatcacaggaaatgatgtgattgatgttttgaaaagaactcgctggctgttccgtgaagaataaattagaggggcaggagggaagaagtctgcctggggcggctgcagcaacccaggcgtgctgcgaggtgccctttgactagattccagtgggggctttcgggcgagcagaagaaccccagggatcagctctagccacgctcagctccctgggccggccctgggcatttctgagacggccctcgcgctcagggacctctcctcgcagttccattgtctgttcttgcggagtcctgccacactgggagggccaccccctcctcttgctcccctcccctccccgggtccagcccctcccctgcctggcccggctgccgcccagcgccagccagagcccaccccgcctccctgcaggaagccggctggcggcgcctgctgcgtgaccttgggctgcaaagtcgggcgtttgcaaagtcaaagcgagtcacttcctcccccaggcctcccccgagcgggcagccggccgccgctccctgccccctcgcccgccgcgggccggggctggcgctggcacgaacgcgctctgcatgctaagtgctcgcgcccgttcccgccgcccggaggctcatttgtcacccgctgctgactcagcacttctgcagaaggcttttccctccgctttggaggaggaggcccggaaatgaggcagaggctcttccttcccttccctccagcaggggtgtgtggcgtgggtgtgtgcgggtgtggcagggtctgtctgtatgtctgatgcctgtccatcaccggtgtatattttcgcggctgtgtctgtcttttgtgtatggctgagtctgtgtatgtgtcttagtgcatgttgatccctgcgcctgtctggtgggtctttgtccctgtctgtgggcatctgtgttggcctgtgggcctgtcatgtgtgtgtcatacgtgtgtctgggtgagtgtgtgtgtgtcccccccacccccctccctcagccccagcctcctcccctcagacttcaccttgtctcctggagtgaccctggggtttctgaggccaaagtggcacaccttccctcccctggcacccccagctcccatcccaccctctgccaccagtcccctaacatgggacctcaggggctgaaaacacaggctctggaatcagccacatctccacatctaggtctcagcctaggctctgcacttgccacagggaccttaaatgagatacctttcctgagcctgtttccacacttataaaatagaggtgatcatatctccctaaaagaggataatttcatgatggggtctggtatatcacatgcagcaaatggtgcctgttatttctacttaaagcaataggcccagtgtcaggcacatagccagggtctaataaacggccacttaagaataaaagcaccaagaagccctttccttggctgccagaaaagggagtgggtggggagatggtgacctggattgggagctgggcaggagctgtttgcatgacacctactgtgaggagagagatgtggtgacctgatttagtgctgccttgggcagccaaggaagtcaggaaggaaatcacagacgaggggctcgggagctgctgtgccctgccctgcccttccccagaccac

SEQ ID NO: 60947 - DNA, 1652 bp, Homo sapiens
ttcttttttttttttttagacagagtctagctctgtcgcccaggctgaagtgcagtggcacgatctcggctcactacaacctctgcctcctgggttcgagtgattctcctgtctcagcttcctgagtagctgagactatgcctggctaacttttgcagttttagtagagacggggtttcaccatgttggccaggctggtctcaaactcctgaccttaggtgacctgcccacttcagcctcccaaagtgctgggattacaggcgtgagccacctcacccagcctgctattttcattaggaggaaaagagggatggtagctttcatccagatcccccatcttcagaatgttttcaactttccccagaacctccacagcgttaagtcagtcaaaatccttggatggacccttccaagtagcaagggccaccctgtcccctttcccctggccatgagaccacgcagagcgcaggggccggagtcagaaagggcagtttggcccctgggcagtctcctgagagtctttctcctcccagtttctactatttggcggaaccttgaatgcaggggggcgggacagagaaaaaactagaaagctcgacttctgcctgcggggccggaagccccgctgcggccccagcccgcggttagcccctgtttgtcattttgcaaatctggtcaacccacctccggtgaaaactcccaacctcaccccagggggcaatgactaattacaaaacacattttctctcgttttcgtcaagctcgctgtcccgcccacacatcccccgcctatcccggcacccgtcggcttcctcaggagcctcactcaactgtgttgaatgaactcttggcctggtccctcccccagagacttcacaccgtggggttctttcctccctgctcagctttactttcactttctagtcactctcacttctctgtcagcttcagcttctcaccctagagcttgagccctggtcctttcttaaggcaggggctattgcccaagtcctgggctgcacccaattcgtcaaaagtctcgattcatcaatagtcaaaaatatttatcaaatgcattctgttccaggctctaggaatgcagtgcaagacaggcaaggttcttgctcatacagagcttctagaaacctgggatacagagatgcaatcaagtgataaaacacatggatgaaggctctgccattgaacacatggttcttgacaagcccacagagaggcacagctaagccagccctggggagccagggagggttccctggagggagagaagctggatccaggtctgaaagatgacttgaagtcagccatgagcaaggaagagattttccaggccaagcgaacagcctgtgagtggtgccatttgggtgaggctggctggagctcacagggtgggagggagtgcagggagctggggtccccaaaggtggaaagaagccagacccaaaaggactttgaaattctgctcagccatttggattttgtcctgagggtgatggagatttgtgagccccaaatatctgagacaggtcccagtccctttagaaagtttatttttgccaagggtaaggacaagcccatgacacagccttaggaggtcctgaagacaggtgcgcaaggtggtcaaggtacagctt

SEQ ID NO: 60948 - DNA, 1231 bp, Homo sapiens
tcatgggtcctgaaccattgagccaagtcagaggtccagaaagtgacacgtcaaggcctctgctagggtgtttcaggaccagggaagagtggggtaagacagtggaaggtgcctggtaggcgtggtcagggcaggcccagagggctggaaactgcagagaggttggccaatgcaggagaatgggaatgcagaccctgtgctccaagggcctctctgcctgctgagttgggggttgggggaaggggctccagtctgtgtattgactccctgtccttctttgacctctgcacgcctagccagcaaggtgctggatggctcaatcagagagaaatgtgatttgggccaagtttccttccacctgagcccagggaagagctggaggcctggccagtggggcagaggccaaaattacagtatcagggagatttaccatcaaatccagaatggcctcattcctgagtcatgctgtcctgtaaacttagagcacctcccagcactcatgaactcggtgctggggcagtttcttatcttaaacctgtggataagtgaggcttgagattttcccacccctgctcagtgaattcgtgtttactcaacaaaacacaagccaaaatgtccaagctgaagcaattgcctctccattagccagttgtatgtttctggtactctccccctatctggttgtgagcatagccacaaggactttaacttatgactacattcccaatgctgaatcaattattattgaccaaatgacacaacaaagcaaggagcatccaggttttctgactgagaacttgattacttctctgcattgctcccccatagtccaggtgtctgctcagttgagggggcaggaagttcctgtttggcagggacagttccaggttttgatgaccaaattggtatctatactaagtcatcatttatgcatttactgctggaggttaagggaaatggttacataacccaaggagactgtgtcagcctgtagcagcccctcctcctgtagccacggacacccagctccatttacaagaagttccctcatatctgcccccaacatcctatgtccccacagccacccaagttgatgggagacaagaccccctgataggttcaacctgtcagctttccggacagaccagagatcccccactctctcggagaccctggagtagaatcagctgagaagagaatgtcttctggccacaggccctagggccctgtg

SEQ ID NO: 60949 - DNA, 675 bp, Homo sapiens
ccattttgctaaggtgggctgttgtcacctatgcatagccctctgcctgcctcctctgtcccccaccactgtaccctcctaccctctccttcccagacatgagggttttatttttaaccagagtttacaagcaggatctggaaaagccagtttgtggaagatgttccagcactggctggctccctcccccacagtgggagggagagtggctcgggcagcccttggccaggcagggagacctgcccaacaggtgtgggtgaagggcagcaggcccagggactaacagcccagccatccttgccagctgcagaactggaagggggcccagattgaccctggctgctctggaggggaggagaggttgccctatggcaggggtggaagcagcagaaccttctgggctttgctgatgtctcctcccctatggggactgattggcccagggcttccctctctccctggggacatctctgggcagagtggcccaatgccctgctattgcaagccagccctctccttctcgggcaccagggagggggcaggcaaggccaggttccccggtaggcagattaagtgtgttctcaggccactggcagcaaaaggccatcaacaaagtgttttggtttggttttgcttttttaagagctaatatttcatacttcaaaaatagcaagg

SEQ ID NO: 60950 - DNA, 6631 bp, Homo sapiens
aaggacacatttgcaggaagctgacatgaatatctatttatatgtggggagattcttagaggtgaggcaggcacctcccatgtaccaggattaagaggctgcagcagatccatcaatattgccacttatccacacccacacacacacacgcgagtgcgcgtgcacacagagtcctggtttccaccacttcagtgatggcagtggcaaagcaggaaaagaaactaaaagggtgttattaacaagttccgacaccagcccggcctccacaccagagttctgggcgaaccagtgatttgtttctccccaaacgtgcctgtacccatccccacctcccagtcttcccactcctttgatgggagtggagtgggggatccaagtttcttaatagtccttcagccttggaggggaccaacagggcccagctcgccccgcccaggaatgagatgtggccaggaatcaatttgactggattgccgggttttgttttgcttcctccctcctgttttctgctcttctatttgcctcccaggaaagtacaaggttcagatcaggtttgtttgccttcccctaccactgggaggactccaggctgctctcagcccacgagcaggggctctgctctaaagggcagtagtcttctctccgcttccccgcctctctgcacctcacaaacgccgccaaaagctgattagatgaataattgcattgcttcaccagcaggaatggatttttatttgatgttggaagtaaacctttgcttcaggaactaagtttggggtttccccccctcttcctcatcctcagaaaccctctctaatcaactaagtctttagaattatttctgcctttaaaaataattatttaaaatacaagaaagaaaacttgtaatgaatgaggtgaaaactggttttccaaggaaccagcctgaagctactgcggactctccaaggctgagtgtatgcatttgctcccagctctgtggcagttttgttttaaatatgcagactgatgtctgtcatatctaagaagcaaagcatcctagcttttctcctagactttttcgcccacttgtcaagtcaccagctgcactgggtgtcagcctatgttcaccgccacagggcgaggcaccagaaagcattcttgacaatgccatttgcagctgggcccgcatccgggggaaaatagagatgctgaagagtaaaccgaaatcgcttagtcagcaactgtcgcctccccaagaggtgaatttaaatagcctggtaccgagggggaggggcagcaaggcagcacagggcctttcccacaggccagctcccagggctttcaaaagcactaggattttcgttctatactggaggtagggagggtgtcgcctacgtcggagttgcatggccttagccctagaaagacaaaattgctgactcagcgcagttaatatcaattgaatttattacaagttactaagctccaaggcacattacagtgttctgttaactacagaaatgtataaaggacaaacagagcagattctccatgtctagcatttcgctctactgttcaaaagcatccgtgcatcaataaagcaaaaacaaaacaacacgtgtagatccaacacattcaggtcagtagaaacaaaccaaaacattttcccctcacaaacttgcaacaaaatacaccccatcccccccgacacccccttaccattttgcaaacaaaacagaaaaacaaaacaaaacaacaaaataaagtgaagacttcaacacttggggcagtttagaaggaagctttcaccattttatagcattttttttttttttttttttttttttttttttttttaggcagcaacactggccttggcaaaaaaaaaaaaaaaaaaaaaaaagtctttttcttttgtgtgtgtttttcctttcagagagtgcataacatttacaaaaatacacaccagcagcagtcgttgctaagggctattaattctgtacctaggcaaacattctgccaccaaataaatgctaacgatatgatgcaaatgacccaaccaatactatactgcttaacacaaaccagcttatccttcaaatgaagaagttacatacctttgtttcaaaatatagaaacatacgacgaaaataatgtctatacataagactaactttttgcagtttcgttatattcacaattctacaccttgggggtgaggggagggagggtcgagttgggttgggggaggggccctcaggattggagaggagctggtctagggcaaaggaggtggctgcccagtggttcaagggtctctctcctttttcactttaacatccccagctaagatagtcgcgatttcgccctgcatgaaggcccaaggtacattcgacccgactagggggcatttctctccgctggggcaatacacctcgccggtggccccctgggccttgatactctctctagagcaagggaagcaaaatttgtggctggggacggaagggcactgaacgaaatgcgtatcctccaaacgttcgtggcaaatggtgcagcagaggggtccgctgttggccatgggggaatccggaatgttttgggggtgcacttggtccatgcccgggtgggcgctaggcggcgggggcgccacctgtaaattcaggtccccgttacgtgatgccaagcggcgctgccccggcacggaggccggcgagactgggctgctgctgtttcgccgcgccgacgcagtggtagagtgcacggaactgccatccttgggcgagtgcgctgtgcccagagtatctgccaccgacatgagagcggccataggggacggaccgttctggggggctgactcaggtggggtggtccggttggaatggggtcccagaggtgggggcggcggaggcggaccccccgccgcgtgccccggcgccgcgaagcccccggcggacatggtgagcttcagcgcctcgctctggttcgccatccactgctgcctctgctgttcctcgcccagcttcagcgcgccctcggctgagtccgggggctccggagaggcctttctcttgcgcaggctggcggctgcgccccggcccgacggcgcggcgggcggcaaggccccggtccccgggggtgcgctgggggcgcggctcagactcaccagagcagtgggcagcatgggacagctggcgtccaggtagggctggggcagcatgtcggcgccgggcacgccctccttgaagaagcgcacggcttcggggagcaggtctccaagcaggcgccagtccccggagccgtgcttcttttcgtactccaggtacttgaaacccgaggataggccccggccgaagtccttcatgcagtcctgatacatctgcttggccacaccagatgcactggagtacacgttgcccgagcccgtggggtactcaatgaacagcttcaattcgtagtccatgccgggcttggagacggcgtcgaaggcgaaaacgcggcccagcagcgagtggtccttcttgaagcgaacctcgtagggcgtgcagcctgccagcgtgagcagcgtgtcgcggaccatcttgggcttgctggcccactcctcggcgcggttgcgcaggctctcgctcagctcggccagggcctcggcgttgcgctgcttctccttcaactcgcgctcctggtctgtgctcgacaccgagccgggcctcttaccaccagcacccacgcccacctctgccaccgacgaagaggtcgaagacgacgcggaggacgacgtggccgatacacccggggtacccccgagacaagcggggcccccaggagcccctgggggagcaggcgtcgggggcccacggctgcccagggcgtggggagggggtggggggagtaccgcagcgctggccgggccgttaagcagcgtctgcggtagcaggttggggggcacggtgagctgggggcctccgccaccccccgggttgggcagccccgtaaccagcccaccgtgcgttccacgccgagacgccaccgacgccgccgctgaagaagaattggggctctgacggttcagctctgggggtccctcctctggtgttggtttggggaagccgtttgggccccccaggccgttgggcagtcgcgcggtgtggctgctgcttcccaggctcaccggcggtggcgggtactcgaagcggctgcgctgttccaccgcagcggcggcggcggcggcggcggcggcggcagcgcttaggccgtagcgctccaggccagacggggccgccagcaccgcaggcttgctggaaccatcaacgtggttgagctgttgttgctgctgctgctgctgctgctgctgctgctgttgctgctgctgctgctgctgttgctgttgctgttgcgcggcggcggcggcggccgccgctgctgccgccgccgccgccgcttccttagccgacagggccactgtcttgaccccgacgggcggcggcggcccgggggagcggccgtcctggaagcagccgtgcgcccgcttcagctggcgcgctgtctcgatcacgaattcgatgcgatcagcgccctcgtagttgacgcaaccgcggcatacgggttccgagaagtcccagatcatggcccagggcatgcggggcaggtcgcacaggtagcaagattgtctccgggacgaggacacctgcgccgccgacatgatgcctgccctggggaaggtaggcccccgcccgggctgtctccgcggcgccttctcctccgggaggactggccggctggggagggagtccgactgcgggggagggaggagggggggcgagaaagttctgccccaggggctggagggaacgcgagtctccaccgccggcgcagcgcctcgccgtgggggctccaccgcccgggcagcggacgggttcagccctctcttcgcccccacctcctactgcggttgactcgtcgcgaggggagctcaggcgccttcttcctggtgctgcagacttgggctggaagctcccggcccgaggggagggggcgagggtgcccggtggtggccgccgttgcctcttggccccctccccggagtggctggtgcgtggaagctcgaaaggggctgtctcttcctctccccggggacccccctacgagctgcgtcctctccccgacgggccccctggggcgagggccagagggttcagtgccacccggtgcccgggtccaatcttgctgaagccgctgcttccccggaggaccgggggagggggtggcagccgagaaaggaccttctcccctccgcagcgtcggccgttctgctggcggcgactgggtttgcaccccggagggagccgccgcggccactgcttccaggacgcacgagagcagaggagaggagtgcacgcacgcaggctcccgccgcccccaggcctggccggcgcccgggccgccgcggctggcggcgctcacgttggctgcagggcgctcgcgcggcgcctcggcccgggtcgcatcccttcccgctcgtgctcacgctcgcccggaatgtggggttgtgattgttactctacgttccggaggcgcgtctcggcgctcctgctccggctgcggctcgcgctgtccccggcttggccgcgcgggatgccgcccgggcggagcgctgacgtcaccgccatgctctgcaccagttcttccccctcccctttacacttcctctgtggagcccacttgttgctcaggcaaggcgcatgcgcggcaggacgcccagattcctcccagccggcccctcctccgcgcctccgccctcccctcccccctcgccgtgtgtgtacaacagctgaggcccggcgagctaatgctggaagtccagagctgggggtggaaattaaacagacgatgacctttcctttccctgccgggcattcccaagtaaaaacgcatttaagaaccactagcgtcgtttccgatccctgctccccaccccacccccaagcctcggcagtgaatttaaatgtcctgtttcaggatttttcgccgtgaatttcgtataaggtattaaccatttcatctgcggttgaaccttatcccccccggcatggatgttaaattcatcgccaccactgatgccgaagcacctgcaaaattagctgttttccaatcttccagaaattgtcttttctatttgtttttgtgccctgatctaggaacccgggcttcaacgatagagctaaatgaattcagagtgcgctacccttccccccagccgcactttaaaaattttggctgaacgtctgaagaagatacgagcaccccgaggcctttaaggaaaacaggcaactggctgcgcacagctgcagttcagggcagggagggggaggggccggagaggccaaacaggtgagtgttttttctagagtttgatttttaaaaggtggaggcagcatttaataatactgatacatttttgtaaagcacagccgcagttttcaaagttctttctcaggcgctgtgatctcactccatgttgccccagaaggcggaacaaggccgtgatttttttttttttttttttttaagacggagtcttgctctgtcgcccaggctggagtgcaaaatggcgcgatctcggctcactgcaacctctgcctcgcaggttcaa

SEQ ID NO: 60951 - DNA, 2640 bp, Homo sapiens
ggattctatgtcatggtgttatgtttggtatgcacacacatatgtctccatctccctgtctgtctctgtcttcactgttactaaaggagatatatatacacacatacatgctggggtgccttcagacacactgagttagaaatcaacgtgtatttaaacagacttccattacagactcataatcctttcatttataaaacacagctgtctccaaaccgcccccccccccccaaccaaaaaaaagaatcaacatcatttgtggtatctcttgttgcctgagatggccgtttggggatgtgtgagagacggtgagaggctagaactccagtgttctggaggtgggttttctccctgaagaagagtcccgtggaacaaaactatgacaacggtggaaaggaactggaaaggatttgggaggggggtggtggaggtggaggagcctcaacgtaaactgccaggtgtagagactcaaagaactctgtccatggggtctgggagacaagcagagactagcagagccgggcgccaaacggcggcatcatcttcccaaagttccttcctactgtcgctttccccacccagcttgccatctgggctggcatcctcagagaaccctgctctaaactggagcaaaaggtcagctttccacctggccttgccggagcaccatagcccaaggttactagtggtgagaaggtcgccaggcgcgcacttcgaagctccctgcactctctctcctgcccccgccgttttgtggcagagacggggcgcgggtgtgtgtgtgtgttgcggagggggggctcttggcctggcagccctgcagtcagctggctcaaccttcaaggaggcccgggctgaacctcgcgtcaccctgctgcaacgcgcgccgccaagcgctccagcgagagaaaggccttttttggtaacagccccgcggtaagcgggacccacttctctggcctgcgagatccgccttggagaagatgaaaacaaacgtctgcgttgggccctcctctggcctttcgatggcccctgatcgccgcgcgccaggaaccccagaggcgcagtttgagccctgggcctgtagagacgagcaaaggggctggggagggtgggggaagggagacagcaagatgatttacagatttactcccaggcccattccgtggcggaagtatttgcctttccctaaaggagtaatcccggtatttgaaaaaaaaaaaaaaaaagtattaacttaggccagggcgtagggttacgcaagagccactcgagcatgaaatcccaggaacaacgtgattcgctgagaagccccgggggaggaaagcctgcaccgcctgccaggacctgcccagcctggggcgcgcgggcagccgggctctccgtgcaaaatcgggtggaaggaaaaggagagcgggcgtagtgtttagtgcaggcacagtggccacagcgagcgatggatctctgactgatttcttcctggaggggcggggaacagggaggggaagaaaggcggggggagtcgcgtctggttcctgcctcctccccgcttcctctctttgcccgcgtgccaggatgggggagcccagcgctgtcctcagcaaaagctggtgtggtttttttaggtccaaaaataaaggaaccctggaatgagccgcccaggtaccaggcctagaggtaaaaaaaaaaaagagggaagagccagacaaggatgctattcactgacctggttgggttaaaacaaatacccacaccccaaaaaggggggttggagaggaaggaagccttggacggcaagaataggcagaaagctggcagggcggccgaccaggccacaggtgcgcatacccccggaccctccaccccgccgggcgcgcgcctgggcctcagcagggagtaggagtgccagccagttcccactggcccacaccgacctggggatttccaccgtccggctacggagacccgttgccgccggcgctttcctgctggggccaccagaaggcggggcctcagagcgggaagcccctccctgcagcctcgccatccctcggtcaggtctggtacatggggcagctgtcactgctgtgcctggttgggatggatgggccaggatcttcaaatattttggcttgcgtgagctgagtagttcaacccgaaactcaggagagagggaggaagggagggcgcttagcatttgggtacatatttacattatgttgtttaacttggacttggctgaccctaaacagctgtgtaaacttgagcaaatctcttgaatttcggtttcttcatccgtaaaatgggaaaaagttacactgcttcctttgcctgcctcgttgatctgtgtggaagacaatgtaatgtgcttaataaaatgtaagaaattattaacaatacaatgaccaacatttgtctagggctcggaagagcattcccagacattatttcaccaatccctacatcaaccctgtgaagtaggtgttactttcatcaacctcctgtataggtgaggaaagccaagtccagaattactggaaaccaggttccctggctgtaaaacgcatttcttctttcaccccgcctgttgctatacctttttgagggtctcagatgctcctcagaaactgcaagaaatta

SEQ ID NO: 60952 - DNA, 6490 bp, Homo sapiens
tttgaaccaaaacctccactttggaattaatgccagacatagttttcctgaactctatccaaccgcctaagcggcagacaattttcattctatttgtgctggaaaataaagcccaagcccttgatctcagtgtagattttcattaaaaaaaaaaaaaaagtacagtgaatactatgccaatttccactttctgcccatagaagcccttgtgctctgggctgtgcgtgacggtcagaagttatctggtaaactttgcattgaaaagcatctccgaactccctccccatctgtggcctcacagctttcaccatgacatctgagagattcaaggaaagctccagaaacaggcttagctctcaataacaaccctcttccctacagatcttagaaaggctggatctgaacaacgctgcctgcaagacctccattcccaccctaaataaagcgccaaaccatccaaccgaaacccacccctcctcccctggtactcagggtgtctacagctctgaggctccctttatttttatttttattaatgtatttttaaggctgaaaggcacacacaccacacgcattcacacccagtggttatggggttttggcaggtacgcggagacccggtgccccagctgtcagtgtctgatcccaacccctcctcctcctccctccgttatttattaataaaagcctggtcgtgggcagccggcgttctggttttcattgtacagtctgcactggtgacacaggacatgtggaaaattttgagagcactgcggtgaatagtgtggagggggagcgtgagcagggggaggggaggggagggaggggagcgagttactttttagcttccgctaagtacttggcggctcgccaggcccggagaattgtgggaagcgaaaacctccccagtataaactgccagctttaagcagccctgacagttctgctccttccaaacttggcagccgttcaaagtgctctttcatttgaaatgctggaagcctgccatgtgcaatgcagatttgctgtgcctgtgcgcagaaggaactgataaatgccgttgcagttgccatggggacaggaggctatcagaatggccttgtgatccgcagcctctctgcgcggcaggctctcgttctccccctcccgcccctcctccctctagtcagtgagatggtgaaataaatgttctggaaaaaggttaaccctccccgctctggttccgagggtgagaggaggttaacctctaagcacttccttggccttaagtgccagcccggagcacaggtgtcagcgccgtccttgggtgggtcaccatcctcccgctctcctctttcacacccccagctttcttcctgctccctgggggctttcacaaagcggtatttttaatagaggcttttcagcaagctcaagtgtaagtctttgagtcatcaaaacccggatgtaaacacagcagccctgcattctgcacagtttgcgtgtattttatctttttaataatatttagctggcaacttaaaactgcaaggatgccagatattttagccagccacttacatcatgcagcatccatcttggggagagtggtggcgggtcctttccttgttctcttgctccctgccgcctacctgagaccgcaggaaatctgggtctttctgaaggcatcttcttgtggtgtagtccccttggaaccgcggcctttagaatgaacatgacatcaccttgggcaacaacgacagagggtgtgttcctgtaggagacaagacacggggagatccaaggtgaaacagatctatcatttacgctgcgccaatttcaggtgtgtgagggtgcacagtctggatcatcagccccccatttagcacgaactgccgtttgaaacacagtctgatttaatgtacagaaacaaaatagcacattcagatttggtatattttcaggcctgtaatgccaacactccgggtggcctgtttaatggggaaaaaatgaaatattccactccagcccaggcctatggaaaccaaagaggtttagtgatttatttacattgggggtaaaaacggtgagcagtattccttctcggctcgctacttcctgaaggtttcctgaacctaaacattcgttaacatcccaggaagggaacttatttttcctgtggctttcaatattttctgctaaatatatttcggcacactgtttatcttgggcttcagctttcagacctttatgcacttttaacaccttgaggctgtttcactgaaaaatggtgtatgttaattaaagaggactttatgtgctgggcattaaggcaggggggatttctgttttgatctgtctgtataatgaggggcttcaggatgaaacacaagtcagaggcctgttagcttcgtgaagcccttttgacaaagcgggaccttgaatgtgggcccttgtattcaaacacttgaagaccacagaatgttgaactgaacgaaacatttcttcctaagtgcatggtgaacatggaggccaggagacgagaaagactgaaaatgccccaagttcctggggcttagctgcaatttctttgaacttgactgtctctgggtgtctgctcgtgattgtcacggcagctctggccaaggcgatgcactctgtctcgctggaatttcctgattccaaagtagccccttccaaataaataatcaacaaacgccatctgcttcaccttgccagcaggcacagagctgaagggttagctaaaacctacaatttttaggagcagtaggctcttgagacatttcaagataggtttcgacttggaattaaactagagttagaggcagaaatcaggtgattcagaaagcaaccccccctccctcccgccaacttccccagacagtccaggcagctgggtttttggctctcacagctgctaagctttggcaagccaaaagcatatttcgtggtggtgattcctttcccaggttgacggacatgtttctgtactgagcacaaggcatgtttcctgaccgtgtgtgaatcagaggctgcatttttatccagggcttctggtgacagttttaagctggatgaacaaagcagaccctgacatgtccctgtcatcaaggtcaagagatacagaatctatcctaaatgttcgccacctctagcccagatgtattatatttatttatttttgttttgttttgttttttgaggcggtgtcttcctctgtcgcccaggctggagtgcagtggggcagtctcagctcactgcaacctccgcctcccgggttcaagcaattctcttgcctcagcctcccgagtagctgggattacaggcacgtgctatcatgcctggctactttttttgtatttttagtagagacagggttttgccatgttggccgggctggtctcgaactcctgacctcaggcgatctgccctcctcagcttcccaaagtttctgggattacaggcatgagccaccacacccggctattttttttttaatcatgccaagagcagccaccaccccacaagtcaatggatgcccatgttcatgtgtcagatgttacccttctctctctcagtgtttttgtagtgtttgcttctttgttggctttggtgagaagatttacaaaagccattttggacccttgagtgcctttccagatcgaggcaagctccaagattccaaacagccttgacctcgtctgtgtcgccccattatagcagggatgataaccggaggggagtccttggtgtagcccctccataccagggcccggagagccagcttcccagaaatccatggattaggaaactctgtcgtgggccagttcaggagcggcagggggaacaactcccttttgttttgttgtctagcatgtgaccagaatgctgccagctaattttaaccccaccaaagtactgctgggaaaaaaaaaaaaaaaactatcttgcatctggagagagaaatgctgtgggctggataaaagcttttcagcctgtgttccttcctgtttcagtttccaaacttgcattatcggtaacctgaaaaatgatgagtttcaccaaattcctggatgttgtgcaagaggacaatgagtctattttgggtggtgtgagtgtgtctggcatagacactgggaaccattgttttcaggagggagaatgttttggggtttcctggtgctttccttatagggtctcaaagccccaaggggtactgctggggggagaaaccctccatggcaaccatggaggctgtgctctgcaaaagacctggctgagaattgggtggttaggccagtgggtgggggtgaggggtgacgtggcagtggtggctccagaggtgttaaaaggtgctctgtagggagtgtttgaggtagaacgactggagcaggaagaagtggggagagagagatgctttcactgtggctgggcggccccctgggacacagggcacctcttctactaattctccatatctgcttttagcaccatgcgtgaatggaggattatatggagttccccaccctggatactggattctcaaagcatacctgtggtggttcattgttgctgtctggctggatggcagttgttgctagtggaaaagtccagaatcgcaagacccaggaaatgaaatggtttgggtgagacagcgtgtagctaggcaggtgccgctgactgttctagaactagatagtaaggtggactgccgttaacctgagtgtccacaacgcagtctcggaagataaggtcaacactgcagcacttgctgcaacctcaaccaggagagcttggtggcagttgttctgacagctgcagagggcctcagctgcctaaaaagccatttgctcagccctgccctgtctggccaacttctgtgtatttcaaggatcctcatgggtctctgtggcccccctcttttctgagtcctcaggcagacaccatcttcggaagggcagggaaccccatgttctgcttctaactggctgctataacctgccagcagtagtcaagatcagttggcaaatccctaaattaaggttctgtttattttgttgtttcaaaggcttgttttgagcaagatgttgtgctttaattaaaaagatgagagatcatgagtaagtgaaaatatttttgaatcttcacaaataggtttgaatttcatttcttgcgattcacagtagggggtcaagctgatcagcacttttatctgtgagaccatctagaaggtcttctgtaagttaacagctgactcttctgcacaatagaattgtaaagggaatcctctgtcaagcatttgttccttgctgcttctctgtttacagattttagccagccttcagctgtcattagggcatattcctcatttacctttctagccagaggattcctaaatgtttcataatagctccacagctggaatgcagctgcttggggtggagcaaacataactccctataggtcagcgggtgagggagggcagggaatcttggaaggttgggaaagtccttctaaagccagagctcaggaatgagtggggccactggtgtgaagactttccagatgggggaaggaagggttcattttctgccctctgggtagattccaaaaaatcgctttggggaggccaactattttgaaattgcctttaaagaagacaacacaaatgtttaaactgacctggaaaagcctttctttttcctttccctacaatcctagtctgttcccttgcacattaatcaacagaattgtgtgcccacgattctcccctccctcacctcttttattattattatctttggttcaggaaacttttggaagctttcccaggctggagctatagaatgattccaggaaaatgcataggagtttctgagttttctctggagggagctgaacatgtttttcagagagacgaagctaggggcaaccaggtcttgtgcaagaatgcagccacaaaagagggcagacagtgctaaaaagatctgtggacatccaaaagttctgaaagcaaggtgtggcttagtgagcctgcctgttccccaccccttcagtgttttattatggcagctgccatgatgtcagtccgtgagcccaagcaccccatctcagggagatatgctgagaacagctgggtgctggggtttggactctcaagttagcagcacttgtagtttctgccaaaagaacactccaagatatagatggaaaagtgcagggagtcaatacttacccagcaggcaggggccccacccagacatggaatgcaatggacaaaaaagtgtccttgggctattgctgccaagggtggtgccagccttcagcctgtgccagcgcagatgcttttgagcccagaaaacacacacagaactgcatgcacgcatatatcagaaacatctgtctatacacaaaaccagaaagctactggggaggtgtgcatagatgaggtacaagagcaagggggacctgcaggacccatcactgatag

SEQ ID NO: 60953 - DNA, 739 bp, Homo sapiens
tacctaagcatgaccagaagagcctcggggtcagctgagctttcagccaggggaaggggaaatgcttcccttgctttagctcaaatgcacagtgagagccaaagcaaattgagttacatgttggttccaccccacattcaagggattggtttcaccgaatccccgcctccacagggaattgggtcttatatttcttacccccaaccctccccgccatggcagagccacaaggaggttcctgaagaaaatcccttctcggcttttgtgcagaattgaagaatgtttactatgttttccttcctgtctctctggaaatgacgcaaagaataacaacaacaaaaaagaactccttgtcccgtgcaaaacacccgcccctcccccgcccctgacctcctaactcttcaccctgtgttggcctgacttcaccctgggatggggaaacttcctgggaggatatagctgacctgggaacaaaacttgtttttttgaaagctttgtgcaacgtcaactaagttgggggaggggtctgggcaaggaaagaagaaagcaaaggggggcagggtgggaacagttctgctaaaccaaacaattccccagggatgatggagctgtggtgacctgataagtcctttaaatgtcttattaattactgggggaaaaattggctacttctgagtctcccctctctcactgtccttgcacaagcttgggactagctctgtccttttttaagagtcag

SEQ ID NO: 60954 - DNA, 3155 bp, Homo sapiens
ccaccacgcccagctaattttgtatttttagtagagacggggtttcaccgtgttgcccaggctgatcttgaactcctgacctcaggtgatccgcccgcctcggcctcccaaagtgctgggattacaggcgtcagccactgtgcctggccaaagccatgggtttttagttgagtcctaatgggcaaaaacgccacacaactggaaaaaaataccacctgcgtcataaacttgtaaggaatcataaaaggatgcatataaagcggcccggctcctaattacttggtaattgttaactattgctttcactctgtccccaaaacaaaagccttacatggtgtaggcatattacttgttggtaaagctgactactaacaagtacacccatacccagtaatacattagaattacctgtgtctagaggactaacgtgattaaccacgacctagcagcacttacaaaggcctggatgaccagtataaaacaattccccactatctaaatcagcactgtccaatataactttctgcgatgctgggaatgggctatatataatctgcactgtccaataaagaggtcactgagctcctgaaatgtggctagtacaactgagaaacttatccagtcgttagtgaccatcttactggacagctcagctcttgaatctgcctcgacccgtcaactctttaaactcgcccatgtcctctttttcactagcgaaataattctttttctaagtaaccttcactgattcaaggcatcagaacgtcaactgatcccaagccctttttttctttagctgttacacacgtgtgttcaccgtgaaccttcaccaagaaacagcatccatataaaacccatagcacatgacaaagtcagtcaaacatcaaaggtcatgaaatcatctacttaaaataactcatcgcgcctcgacctcgtgaagcacggtctcgagggtggacgggaacaaaaaacaaacagggcgacaggcgtagagaaaatgcgaggagcacgcggggaggtctggcacccctgtcacggcgactccaggctgaggccgcccgcacgcccgctctcccacgccgggcactgtcgctcccggcacgcgcacaggccggacacgactcgccccggcccccacccccaacggcggcacggcggcacggcggcacgcaccaagacagtgcgagagtcgctcctctctctgtatcgactccaagccggccccacccccggctcctctgaaccccgcctggaaaccttgcccaagccgctcattgctcaaggcccccgtacaaaatggcggcgaggcctgaggaaccaaccatagagacgcccgccggccgcggacagagcgtaggcctctgagcgctggccccgccccgcgccggcctggtcttccggcgggggcggggaaagggcgcatttccaagggcccttctaggagaacagcgtgcggtctccatggtgccgggtcatccgagtcgggtcacgtggctggcgaaagccgtcgcggaggcgtggggaggagaaatgggcgggaggctgtggggatagcgagacacccagcgacgacgaggttgtcatggtgccgcggggccgtgctcgcgcatgcgccacctgacccacaggccggtcgtggagctgcgaccccggccctaggtgagaaagggagggctcggtccgggaggaggggagcagggatgacggcgggagagggattgggcgaggagcgtggggaaaggaggtggaagtaggggagagaggaagaggagcgagtaggcaagaggggcaaaccgggactttcggaggacggagagccaaatggtgggagcagggctttggtttgctgtgaggggcgtgggagagggaatcgcgggtgaggagggggctgcgtgtggggaggaggcttgtgtgaggggcaggtgggccctggtctagccctgggcgcaaccgccagccggctgggcggggagagagcttggagtccagcccggctgggagctgagggccaagcaatgggcaggtgagtgggcgccagaactagtaactgggcgagggtcctgggcttccggtttgaggtcgggggtggtaccctgttctggctccagggcacaggtgtgctgccttttccagagacctgccgtcaccctcgttgctggttgtttcccctgagtggccagcttgccaggcttggtgtcgggggtagtgtttctggggagaaggtgggcagtgccaagtaaggagttaagtggttagtgggtgggttcgggggagctctgatcccggcccaggtcacaggctggagctaggctccctgttattgctcaagtcctggcagtatgcattgcctgggcgtttgccctggaaggctggtggtatgccagtcacagcacagtactagggtctgcccagttttgccctgctgagctggcaggctggtggatgcctggagggtgcacatgctgcctggcacagatgcaacgtgggctggtgcgaatgggtaggtgggcactgttactgtgaactaattgcagcaggggatcggagaaagttctctaagctcatctcccctttgaaaggtgaaaatagagccaaactggtctaaaacataggaaattgtatggaattggggttcaggatctttgacacgaattttcagccaagttggagaaatggaatgaatgtggaagggaagatgaatattagacatttaggtagacagggtttttccactgttaagatacccagacattctcccagaatggtatccctgaatatgcaggccaaaagaaaatgacttcggagaaaagctagtaatgtatttataattctaacggggattactcaaggttttctttctgtgaccttatcactttattgtatttaagcctctggttgggcttttacctcacacttctgtccaggcacacatgttatacacgtgacacattttaaagggaacttgagcttccaggaatgttgccaagtgtctataaaaggagagatctgaaagcagcatttcagatccttttcttgtaaccctggatctcctttttaatcataaggacaaatcttcacaaagattgtttgtggattagatcaacccttaatttggatggtggatttgtccctgacgtttcaacttagaataaggg

SEQ ID NO: 60955 - DNA, 3305 bp, Homo sapiens
tacacagtatgtactcaagaaatggtagatggaagtggatgtggcataagcacaacaaccaaagccagagtgggctgagagtcactgatcaggtttgattagcacaatggagcttaatgagcctggctgtgcaaagttaacttccagaaaagcctacgaggggccaactcttctggtttgaatagaatgaatgacttattctactttctcagaagtagaaggatgatctggaaaagactattctgcaagtagaccggaccctccaagtcagctttagaactgaccaggacctggaaggatcctcttggctggtatggaccattcaagccaacctttacatatgctattcccatcattaggtcaggactggatgcaaccactgacgaaagggagatagtttccaggcagcatctaccctggtgccctcccttctaggacagagtatgtgaaggacagccctgtcccgggatttcctaaccagcactggttacaagaggtgggtggggaaagtattaggaccccccatgatatcccaaaacccctacccaattgtactccattgtaaacatgataataataatacgcttgaaaaagacaactgacattttctcggtcttgaatatggcaaaaataaaatcacctgtagaaaactttttaaaatctatttttatgatctaaaatggacaatctaagttaaaaaaacaaacaaaaagtatgcttgccttaaaatcagcttcaagacaagtctctgggcacccgccctggccctggccattacagaaattttggagttgccacagcttccaaccctcccctcccggggatggagtttctgacctgtcggcgcaagagttgtacttgaccatgctcagcatggcagccatgatgaagaacatcaggatggggtcaaggaggatgtactgggacagagtgaggcatcccgtgtctgaaaaacatgagctcgctggtgaaaaagcgaggtaagagaagggccccctgaaaaccaagcaccccagtagtaggaaacagtccctcttgccacttaattgagtgtaagcacttgtgcagtcaggactagagtcaacactgagtcatcagggaggtagaaggccacagctctgggagacatcaaagcccaatgacaagaagcagtaactcacactgcctctaggccctcaacccaagagaggatcatgtcattcgctccctcagaccagccctgagacaaggtgtcatcctcatttccaccatcaaaaagggagtcctaccactctgctcatgtaaccgcaaactatctacacctatgatagaatcttatcattttacatgaagtctctcttgggggtcgattctccagacagatggcagagtgatgttttttaatttaaatccttaaatctcattatgtcatgcccctgcttaaaccctccaatgtcttccaacctcactcaaagtaaaaagttctcatgacaactgccagagtctgtgcggtctccctacccatctaacctcatctcccaacaccctctgcctcactcactctgccctttccacgccagccttcttactgtgatttgaacccacagaggtccacaccagaactacagtacatgcacttccctctgcctgaatgctcttccctcagatccctgcagggcctgatcctttgtctcactcaggtctctgctcaaagctcccctctcagaagctctttcctgactatcctgtctaaaatagtactgatctccattattccatcccttacactgctttattttctacactgcacttgtggcttaggacatcacatgacagacttattcatttacttgtttatttactgtctgccccacgatgaggtaagctcaatgagaccagagtgactcatcagtgtatcctctcagactaagaaaagtggccgggagctgggtaggtgcttgagaaataactattgaatgaaaagtacataaatgactaaatgaatgaataactgaagatggaaattcaagatacaaggaaaaagccaccagtcctctatagagaaagccaataatcttgcaatctatctgtcaaaacaaagcaacatatctgtcaaagcaaacccctaaagtaccccatttaaattggtctagacttctttaaatgttaagctccacaaggtcatgaattcactttcataggaacaaagctagcaacaggatcaacttctacgatgaactctcatttatccatgtgaagattattatccaagttcccattttgctatctcttgccacccagctacttctgcatttacctttatattcagttgaaattagttaaggaatgcaaactaatcttaacttaagagaagcaaaattagaattataagcttccttcaaaaacacacatactcacatacaaatctatcttattacccattccaaactcaaccgtgaataacgtggaggtaaatctattccttgggattacccacgccgattctcccctccaataatataaaggcttgttatatataactattgatatacattaagtattactagtgaatgagatttgtagtacattttacccaatcctaaaattaattgaactggacccacatatagggcccttgaatgtactgattttcagctacattcacggagtggcagcccatttcccaaaagccatggtatggctaagacaacttaccaaaggtgaggagggcagctgtgagcagtgctgccgagagggacttggacagatccagtacagtgaggtaggcaaaggggaccagccaggagccaaggaatgcacagaactgtgggaggaatagagaagctgtcaaataacaagctgagctaggtcagcgacctactggactcagtacaacctaacatttaagacaggggacctgatgaaggcatgactttggtgacctaaagtcacctaggatatctataactaagaaaagagtattgtaatagtgaagagccaaatcaagcaatatatatgttcccattaagcagcaacttgtgcactgacatgaaatcagcaagttcagccaggaaggtgtgggtaggagacagggagaaaagcaaccaagtagctacacaccaggaatagagagaagggaagaaaatgagtgttattaacacacagatagtaattgatagccattagcttctattacacaactgtaggtacaagttgagaaagacccctctgaaggtatttcagagaattttaaggaacccctagttcttttcttcatttacaccagaaaccagtctttaatctacacaatgtatgtattttgattt

SEQ ID NO: 60956 - DNA, 726 bp, Homo sapiens
tctcccattcctaatattccaaaggagggcatccttggtacctcccaagccagaacaaatcaattagaaactgagactgtgagtcatgaatccttcaaaacctttgacaagatcggccgtgtcttttgtatatttccttggccatcaacattataaaattctatttttcacacaagcaatcagaagcagctgaagtataaaaactgctggcaaatgccaaccatctgggacagccccaggctgctccagcctgacccccgagctctggcaggctgtgttgggggagggaatacactggctgtgtggggaaagtccctcccagccacacttgtgggacatggatttagactactaaccaacccacttttttctctaagtagttctaaacagagccagtctctatagctccaggtcaaggtatagaagccaaagtctggcagtaaaagacaacaaagacttgtttttaaaaaggaaggcagggaccccagggttcagacagggtcatccaaatagctagatgaactaaagctgccaagtggcaatcaaatggatccctcttcccacctgggatctcgcaggacaagctcgcctggtattggtcatacatttccagactgcttggctggtctagagagaagaaatgtacagatgctttggatctcagtaccctatattctagttctctgatcacggacaatatttagtatctctgagctataggtaata

SEQ ID NO: 60957 - DNA, 1418 bp, Homo sapiens
tgatgcactgtagcataacctggaagacatgagggctgcttcctcagatactaagaatcccactgccccaccaccagagcaaaacgatccccctcccagagaatgcacctcgccagaggccaacccacccgatacctcaagttcccctccaccgtggccctcctcctatagatcccgccccctccgtaccctcgggccaatcagagggcggcgtcccgtcgcggttgccatggtgcccgccgagtccctcccatcactcaccagatgtgcggcggctcgtccaagcggtggaagcgggtggcgaaggacagcagcgtcaccaaggccagcagggcccaccagccgaccgcctcgaagcgccgtgagccccaagcaggccgtttggggcttcgcgccacagcctcagcggccacgtcccggcctgcggccctagcagcctgggggccacagcggcccctccggggacgcagctcggactctgccaggcctccgcccgtggccggcggcatcttccccctcctctgggtcgccctccggcccggaggcacactttgtctgaccagccgccccgccaaggagtcacaagagggcagctcggggtaccccgggaaatgcaacgcccttcactgcagcggagcgcggggccccgggctcggggcggggcgggcagcgtggtcgcggcccgggccgctaggaggcggcaggaggcgcagagcatgtcgggaccgggagggccggccggcccggggcgggggggactgggcaggaggggtcgggctcagggaactgcaactcccagcagcccccaggtacggggcgtggcgggagagctgggcgagccagaggcgaccggaaggatctttctagtccagcccctcgctttacccggacgaaagacacgggcctgattcgtcgagtctcactgagccttagtcgtcggcaggtcccaggcgcgaagtttctcggcctggaggagggggtcgcgcgaagtgccagatgcaggcggggaaggtctgtgacgcgcacccgggtggagggaagctggttagacacctggagaccctggggggcggggtcagaagtgagctgcaccgcccgcccaggccgacaacgactcccggcatgcagtgctttgcgccgggcacgctctgcgcctgcgtgctgcgcgctgcccgctggggctcgaagttccgggagggttgggccagaggaggcggtcctggtagggagtgcgtagcagggtggagtcgctgtccggtcgcgcttcacttctgctccgccctccctgctccccataacagacccctccctccactaaggcttccaaacgtcgccccaagcctcccaatttctcgcagcccttcatgctcttctcttggccctagcaggaggtgaccttccagtaatgtttgtatttt

SEQ ID NO: 60958 - DNA, 1715 bp, Homo sapiens
agacaagttctctcccctctaccctttcgtatttcaaaagagcatcctttcagttgcatcgtgtgtggtgttcaggaggctgaaagaagaaagtgtgatggatggactcttttgtctttggacactgaaataatacacacggaggaactcgcgttagtagaaatggagacgtcgtcctggacaagaagaggatgagggtcttgagaatgagggaggtaggccaaatttttaattcctgctcttgctttggctactgtgttcaagcaaaagaccccagacactacctatttcaactctgcttttcatttttcccactctaagcgatggagaggatggcagcaaggccagggggcctatgtgcaggaaggctagggcgcagtgggcttctggcagaggaaggcaaggctgccaacccgggtgggggccgagaggcgcgtggtaaggctggggcaggggactgagatggggatagggtggggagccagaagcagggggcggcgaggccagtagggttcgggtcggcagtctagatgtgattagcagacggaggtgggacccgaaccccggctgaagctgaaactgaagctgaagaggcgccaggggcagagccaccctgtcactaccatttgggcagatctcagaaaggaagcggggcaggaatcaaggcatttcgaaacaggagtgagtagaaaataacctcgagcccagggcccgggtggtggcagcggcggggaaggggccccgcgcgcgaaggggctgccgaggtgggtccgctccgcggggaagcccaggacagagcgcggcggaggctcgcgccgtggtgcggggccctgaggccgggcggcacccacccgccagcgccccggccttgcgtacctgaggcggccgcctggctcccctccactccctggcagtccccgacgccgccagccgaccctgggcgggctgtggggctccaggagcccggcccctcagccgcctgcaggtcagacatctgcagcccgcgcacggagctctccgctgccagccgcgagtggctccggaaacagccgaaggccgagcgagcgccgagcacagccgagcgcagcctgcaggccggaagaagcggcgcggcggccgcttgaaaagctagctgacccaggggcggccacaggagctctggcccgctgaggctggcgatgaggccgcagggagggttactgcgtgcttgtgacagacgatttttaaagtcagggcttgaaagaacaaacaaaacctggggaagagtcaggaagacactgccggaaatcgtggtatccatagagacgctatcggaagttggggttgctaggaagccgcggcgcgtctgctaagctgcaaatggctgaagtcccggaggattatgattccggcccagatgaagatggagagctggagcctgagaggcctgaactgcctggacttcataaattgtatgaaaatgccgaaccagacaccatggcaaaggcagactcgaagctaccagcagagatttaccaagagccacagccagagaccgaggaagaggacttcaaagagggggagccagacagtgctaagaacgtgcagctgaaacctggcgggacgtcccaggaaggaattgccaaggagtccaagagagacgtaccaagcgaaactgaaccagggatacaccaagaggtaaagtcggaaacatccagagagatgggagagttttt

SEQ ID NO: 60959 - DNA, 2467 bp, Homo sapiens
cagtagacaactgccatcaatttgtatttataacgccaaatgagaagctaggtttacttggcaagtatagataatgatctagtggctctagagttataaagtaatcaggtacgattgtcactcttaagagtgacaggtgcttcaacatgatttaaaatacttcagaggtttgtctttatcgtctcttgtttactgacagcccacaaggcagggtgagagacctcaggggagaacaggaactttacaaaggaaaacagaagaatcagcaagaaaaccacaacatgctccctgcctcagaaaactccaaaaaccacctactgagaagtcagacttggtttcaattatcttccgagccaggaagatacaggtgaggcttgtgaactgagaccagggaacaagagttaagctaggatgactctacgggtgaacgtccaggaagccatggatctaccgcagtcgtcagagcccagcggatccctggcagagttaaatgctcgttctgaaccaaatgtccgcttccgaaccaatcgctggtgctcactcgcagccccagtcccaagcgtactccagcgcccaagggtcgccctgactgaaagaagagaatcaggcctgtagtcatagggtgtagggatgcctcctagaagaggggaaaagatcaagatgcggagaggctggatccagccagatacgcgacccaaggggcttgggacaccctcacctcttccgcacagagccctccctctcaggacagcgccagcctccgccgccgctggaccagcccttctattcaggctgtgcagcttagagaagggggcggaagggaataatcgtagggcggagagaaaacacgaataacgagaccgcagggcatgctggaagtcgtagtttcttctgcctctgctgtcaggcgctgtcccgacgaaccacaaggcttcttgactacagcccccagaaaccccaagcaccgtgctaggtcatttcctctcctttccgcgagaccttccgcggttatccagcgagtcacgtagcaagactacaattcccatgaggctcagcaagggcgatttagggtccagggaagcaatgagacgtgttctttgttttcctatgggtgaggaatggttgtatgagcagttgggtttcgggacgctttttggggagaacccgatggagtctgaaggatctctaaatcaggcggaacccacggtgcggcgagttgggacggaagtaaccggtgggagtggggaggagccggaagttaaggaggggagggggtggagggaaaagcaagccaggaggtgcttgcggccgcttctagtagtttccaggcgctgccgggcggctggcactaagcggtcctgaggctgtggctacggctgctccggagctggtggcgccgcgataggagagccgatggccaagtggggtgagggagacccacgctggatcgtggaggagcgggcggacgccaccaacgtcaacaactggcactggtgagggccagaaaagcaggccggccttgggagacctgcggccgggccagggtttcagggttcctagaacctcggcccggacagagctggggctgaggtagccctgtccggagatgggggtgggtccttcctgtggcaggggtccgtagccccaggcctctccactccgcggtcaccttctcagtgtttgaggggagggagatggacgtggagggctgcgccccagaggagggttgtcagagagactaggagataacgccctggctgctgcatccagcccgagcagggaggtgcttattacacgtggccagaggagtcactgagactggaacctcctttgattgtgttgggagatagctgtgaaaggcctaaggccaggggtctgtaattcctattttgcggcctgcggtaaaattaaaagtcattcataggggaccgctgcagcggtcccgcgggagattgagaacgtgttgtgcaggtgctcagagctcagatagctgcggcctctcacccggaactatcaggtcgggtgtgttggaactccaggttgccgagcagccgtggttttataacctgaccgttcttaaaataactgccctccttcatgaaatcttcccaaagtaatattagtttccttatttttgaattccactgaacttttttcgtaatgtttgtattgtaccgttactttgttgcagccttttttgctgttgttttctctaatagttgataagtaggaaggcagatagtgatgtttcttttccatatctcactttgtattctctcttcttaacatgcagagtacttgacctaatttttgttgtttgttttgaagccctggacttaacgtttttgtggccatctaggggacagtgaatgtgtaggaagtttataatgcaagtgcgaatctgataggtcagaacaccgtgccaatgaggtcagggttattggtttaatcctttctgggcctttta

SEQ ID NO: 60960 - DNA, 1697 bp, Homo sapiens
ctgcctgaacttggttgatgattcagcatggttaattagtatagagtcatcgcaagtcaccaccaggctaaacaatccccttgtgtgatagcactcgtgttcaggaaagggtcgaaggggccacctaatccaacctggagcctggggtagagtctcaccaccggcagagttaagagaatgatgctttcgagggaccagcttggattccctgccagatctatggaccaatgtcctggttggggactgaacgtggtagtccagaatgtggttgggagaggctgggtgtgtttccatctgacaccaccgcctaattttctttgcttcttaaggaccccatgggtggttttctttggacgactgcaggactttaaaaggaagcaataacctcaggggtttgagaagggaccctccggagcccttgggcggctcccactggagtccgaagggcccctcatcgcttcccctggggacagcacacacttctggcagaatggggcagagaaaagtacccggagctctgagcagaacccagagctccgggagtaagacctccaggcgcggagaggtggggagcccccgagccgtccttgagcctccaggctcgtggaggtcgggccagcggccggacactgccgcccacacctgcgaacggcgcccgccccgcggattgcccagcggatggcccggagacctcgccccgcccggccgcccctccgccagtccacaccgccaccccggccccgccgcgcgggcccctcgtacctggccggcggcggctgcggctgcggctgcagcgctgctcctcacgtacccgttccgtacttccccgttcgccacgcagccattcgcccgcaccgtgcggcggcagcagcagcctccgggctccggccgcatcttcctggcagcaccaggcgcaaggcaggctctgtaggcggtggcagcggcggcggctgctccaagtcccgctccgcaccccacccacctccccgaaaccggaaatggctgcagcgccgccgccaattcccgggcgggccttcacagagggcggggccctctccgcagaggaccggtctcggccaaggccacgcagcgaagggaaaaagcggcggggacctgccgagagggatgtggtcctgaggaccgctgaccaatctggaagagaaggaggcggaccccatgctgctgcctggccaatcacggacgagagcaaagcgcctcgccggtggagagggggcttctctagagggactccagggcctggcacctgattggaggccgcatccaggtccggggtagggcttgcctgtttaatggtccagaccgaggaggaggcggagcccagggaaaagtagccaattagagtgtgaggaaataaaaggggctgagccgaagtctctagagcgggttcccaggttctccaggacaggtggcgccctctttgcccttgcctcgtgggaagttttggagtttatgtcctagcccaagacaggcagctcgcttatttaattagctgattcctctgtgagtgtttatagaatagattttttgacaatctctcatcattcttcaatatgcgccacacattcactatttctgaattattataagtaataattcagatgccttttcacgtgcccttcacatttgcccttggcagggttttctatacagtctcctttaaattaagtctttccttc

SEQ ID NO: 60961 - DNA, 1220 bp, Homo sapiens
caaaggatttattgagacccacactgttcagtggcactcatcttgatgtttgacgaagagtttacagaatagatgctatctgtcctcacagagtttacattctaagaaagacatcatgacacatacatacatcaagaccagcagataaaaagaaatgaacacacactgatttatttaggacaggtgtgcagaagagacatagcagacttgactgatggtctgcttacaaagatggtccttggcaaggttcacacaattctctggaagtgttaagagtggcttactgcacctaaactgtgcaaacaatatggtttatggtcaacacctgctttgcttctgggagtctgtgattttggcatgtgtcaggcagaggctgcctacatgacaagctcctagtaaaaacctaggcactgagtttctttggtaaacatttcacagattttgtcacaacccattgccatatccggtgtgacttccttgggagaggacttttggaggcatgcacctggtttttcctggactttgctccaggtgccttttccctttgctgatcttgctttgtatgctttcactgtgataaatctgtaagtgcaaccatctgctgagtcctgagtcttcctggcgaatcatcaaatttgggtgtggttttggggactccctgacacaacaggagacagataactaataatttagggaaaaatataaggcttggccactgacagcaactagctgatttgaacaattacaatatggataacaaccacacattatttttgtgcataaaaactgaaatatgaaaaaaatgtaatgtagttattaacacaacttgaggtctaccaatgtttattcagctaaaggtacaaataaaagaactccttgatgttctcctctagagaacatgttctattttagtagcctgagacagaaaaataagtatgactcatgtggactttgtggttaatggaaatataaacgtagttccagagttacataagcaccttatagaggtgatccattctatttctctttccaaggtattactttgtagccaattccttattttaaggtaatctctaggatacaagaaaatgctgttgaagaaaaggatgatgatgatgatcttatgaatattgaagctatgcgtttttgaggagggggaaaagagagatggtagaagtggtagtaaaagatgaaagaagttggtcatctaagactggaat

SEQ ID NO: 60962 - DNA, 2026 bp, Homo sapiens
acttgagaacaggttatgagactggctaattttttgtatttttggcggaaacgggggtcttgccatgccccaggctggtctcgaacccctgggttcaagcgatccacccgcctcggcctccgaagtgcgggattacaggcttgagccaccgctcccggactgtgttccccttcttaatctccatggggaaaagctgagagagagaacggtgcctgtattccatatatacttgtttgccatttattttcaacacggagggattctcagaatccttcaatgacctccttctaaaagagccagaggagaagacagggactagttttacgcacagtggcttaacaaacagcgccgcatccctgtcagttctgggattcctcgggagtggttttttttaagctgcagaagtctaccctaccgtctacaaagacgttctatggggttttacaaaaacccaaacagaaatgtgaggagacagttacagtaagaaataaacacggattcccaggctcttttgactgagcgcccccgccaggaatggccgcctaaagaaacaggcatctcaacgctttattgctaagtgtgacggttagtggggagttcgactctgcagccaaaggaggtcaggaatcgttcaataacaatcggtctggaggtgaaaagaggcgaagaagacacgtaagtccctccaagacgcggggcaaagcgatggagagacgcgcgccactcctctctctgtaccttttgggcaccaggacccttgccacgggctgcgtgggccgccgagaagtcgatgaccccttccaggtctgcggtcccgggccggctctgacggtagaagcggaaaagtttccgaaaggcgtcctccccgggctcagtcgccagagtcgccacagagcccacggccgctgccatcttccccatctcgcggcctataccctctgatccggaagcagattctctcgtgttccggatccggaaattttttccggggccgcgacctcggctcgagaaggtgctttagtctgaagatggcggcctcagcagcgagaggtgctgcggcgctgcgtagaagtatcaatcagccggttgcttttgtgagaagaattccttggactgcggcgtcgagtgagtgatggagatgtgggagtagtggaatttttaggtccaagtgatcctcaaagcttctgctttttgcagggtacttaagtcagcgtggtggctgaattaggagactgctcctgagcatgcaagtgagcagaaagaaattttgtttgcagttaaccgtttagggatgtcccttgagcttttggggtcacgaatgcaccggctcttgcctttaggagtgatttggtgtaaagatttattacttggtaaccaagatttacaatttagaagggataattttgactgtagtgtggaggatggattcaaggtggcaagattgtaggcgtgcagaggagctaaaaggcaatttcattaatttacttaaaacgtgaggacctgaattagggcgatggtagaaggatggtggtcagatgcattaatgttttaaaagcaaattagatgccgtttcgtgatggcttaagtgggagaagtgtacggaataaaggaaagggagaaatgatttctgggtttttagcattggtgaattgtttgtttagaagttaggagcaggccaagagaagatgagtaaagtttgaatgtgttgactttgagaaacttgtgaggtttccgtcaggcaattggacaaaggttgtatatcattgtggctgagaagtggactccgaagctagaccgttggggttagaattccaacttggccatttaatcgttgttatcacttgaataactgaagttagtatgggaaaagggctcacaactgggcctcagtttactcatcgataaaatggagtcaataatacccaactcataggattgttgagaggattgagtttatatgcaaacttcttagacttgtgttagatacagtgtaagtactcagcaaatgatagttattttcacggta

SEQ ID NO: 60963 - DNA, 2083 bp, Homo sapiens
attcccaaaataattttttgattaaaacttttggagtcatactgtcatcagccagaaaaaaaaacatgcgtgaggagaatgaagggtgttaaaagagctcaagctgatgtcctgaaaggattactttatctataaccttcctgaacactagccttttcctgttgagttcgcatggaaagtttttccacttaaaatggggcagcaaggctgggaactagtaggagtagcgtaacttctcggactctcccactgaaaagcatctttttcttaaaggcggagagcactttacagacggttactaaggtaaccggaaacagcaaaactgaggtggttctatctacggaagaaattctaagctccaaagttaaaatgcggagcagtggcgcatatcagcagacggcggtcactactgtggctcatttaaatctgtgttcagctccgggcctcttttttcaggaatccttgtttcgggacacccagtggacagcgaaaggagagagaccaccacaggcaaacggccggaaagccgcgcagtcgcagcccgcgcgcttcactccgcccaaataagccactaccgtcaccaaccccatctcgttcgcccgagccgcggacctgagggagcgctgtccgctccccgcaagatgctcacgcgaaaaacccactcttcagtgtctgagaccactccgcagctttcggcctcggtgagcgggtgaactaaacccgggaaaccgctgaaagaccccagcttcgactaggcctagtcgtagcggcggccagcgggagggcgtagccgtagtcttggcccacgtcattctgtgccccgggtcaggtcaccgcccggagggtatgggaagagaaatgaagaagactggtactcccagacccttccgtatcgaggaccccaatcaacaacccacctggtgagcgccatcttcttccgcttcttccagcgcgagcgacagcaccgctgggcgggtctttccagatgatgaggagcggaaaggaaggagtgcgcgatgcgcaggcgctctggccgaaaaggccttctgggatttgtagttctttgaacaggagtaccgtttgtattctgaccagaccaagcggttatcaaggaataatctcttcagctagcaacaaatgcataactcgatcgcttatatgcgacatgatagggcgttccctaggcaaaatatcaaagatacagggagatgccttttaggccgctttattacgttccttactcagtcccgttccccgagaaggggtacaaaatacaaaagcttcccggggacagctactttaagtaagagtgatagggcgtttaaaacgacaggtaataatgagactagctaatggagagtccttggactctctgaaaacattcacactcaaaacttttctttaaaccatatcctctcacccgccaaaacactctcttggggagatatttcgtaatccttggtaatttaccgagtgtctgggttctctgcccagggtatgacaaggctgaaatctcataggaggctctggagaaaaatccatctcctaactcattcttgttggcaaaaatcagttcctggcggttgtgggatcgagttccctgttttgttttgtgctgttagtggtggccaccctcagctcctaggggtcactctcgagtccttcccacatgagccctatttattggtagttcacaacatggatatttgctttctgaggcacatctttctgactcctcttctgccactgttggagaaaaatgccctgcttttaaagggctcatgtgattagatcaggagcacctggataatctccctattttaagatcaactcttggccgggcgcagtagctcacacttgtaatcctagcactttgggaggtcggggcgggcggattgcctgagctcaggagttcgacaaagcctgggcaacatggtgaaaccctgtctctactaaaaatacaaaaattagctgggcgttgtggcgcgctcctgtagtcctagctactggggaggctgaggcaggagaatcgtgtgaatcaggagacggaggttgcagtgagccaagatcacgccactgcact

SEQ ID NO: 60964 - DNA, 1222 bp, Homo sapiens
atttaaccctgagtttgacacagcacatgtttcagagagcacggggttaggggtaaggtcacagaatctcaaggcagaagaatttttcttagtacataacaaaatggagtctcccatgtctatttctttctacacagacacagtaacaatctgatctctcttgcttttccccacatcaggcaaagagtttggattttcttctcagtgtcatgacactcctctgaacagcaacattcagcttccaaagcacttgcaccattgcacttgatcctcacaagccctttgaggtagataggactgacaatagtattaactccattttatcaagacagaaactaaagctctgccaaaattagaaaacctgctgtgagtcacccagttcaaataagattctttgactctaaatcggggtttttaacctcagctgtgcattgaaatcctacagggagctctacaaaatacctatgactcagtcccattcccagtagttgaaggggtgctagtgccagctatggcccaggaagacttttaaagctctccaggtgatttttttttttagactgggtttttctctgtcacccaggctggaatgcggtggtggtgcaatcatgcctcactgtacccttgaccttctgggctcaagttatcttcccacgtgagcctcctgagtagttgggattttaggcatgagccactgtgcctggcccttattattattttatttttaatttattattattttttgagatggagtcttgctctgtcacccaggctggagtgcagtgacatgatctcggctcactgcaacctctgcctcctaggttcaagcgagtatcctgccttagcctctagagcagctgggactacaggcgtgtgacaccacgcccagctaagttttgtatttttagtagagacggggtttcaccatgttggccaggctgggctggaattcctgacctcaagtgatctgcctgccttggcctccctaagtgctgggattacaggtgtgagccactgcacctggcctaatgctcccttttttctgttcctaagccactttgttcatacctcaatcttaacacttctcacattatttggaagttatcaatcttcttatcttaatgcctatacattgcaaactttagatggtgggggctgtgttatttaactctatactactgctacctctgtgctgcaattatctttttttttcttttttagt

SEQ ID NO: 60965 - DNA, 1435 bp, Homo sapiens
actctgtctcaaaatgaatgaatgaatgaatgaatgaatgaataaaatctacgaggtcgggcgcagtggctcactcttgtaatcccagcactttgggcgggcggatcatttgaggtcaggagtttgagaccggcttggccaacatggtgaaaccccatctctaaaaaaaatacaaaaattagctgtactgcttgggcgacagagcgagactcagtctcaaaaaaaaaaaatctacaaatccacttcatctttcattaaacacgaacctgggacgtagttagaatgtcttgaagaaaatatttcagtaatattccaagtccgtcgccctggcaaagcaacaaggccacctgacggagtaagcccgagacccctgtgcctccacagtactgcccgcgggatcgcggcgtggggaaccaggaactacaagtcccggcaggccgcgcgcgcctcggcttcactaagcgcagtcaggtggctgtccccgcacggttcccagctaattccccgctaccgggttgcggccggaagccgggcgccgcggctctgcttccctcggggtgagtaggggcagctcgccggaggccggcgcagagctcgggccgaccagcctggcagggccgcaccgcgcctggagcgcgagggaaccggcatggacacgccgggagtcggcctctgctccggttgtgcagccgccctgggcgccgggagggacagccccatgaccttgtcacctgggcccggcgcgcggccacgtggctcgggtgactcgcattgccccgcccccctgcagtgacttctccagtttggcacaccagtgggctttcatgtgacctgtccacttcagtggcacagtcttgcaggcacccgagtgggcagagctggaggagggccggaggtggctcacccagacgccttcaccccctggtggccctgtgagttccgaggcagaagcagctggagctggagcgtggtctgggcaagagcagggggcgatgcccatatcctggccctccacccggtcttgcgaacgtgccccagaccgctgcttatctccagcatcttgcagggccctgggcttccagatcacacagtagatatgtgctaacagcagccagtgtgtgtggagagcaacctttagataagacacctagaacagccctctcccagggttaagtggcatttactttctactaacaagaaagtcattcaacaagtatttattgtttacctccatgatacttggcacttagtaggtgctcaagaaatatttgcagagttgaagtgaattagactttatctgtggcttcatatgttttatttaataattttcttggggctggatgtggtggctgatgcctgtaatcccagcactttgggaggccaagatgggaggattgcttgagggcaggagttcaacaccaggctgggcaacata

SEQ ID NO: 60966 - DNA, 616 bp, Homo sapiens
aggagaaacgctccaacctggcaggcggaggttgcagtgagccgagatcgcggcactgcactcccgcctgggcgacagagcaagaccctgtttcagagacaaataaaatgaagataagcttgtttgtaataatagtttccatacaaaggggaaacaggcacagagcagggaggtgacaggcacagactcattccagagcagagggatgagggtacaaggcgtgcaaggctggtgcctgcaagtggcttggtggcgtgctgctgctctcgtgtggcacttctctcctggcagctgcagctgtggtcatggactttagtctgacataaattgctcaggaattgaaggggaagcactctgttgggtgcactggccgcaaagagtgactgtgcagccacctggtggactgagcaggtacaagtagggtggggaaaggtcacattgaccaggagtatgaatttgaacagatcaaatcagcaggtaggcattaagcctctaactgtaaaaaactccacaggactgtgagtgggcagagtagtgacagtcatagtgtctgccctcaaggagcctccattcaagacaaggggtagtcttcttttttttttttttgagacggagt

SEQ ID NO: 60967 - DNA, 692 bp, Homo sapiens
aaaaaaaaaaaaaaaaaaaaaaaaggctgagatcaagtttctgctgcaaggacattttcattagttaaaataagaaggggctaataccaataaaatgcatagcaagttgactattcaaaccaaaaggcctccagttgaagttgtgttttaatttaagcactagtagggcccagcaaatcaaatattgaaagatgctaaaattagtctgattactttgtgagtcatcaaattgatttgactgtccttgcccttcatataatgtcccaatagacacttaacctgactctacttccttgaatttggcaaagtaagcacgatcattggagttactgcttttgggattatttatttatcacatcacctctgccatcattacttcccactcgtctttgtttggcttactttctactgtgcttctctctatcaaatctttgcacctccttaggaagatctggaagtcacctctctgtaaatctgagaagttattttcattgttgttggatgataatgcttaagccagtgttggaggctgcacaagtaaattacatggttttagaagcacctcctccttccatctgtgctgtttggttgtattctttattggatctgggatgatatgacttctttgcctggggctgttgctgccattacgcagttttggattcactgttgcttcataccaatgttggtgc

SEQ ID NO: 60968 - DNA, 1021 bp, Homo sapiens
ctgataatgtacttaggtattaccaatcctataacccaatttgtgaaaaggtcaggcactcctactaaagaacaaacgtttgtatttgtagcatttaaaaatctgattttattttgtatttgctacatttggagtcaaccttatcccttcccttctaatgacttcatttgtttaccaggctgttttgttctgcatcctctgccaaatgccattacgtaacttcctttgtcagaccaattggtgaaataattctttgtgtgcttttttttttttttttttttacggccgtccaattttcaaattatatgtggattttctgagtcaggcattgcacaaatgctgatttgttagcttgaactcgataaatgtgtgttcaccctatcagttgtcattcatgctgacttcttcctctactctcttcactctgattctgttttcatttaagaaaatttcagaagtagtgaagctaggagagttaatgagtagccacgttgaccctagtaggatcttacccattggagaaaagccctgttttaaaacgatgcacaaagaataagcttcaatgtcttcctctcctcaaccccagcatggagcacaatgcttatgtgatacacggaagtgagaaatttaagaagtgcttcactttaacttttctcaataagtaaataaaactgtcttttctagagtccaacacatcccaaagtgtgtgactttgctattttaccttaaactgactactctctgaatagattttcatgttatatagtctgagacttttctttccatcctgctggtgctggaagacatgatcataactactcacaacccagatcttaaaatatatatattgttacacttttatatacttgtattaaagcatcagttagtaagtttcatggttgtttcttctgatgtaaaagtaactgtagttatagatcctccagcacatgtcacactgaaaacctaatcacaaagtcaaaatatgtgcataaatattagcttgattatgtgtcacatgtac

SEQ ID NO: 60969 - DNA, 2060 bp, Homo sapiens
gagcttttggaatgactggaaaatttctcaaagcttcctcccttatctacggtttagtttacaaaaattaaataagcttatgatgtgtgtctcatccacccaagtacatctgcagggctcctctattgtaaatcagctgcctaaggctcaagttagacacagtcaaagccgtgtatatttagggtacataatcttgatgtcaagtgctggagtcttgggcaaacttttcatctttttatgtaaaactgatttccattaagtatgaaaacaccttggtggtattgattttatgaaccctgtacattccctgcaatgaagacagattttagggtaaaagaggatgtttgcaagaaatggtgagttttattgtaagagaacttaccggccctatagagaggagaaaacaggttggaatgtccagctgctaccacccaacgggatcccagcacaaagaaaacagtcaaaattatgttcatcatgacagagcaaatgagcttttggggaaaacagaagcaaaataaacctttttgaataatttattattctataaacacaatcataaagcgtaatggtatcagttcaggagaaaggtcccactgctcctgtgttctacgtcagtggctgcagggccacagcaggcagagataaccaagcatgctttcactgccctgatcaccattcccccattaataatttgcttggccctttccttcctactgcctgaagaaaatcaatgtttggcagctctaggttgaattactgtttattttatctttagcctacacaactgcaaaaggaaagcctgagttttccagtgcatattccaatacctgtttatggaagtgagaacgagtcagatagtgatgtattttttcagagagtttcttaagccagctgtggataagaaggtccaatttgcattggaactgctaactaggactcagggaaatcccatctggtttagagaagagtaaatgaaaataaaacagaattgtgaatgcaatgcttcaataattagtttgcaaaacatgtatccactgccttgtgtgggcaaagcaccatattaggaactatagaggactgcaagaaaaacagaaaaacagagtgggctccttttgcaaggtattcgtggctattccaggcatcctttcttctttcagcagtgatctcctgagttattactatgtgcctggcgctgttctgtggactgcggacaaagacaaagtctctgctctcttggagcttatattccagtgaagtgggggaggactaaatgtaaatacatgggcaaaagtcagctaataaatactgtgcagagaatcatgaggagttgatgttcagttagtgagcaggctggttcgttactagggaagatgtgaagggcctctgagaagtaaaattgtagcagagacctaaataacgagaaagacctagccaagcactgagcaaggcaagggatgttcctggaagggaagccagagagtatggccagagcccgagatatcctgggtctggtgagtcatagatgagactggagtactggagtaggcagctggcaggtcacagtggactttcccagtgagtcagggattttgatttggggaaacctttggggattttaaagaggaaagtgacttgatctgatttttattggatactttaagaaataaattttgttttgtatacttaaggaatacaacatgattctatgagatatatatatatagtaaaatagtcaccatagagaaacaaattaacatatctatcatctcacatagttatacattttccccttatgtcaagagtagccataatctgatttagcaaaaatcatgaatacaatacactattactaactacagtcctctgcacattagatctttagacttgttcatcctaaacacctgttacttggtattctctcacctacatgtcatttcctctcccacctctagtaaccactgttttattctctatctctgtgggtattagacattgtttttttagattccacatataaatgagatcatgtaatatctttctttctatgcctggcttat

SEQ ID NO: 60970 - DNA, 1102 bp, Homo sapiens
tgtttttatagtctcgactctgccttaatttgctattagatccagccctgtggattgtagatgttctctaagttcccttcaagttgtaaaatctcagactcttactagctctaatgaaaaggtgtgatggaaaactgggagaaatgtgtatcttggtggtgatggggatttggagatgatatgttagaaaccgctagatgggtatttacggcagtgtggaaaaatgacagtcaaatggttcatgtcacaggcttatccagagtcaatctttcctacatgccagaaatgtgaataacacacatctttacttagcactgcttgacctgataatcctttatttacatttgggaaatctagttcaatagtcttttgtacactcaccaaatatttattgaatgctttgtatttacatagcactgggagggacacaaagaaggtggtgtgatctaatgaaaaacatgtgggacgtggagtcagttctgaatttacatcccagccgtaccatttattaaaccaataatgtcaggtctctgagtcaattcccacttctgagaagtgaaaatgatgacaccaacccgaatgagatgatatacatcaagtacctaatataagcatctatcgcagagtaaacactcaataaacatgtgcaacattttaggatctcagtgactgtttctcacgaggcaggcaacttaatatgcagtctattcttccaatatagtaaagtgagttcaagattgcaaactcatttctcataagttcctaaaagcctgtattttttctaatgtaaaagggaaacaagttgaacagtcacactaagaaaaattgttatctagcaatatctattccccagagaaatttagcctttcaatttttctcttaagaaatagatatgtacaggcgtttgcaattttgttgacttgtatatttcccccatagctcatgaggcctgttcaaatacaaacttggctttcatacaaagcccttgatttgtagataatacagtcctaaaaggtgctatgtggaactctctttagcaacatttcttaaagcttaagatcttctcattcagacactggcattagaactgaatcgtattttt

SEQ ID NO: 60971 - DNA, 511 bp, Homo sapiens
ccaccacttcatcaaatgcatctgtactgcgagcatcattctcagtggctaaccacattgctaaagctaagaagtcctttactattggtgaagagttgacctgcttgctgctaaggacatttgtcatgaacttttaggagaggttgcagttcaaaaggtggcacgtgttcctcttttggctagcactataactagatgaatgatgaaataacagaggatagtgaggtacaactgttaaagaggattaatgagtcatcgtggtatgcaatccaggttgatgagcctgtcaatgttgacgataaggcaagaatgcttgtttttatgtgatatatttttcaggaggatgtgcatgaggatacgatatgcgtacttttgttgccaaccaacaccacagctgcagaactattaaagtctttgaatgattacctaacaggaaaaccacattggtcattttgtgttggtatgtgcacagacgaagcagctgccatgactgaacggcttgctggtttca

SEQ ID NO: 60972 - DNA, 1309 bp, Homo sapiens
gactacaaaacaggtattaaaaaaaaaatcaaatttgcttgcaggacaggcaagcaaatgtcagacggtcctctggaggacctaccgaatgagtccaatctcctgtcccttaaagcttcacagatgctagcggtagagcaagctgctcccaaaggaaggacaatgtagtccagattcgctgggtaacctggccaggacctgaccgcggacacccctgccgagggagggaggcctcgggatgacaggcgcgccgtctcccctcacctctgcacacactccacccatccacggccccaccccagatcccgcgccgctctgaggtccccacccctgggacgaggggaagtgggactaaaacgtctacagtaagacggggaagtggtcgaaaaagggcaagggggaggtgggggcaggtacctgagacggaggatgatcccagctccttaatgccggatcatcgcctaggccccacccggctcccgcggctaccagtgacccagaaggtgcaactgaccaaacgcagcgactcaaccgactgtgctctccccagactcgcagctatggcaacttgaactagccgcccagccacagcaagagtacaggaccccgctgccgccgcttggccgtctgggagttgtagtccatctcggcctcatgatcaaggaattaccaagggagagagtcccgaaaaggaactgcaaatcccaggatgccatatagctggccttcgggtaactttcccggataaaagcctgatcccttggccgcgccctcttgccctgctctattttttttttttgttaaaggaccagcctcctttgtaggaggcaaactccagttagaaagtgaataaaaatgcttccttggccttgactgtaattttactccttgggggacaaaaggagtcccccaggactacggtaagatggggaagtagaaaaagggcaagggagcggtgggaggacagggaaagacaatttctagcactgaaatgtaaaaatccccttaataccagggtccagtatattgttccaaagactcacaaattcttagaagcggacgggaacagagaagattatgtaggccaacctgtttggcctggaaagagtaagggacttgcctaagatcatatggcttattcacggcacaccaaaagtagatgtgaggctgtcagctcattactgctgctacttcagtctaggtgtcatctcctcactctagaacataaaagaaatgttttccactcaggggagttggtttcagtcacgaagagaatgaaaacctcaataaaaaactgaactttggaaag

SEQ ID NO: 60973 - DNA, 1018 bp, Homo sapiens
aaggaattgacattccttttatcccaagaggaataagtgattgaagacttttaagaaggaaataggcacaatctgatttatgtttgtaatgatctttttggctactgtgcgaagaatggtgagtatgccacttaagtattatttttcttcccatcttccagggggaatatgactcaatgaaattcttgggtcgaccagaatttccatactggacccattattaagggaacctggaattatttctgccattcccgattcttcccagcagatggccccaaagttcagttcctgaattgcctcgcggagccgcgggctgcaacgtgaggcggccgctgccagtcgactcaaccaccggagtggcccctgcagttggatagcaacgagaatcctccaggggtgcagggcgacggcttcggccgcaccgcgggctagccagggctgcgtgcccgcctctgaccctcagcagaggtgtctctggccaggaggagctgaagttctgcaggacattggtccgcccgcggacagtccactccgcggggactttctctggataaggagtgcgtgcgagtggctcccaggcagacagggtgtctagaaggctacacgctagggaaggtggctccttggatttaaagaggaggaaaggagggggcatctaaactaggctttggagagaactaatgggaggggcgcccggggtgggggggcgggctggaaaacagaggggacagccaggactggtgttgggtgtcagggaacagacggagcggactgcgtgggtccagccaaggaaagtgaagcaagcagacttgtttgggtcaaggttgcctagggaagcggagcacttaagtgcctctttttccccttctccagcctcctccacagtggtgaggtcacagccccttggagccctccctcttcccacccctcccgctcccgggtctcctttggcctggggtaacccgaggtgcagagctgagaatgaggcgatttcggaggatggagaaatagccccgag

SEQ ID NO: 60974 - DNA, 840 bp, Homo sapiens
aatatttttaaatgtcagttttttgttgaccctgcatgattgtgatagaatttttctacctcgtgtctccaaaacagatgttgttcccttataattataatacattttacaaaatcgcaactgcagagtgttttgttgaagtgatcatcttaaatgaatgcatgagccgtaaccggatcaatcattcttactcctgtcaagctttcaattacattccagagtcccagcacaaacctagcagcttgttggaacatctagatgccctttgcttctacatcctccctctttcctcccagatttggattacctttaaatgagctattatctgatatgatgccacagtttccatgattcgtattcatttttttaaaactttcgtctatgatctagtaagtgacgatgactggtttattgcaaaattttctgaatcactttgctctgtcagattaagctttcagctaaccagcagagggagcacaaagagacacactggtttcatctcagtgtacagggagtctagttactaagtggacgaagaactcccgcacattgagatctggtcctcaactggcaagaagcactgttcgagcaatcaggaaaatctgggctttaagcagtggcaccactacgaatttattctcttgcctaagattacttggaattcctatagtagtgggggaggggggactctcttttgtactagttcctccttaaattttaaagaaattgagcccgtggactgaggtgggtgcggatggtgggatgcagaggaaacaaaaatttcttctcatctagcttccactccaaatctgtttctcccagagaaaatacaagacttag

SEQ ID NO: 60975 - DNA, 967 bp, Homo sapiens
tgccaggacatggaaatctattttgttaattacattctgcctctgagtctaaaagaaataaacacttaaaaaaaagtggaccttttatctcccacaagcagcattgagcctgacccttttgccagtatgatgatgatcattttgggtgtgtgtaggggttgtgaggttgagaagggaggggattcaacattgaggaggaggctatgcttgtgtttcagcttcagactattggcagttgatacggtttggctgtgtccccacccaaatctcatcttgaatttttgctcccacaattcccacatgttgtgggagggacccagtgggagataattgaatcatggaggtggttcttctatactgttctcatggtagtgaataagtctcacaaaatctgatcgttttataaggggttccccctttcacttggctctcattccctctcttgcctgccgccatgtaagacgtgccttttgccttttgccgtccaccatgattgtgaggtgggaggcaacgtggaactgtgagtccacattgggcaactgtgttccccagccacgtggaactgtgagtccattaaacctttttctttataaattacccagtctctggtatgtctttatcagcagtgtgaaaatggactaaaaattgccctggtttccttttgtcactgtgtggtagaatgctgactcaccaacttacaggatacggcaattttccattgcagaatccattatgttgcaatagtaaacgctgaaagatttcatagatcatggaaagtataggcttataagaaatgattgtagtaatatctgagttataaagcaattttatttgtacacatagactttaagaaaagattcataatttctgatcaattttctgaatagtcagacacgaattttcttgttaataataagtcatttttgagcattagctttgtgctgggttctttacagatagtctatca

SEQ ID NO: 60976 - DNA, 1124 bp, Homo sapiens
tttgcagagtgataaactgccagtttttccccaaattatctgcctcaatgctgtctccatcacttagaacattagggcagttttaaaagaaggcaccgaattctttgacactcttcccattaagaggtggactgtatgtcctctgcccttgaatttgatagttctcttagaatctggctgacataatgtgggaaggtcaagccacatggagtagccacagcaacagtcccagctgagctcagtctttgagtcacctcagccctggcaccagacatgccagtgaaggaaattgcagataatcccaacccccaggcattgagtcatcccagactccagatcttcccagctgacgccccagacatcacagaacagagacaacctatccccaccattccctgttcaaattaatgatccataaaacctatgctcataataaaaagattgttgctttatgccacttagttttggggtgttttgtcacgcagtaactgaaataattactaacatgttttctcaagaaatatgtattaaaatgcaaacacattacttggatgaactctttcagatgaacacacacaatcagtgtatctagcagacaacaaagcagggaaatgagccatgagatgctctcccgtttcactgacgtgaaagcatcactgggaaaggcaacctaagatgcttccagaaagctggaattgaaagatggccacaccttgaagacagcatggctaaaagagaaagacatgcctcaaaaaggacggatgaggccagagagcaaacccagattcattttcttcacaactgtgcttaagtctggctcaaaagtccctccactctctcactaaccgcaaaggtgtttatttatgccagtttataaatgtctaatgttaaaaatcacctgggaataatacaggaacaagcgccaagggtaatttttttttttttttttttttgagacagagtctcactttgtcacccaggctggagtacaatggcgtggtctcagctcactgcaacttccgcctcccaggttgaagtgattctcccgcctcagcctcctgagtagctgggactacaggcacgtgccaccatacccggctaatttttgtgtttttagtagagat

SEQ ID NO: 60977 - DNA, 4751 bp, Homo sapiens
aagctgggattttaaagatgagtaggatttcaaatgtataaatataggagggtgcaggaaagagcattccatacagaggcctaagcatgaacaaaatgacagaggtgcgaaggctgtggtactgctcggaaaaggaatcagcatacaggatgagagggctggaaggagggaaggcaatatgctagttactctccctgtaattgacccaattacaggcattccccaacttttctgccctgcagggactgaccactatagactgcatcgtgcatgcccttttgtcctctgtgttccaatgggtttggccaccggggctctggcttgagatcagagtacaagggcagagatacatgggcatttatccccggttccctccctgcttcttaactactaagccagtgttagctccatagttatagctcctgtcttctgtgactccaagttcgctccggggttcagtatcatcccctgttttttctgtcctttcagccttaggagtggtaaccgctttgctatggctaattcctaagtgtttcaccatccctgattggttcctctcaccccactcacctctttgtaaatagtctgtaaattctcctcagtcaaactctttgaggagaccatttgttttctgccagcctcttcactgactcagatagactgaagctgcatcatccaggatcttacatgacaggctatcaagtttgacctgtgttcagtagacagcacagagcatcaaggctcttagcacagagttgtgtgggttgtgcactgcacaactatgtatggaagccctggctcttaataaagagagagacagagggagagagagagatgattaaagaaaataaaaaggaggagggcttgggaggcagctcaaggagagaatcagcataaccatgtcatcagtagctgagagtatgtcataggcacacagtgccagcactgggaggagtaagagtggtctggtccgttttggagactatcacagctacttagctctgagttaaacagatcatattctgtcctatgttccagagccactctttgcagcaaccagtgcccattcactgcagggtcctccatgacttctggcttagaatccagttgtagctcaaagttcttcagcaaacattttcccacttcatcattttctaatattagtgtgctggttctggaaaccagataaccaagtataaggaagaccacacatttccttcaagatatcaaacccaagtcctttgtaaagtaatatcttatagcagtgctccccaaatttgttcacatcatggcattctgagaatataatcatattgcacacacactaggtaaatgaacaagggtactcccagccagaggtgaccagtacagaggctctggcttccccagaccttgaccagcttcctcaaggcacacttgcaacacacttgagacttagagttcaaggtgtgaaggtctgccttagagctccaactccatcagcacaagagtctcatcctcgtgggactctctcatgaactatcaatgacctcaggcaagccctggtccccctttaacatttgacccaaagccatcatggtggctcatgcctataatcctaatgctttggaaggctgagactggaggaccacttgaggccaggagttcaaggaccagcctgaacaaaacggtaacaccctatctctattaaaaaaaaaattaatttaagaattagccaggtgtggtggcatgcccctatatcccagctattcaggaggctaaggcaggaggatcacttgagcccaagagtttgaggctgcagtgagccatgattgtgccgctacactccagcctgggccacagagggagacccccatatctttaaaaaaatttaacaatcatatgaccccattacgggcatataactcctctctgattctctgaagtcataggtagggtcacagctagcccatattgaacctttgcacaaattagaaaaaggtacccttgccctggatggacattgccaagcaccagggtacaacagccaccggccatgattaagaatattcaaaaactcatgggattatagaataaagaggaagtgacaccactcaatatttggtcttacaaaatgcccttagtcatgcttggggcattggggcccacatcaaggctgcctccttatcttgctgggaacctttctagctctcctgcgagtcactctgccctcgtgactctttagctgggaaagtgattgtcctgtcctattgtgatatgtttccaacctccaatgttgtactgggagacttaacatctgtcttggtgatacccaatatcttatggaagtttgacaagttttgtgatttctctcttgaaatttctactcttacttctgcatctgggccaccatcagccagtagccaggttaatcccattaatccaacagcctaacccactaaccataatgtatagtatcagcgcccttatcaatgtcaatcccttgccttcaaaggctggcaatagagaagactaggagaagactagaagttcaagttttaaagtttaggcacctttctctttatggagtgtctagcttcttggccaacctgaatctgggcctgattttattagtaaatcaacagatcattttagtttttactttgtgtaaagtaagcataaaaggttctctcccatgagtcaaatacacatgtcttcacactaggattgaagctattaacatgaatattgaccagttacgtgttttatttacatacatctatgttctcccctgtgacctagataagtccagttgttgggcagctgagctctgcagtaatggcccaaaatggacagagcagactcatcctcaaaatcaaaacacggcaaagggatgaacctttctttcaaatatgaggaaggttaacatgacctaaaaacaaagctcttctgttctttgccagatagaaatgacctttctgtgaagaatttaaaaaaaaaaaaaaaagaagaagaagaagaatcttaatgaaatacacctgcgtcattaggtgcttattacagacacttagtaagtctgttaggtcagtgagtgaggccaagaacctgccaaactgaagggtcattgtcaaccaatggaacaaaacaaatggacaagaaggaggaggaaagataagtagttttgatctgggacatgcggcacagactccttgctagagctgcttgaaaacctatctttctcccttttccttttgccagagacttagggcccacttgacatattcacagttggctgatgccacactctaaatccttacctgaggagcagtgtctccctctacaggcagcacagctgaaacacaaggaagacctctctccacagcagtgcctctgtaactgacatgtccctgtacctctcagccagcacattgtgataatgactcattgctccactgccgattcacagaccactgccaggcaatgtgtgggcctggaactggtcatgcttctttacctttctgcatttatctctaacataagtaacatgtcatacccatccatgttagtgtggcccccagcacaaccagaaaacaccaactaatggaattttccacattctatgggacccagcagtaccttcttgttttagttaaaactctccaatattgcttatcccatctgatgatcattaaattggaaagtggtaggccaagtgcagtggctcacacctgtaatcccagcactttggggggctaaggtgggtggatcacctgaggtcaggattttgaaaccagcctggccaatatggtgaaacctcgtctctactgaaaatttaaaagttagctgggcatggtggcggacgcctgtagtcccagctactcggaaggctgaggcaggaggatcacttggacccaggaggcagaggttgcagtgacctgagattgtgccactgcactccagcctgggtgacagagtgagattctgtctcaaaaacaatttttttattttaaaaattaaaaaagtaaaaagttggaaagtgatagattgtactacctccctgccctcacaccattacaaactactcagaggattgaaaacaagcttcccttttcaaaaaggatagggcaatctgatttcaagtcacctgtgaacagtcaaggagcagaaataaatgtaaggaaagaaagacaccagatagaaatgattcttgcagcctattaacttacatgtttcatcagacttcccaggacagtctctccctcgatttctcataagaattccttagatgaagccagaaccaatgatttagcctccctttgacaccactcttcttgtcctgtatctgtataccgacctcctttgcccaactgttgttaaatccaaagcaacgttattccaggaagtgctgtccccacctgtgagagtaggcagacatgaagagttgctcaacatctgctttgctggatagctttcttcatttatgaaagctcaaaggcagaattcaaagttcataggtggaagaacttagtgctggccagcatcatcgtgcactccccaggccacatggaggagcatgaggtgtttgtaaattgttaggtgtctattaaagaatgttatgtgtttaaacacagggttgaagacgatacaaacttataggtgaattaaatttaaaagacaaaatgttgacgaacttcttcaactaaaataatgtgacatttattctcttctcatcacataaataagaagcaagctgcatattaaaaatacatata

SEQ ID NO: 60978 - DNA, 1906 bp, Homo sapiens
tcatctccgaagtcagactgggtccaacttgactccaccactcacttgctgtgtgactttgggcaaagtctacaatctctctgtacctcacttttcctatctgtaaaatggggagaaatctaaagcgtagtgcattgggttatttaaagattcatacatgtgtagtgtctgagacataaaaagcatttggcattattcctatttatttgctcaagatgagatgccttcttgcgtttgaattgttgtgttacattgctcccagaaacatcttgattagatgatttttcccagaaaaataacagatgcagtcaataagtgctgctcccaccgagacaccaaaatatcccgtaaaccaacacactctgagcagatcttcgcagtgaaacgctgagtccacagagcggccacacagacacgaggctgaagaggaaggaagctgggaaccctgcgcggggtgagtgccaggactagttccaggcccagaacgtttcctagggaagggttgagtaaagtgacagtggggcagcccactctcctcacgtatttctgggatcccagctataagagatcctatgacccccacagacagttgaattggcagggggatctgcccagggagtaggcagagacagagctccaggttgcagggagcccagggggttttgtgtgcatggcagctgcagaggaaggtggctataggcgcctatcccccaaggctccccatctgacctcaacttaccagtgagccaagagagagcagggcggtccttcctgcgggactggggcgcatatgttctgcgggaccccctgcacgcagcccctcccaaagcccctgtctggttgttcctgcaggagtgtgtgcactgtgccgcctccgctgcccagcctgagttcttgctagcgaccccgcctgaatgctttccaggcagcttgggagcacttcggatcccccaacacagcaggggtctgaccccgaggggccgaaagacagagcccaatgccccaaggttgcagcacagagctcaggagtgcccagctgagacctgtggctggtgcgcaagcgcgggggaggagcctccactcagaacactgggaggagtgagaagcagttcgtgggccagcgcgggatgagacttgtctctctcagggcctttcagggaagggttgcggcctgtctgcaagccttagcctctgccggagagagcccccacagctccgaacacctaacaaaggaaacgtaagtgcagctccagtgattggagggggctcctctaagggccaggagaggacttggcaaaaggatcatctctctcccctgaactatggagcatgactgcgaatacaaaataccaaagagccagcgctgagtcagagcctgccggcaattactcttaagcgccatctactggtttgccgccgaaattacaatttcaaaatattctgccagtatagagcacctgtaaaacccagagcaagaatctagccacaaagatcccatacagagccttggccctctgaaagtatccagaaatgaagccaattgactatactcaacatataccacagttaagccctcaaggtaaatgaataatataaaaacaagacgacaaaggaacaccagccctctcaaaagagtcagcacaagaactctggcaattcaaaacgtcaaataagcatactagcccctcagcaaggactgaaatgtccggaatgacagacatagaattcagaatctggataccaaagaagctcatcaagattcaagaggaagtagaaacccaatccaaggaatccagtaaaaatgacccaaaaattgaaagacaaaatagccatttttaaaaagaaccaaactgaactggaatttaaaaattcactacaaaattttcataatagtgttggaagcatt

SEQ ID NO: 60979 - DNA, 3378 bp, Homo sapiens
tgatctaaaactctttgttttaaataattaattttgaaaattgtaaacaaaaagggacagcgattcggatatattccccctagcaaacaaagaaggcaaatcctagctgctgctgggaacaaaaccaaaacttggggctctgaaagcagcccgcgacgggtgcgaaatcacagggtgaaaaaaggacctagaaataaactgagctctgcacacgcctggctcttgcctcgggagcacgcacctcccagccccgctctcagcagctctcactatttaaagccggatctggtgtttaaatggagaggcggtgacgtaggcctgaaaagcaccttcccatcctggcagagtctatattagagagcggcaatggctctatataaacagggcagccaaagggaggaggaccacaaggctcagggactgaaaagcagggtaagcggccgcagccatgatggttagacccgagtcgccaacggtacggtgtcgggcggccgcgggctggtctgcggcatttgggaccgggcaaaaaacgtgttttattgtcatcataaaaataagagttgggtggactagtgatcacactgcgttggtgactgaaaaggttatttatgtgactgctttttgcaaacctacgtgatcgcaagtaacaaaaagggaccaacgggaagaagtaggtaaatttcaaggcgaaagcggggacacttggaccactgcaggctttttttgtttgttttggtgcttctgctaggcgaagatacgatgggggtcttccccttcgccattttacccattcggaaggaactgagataagtgcttttcaaccaaccttcgtcctttttttaaacataaaatggcctcagagaaggttcccaaagcacagccgccaaaaacaacctaagaaacccccaaagtaaccattaatcttccactgcattaaagtggatcacgatgggtctcgggggttcgcccgattccccacacacagtttttgttctgtagccactcggggagccctcgtcaagccagcgcggacgggcccctcggggggaagcggcggctcccctcccgccctccctcccggcggccgggttctggggccggggctgcgcgcccgaccgggcccaaccgcctccgcggcccggcccggcccgcggcggccccaggccccaccggcgcccccgccctccccgcgccgcgagccctcggcgcccccccgcgcccgccgcccggcgctccggcccgatccgcccgaggcgggaagcggcggcggcggcggccgcgcgggcggctgaagagtcgaggccgggagtcgccgccgtccccgcccccgcccggtccggccgttgctgcagcctgaacgaagcccccgccggccaccgaaccacgtccttaccacggtgtttgtatttgccgagttcgccatttccacacacaacacaaacaagagggggcaaccccaagaaaacaagataaaaacaaaaccaaaaaaaaaaaaactataacacccggagggtgacccaaatcaccgcaagattggggaaaaaattttaaacaaaatcaatcctgaaggagtaggggagagcggagagaggaggaggaggggggcactcctcccgcagctgaaaacctcgagaatcgccttaaaaaaaaaaaaaaagccacgacccttcaggggtccggggggcgttgcccgctccccaccccgcgccaaggagggaaaccaccaccggtcaccgctccctgcgccgccgctgccgccaccggctgcagctccagccgtccggtccgcccgcttctctcctttatatagcgagccaacaagctgcgcgagccaccaccgccgccgccgccgccgccgagagacagggtgaagggggagggaggggcggaaagggcgggggcagaggtgggcggggctgagcgcgagacaccgcgagagccgcgtgcgcaggcgcgccggggcggaggccgccggcgagccgcgttgtcacgcgccgtggcgggtactggactggcggagcccggggagtgaagtagtgaaatcggacctacgcctctccaacgctcgcgtgatcacgtggttggcacccaggcggaagtctgcggcagttctttgcggtgaagaacttgcaaagcgttgctggaaaagacgggagttctactgacactccagtccaaagctaggtgggaccgcctcctgtcgcacgtttccgcctggtcccgcgctttaggagctaggaaatgtgacagaggcggtgcctactgcctcgctaggaatggccgcggaggaggactggtcacgtggcgtggcttccggcctctggcgcgttcctattcgggaaggttttaaatgcggagtcatctcttgatttgtcagcgaggctttgactgtgagcttcgcggcgttcgcgcctcaccgcctcaccgagggtgggtctttcgcgcgcagaattgtgtaggattttccaaagggagtaaaagccgatcggggcctacttttaacattccacaattagtaacgtctgattcgtttgtttccacagtgggtacgctgcgaagactaggcttatgttacccagaggttagtcctctactaggccacgtactttaaataatttatcacgctagtggaaatgcggggtggaagaaaaccccaccagcctttggattgtaacagcacagtaactttccctggtttttaaaaatattgccaaaatactgcgactccatgtggccaacgtatagtgactgatcactttgaaatgcatgcccttgacccaccaactcgcatggcctctcgctataagagagcaagccggctgtgttccatgttcaattcaataagtgcaattcaataagcttttgacttgttctgcccaagcaaatcctgcctttatatcgaccttgcaagcagaacagagaatgctgtttggaaggcagaattcatagtacctagttttcttgtccctgggaattttgagggacttgaaatgtcgcgtggatgagtgagggagtttgtcttccagagacaaagcaaaacgaaacgtcaaagttctgtgctggtgaaaccagatttgaagaatatcaaaggcgtcttaccaaagaggaaaaaaaatgcatcttgccaagacttgaagaaagggattagagaaaccagaggccttgaatactcagaaaatgggagattgtgaatgggtgtagaggatatctatgaaccttgacatttcttttcacgccaagtccattcccctgttaacagttgcttcccagtttcctgcacagctgcatggtctgggacacttaaagaaaaaaatcacaggaaatcagtgttcttggtatattatataaagttatgattctatcaacatttgtaattca

SEQ ID NO: 60980 - DNA, 1816 bp, Homo sapiens
gaatggagttcagtgagggtgtacatgtgtggggggtgtgtgtgtgtgtgtgtgtgtgtgtaaaagagataatgaatacaaatgagaatgagaataagaaaatgtgtattgggtgagcagaggataagcagagagaaagaagggaagagacggggaaaagtagctttcagaagaaacatgtctaccttgttagtagaccaaaatatttgaagggcaagccttcaatgtgttatgttgttttacttttactctgcttttagtcattattatatgctccatcagagcctgacacacagcaggcactcagtaaatatttactaagtgcacacctggatcaagcattgtgcacacttgcaggtgtggctatgactaagcacagaaaaaggaaaccaacagtggtggtgtgggacaagtgtcaagcagtggccctgacaggcagaagtgccctttgccccagtggctgagtcattgcgccaccacagtgacacactgaaacaggttccattcacaacatcaataatgacatgaggtcattcttccaacaaagcaatgaaccccagagagaggctccaaatcttaacacaggaagggtctgcttccgtttgtcaccctcttcctcagtgagcagatcaggtacatgaaatattttactgtcccatcctggactggattttgccttcattaaccctatgacaacccaaggggaggtatatttacagtttatatgtgaggaaaatgaaactcatagagcttacataacatgcctatggtcaaatatcaaccaggtttcgaaaccaatgcccttttaacctccttgaagtagaacgcatatacagaaaagtgcacatatcgtagctccatatattttcacagttgagcacatgcatgtaaccagcacccagatcaagaaacaattgcctttgtgctcctgaccaacctcttccccgaccgtgaataatgactatcctgacttttaacaacggcatgagttttgcccagaacactctaaactacagtaatcactccttccaccaaattcctctgattttcttatcggcatcgctcatttggaatttcccaatactctcttgtagagtcaaatagttgttcttttacgtatctcatctttctaattatgattaaaacctccttgagaccagggttttgtacatttttagattcccccacacacctattatggaggagccactgtaaagtgtatctacttaagagttattttctggttactgtgtatctgacactgtttcaagcactttacgtggattatctcctttgatcctttcaacaaccctgtgaggtaggtactgctcttatctccctcttacagatgacaaaactaaagcacaaaaaagttaagtaacttgcccaagctcacgctgttagagatggaatcagggccgggcatggtggctcatgcttgtaatcctagcactttgggaggccgaggcaggtggattgcttgaggtcaggagttcaagaccagcctggccaacatggtgaaaccctgtctccacaaaaaatatcaaaaattagctgggtgtgatgaaacaggcctgtgatgaatctcagctactcaggaggctgaggcatgagaattgcttgagcctgggaggcgggggttgcagtgagccaagatcgcgccactgcactccagcctgggtgacagagtgagactgtcacaggaaaaaaggaaggaagggagggagggatggaatcaggattcaaacccaggcattgttactttagcctttcttgttattctgtttttttggcaaactttttaaaaagtataaaa

SEQ ID NO: 60981 - DNA, 888 bp, Homo sapiens
tctcttcactttaggaaacgaaggcactccttaccctgcgagtgggcaggaaagggtggctcttcattgaaggagacccattctgactggtgggtggcaatcacatggtccaaagtcgtcatgctaaaaaggcactggtcatcttcacactgctgacctcaggtgaaccccagaatactgtctggggtgggctggagtaggggtatggtagtacggtagacttgggtccagggtctgttctaggtgtcttgccaagggcagtactcagaatgtagacagatcagcctctcttgccgttggttaatctgccaggcagaaatctgtttaacaaacaaacaaacaaaaaattaaaaaggataaccatcacattacactgaatccacataggtctagggcttttagcgctgcccacaagaaggcttggggtggtttccaacttgccttacttcactctgttcctgtcatgccctcaccttttatactgaaatgtctgtctttagcatcaaggtttctagataagccttcatatcacacttgcaaataattacacaaatttcagcaattagattctctaatttccctaattattgtattttagaaatattgtcatctataatactatcattgctaaacaaatattaaaacttttcaaaatgctttcactttctcttactagctggcaaaataaaagcatgttcttttctattaaattagtccagtttcttgccttaggcaggtaactctttataaacctgatttaaatctctggcagaaacccaacaatctccagatggtatctccaagcatggtttatcaatcaagaaaaatagaaatgaagtgatcttgttcatttggagtaagaggatagggaacatctgtggtagtgaa

SEQ ID NO: 60982 - DNA, 574 bp, Homo sapiens
ttaaaagcccatccactccgtataataaataataagagccggtatttattgagtgcttagcgctgtgctgggtgtttttcaggcattggctcatataatcctcaaaacaacgctatcagaccggtgcaatcattatcgccaccttacagatcaggagagggaggcacagagagtaagaaggacctgctcaagggggaaacggggagcgtcgggagaggcggggaggcaggcagagaccaggagctgcacaaaagcacagttaatgattcactcacagccctcaggcagctccttccagtaggggttgcaccagaacacacggacgcgcacacacacgcacgaatgcacacacacgcacacgcgcgcgcacacacgcactctcatcttcaactcttcatcccagcgagaggcgggtgtcaggcaaattgcttggcaacgcgcagagaaaactccatccaagccccacgtccaggccgcctctgggcgctgtccagcgggcagagcgcctgaggccaagctggggtcctgcctcccgacaccccgaaggcggggcgcggcgccaacccggggtttc

SEQ ID NO: 60983 - DNA, 621 bp, Homo sapiens
agagaaagcagcacaatcactggcccatgtgaccagaataaagtggcaaacttcatattaatcaggtgacaggcactgtcaaaaaccatccagagtaaaacttgctcaggaaagctgctgtttaagaacagtgggtttctctaaacaacggctttaaagacacgtgagttttcaaagctgtggtgtggctgggatctacaaggatggtctcctaaaggagtttccttgcacaaataatttgcttgtaaaaccaaatcaaaccaaagaaacaataacaaaaaaagccttttcatgaaagtcaggacctgttgcaggcaactgcctattcttctatcttctgtttaatatgattgctaggttaaaggtcgttccttccctgccatccccatttaagcaacaatgaagtagaaatgccattctgttgctcaacaaacttgcttcagaacccaattttaagcaagatgtagtcagtttaaactcagttccttttgtgccatttgaaatagatcaagatgccaattactctatttttcttttttaaggctataaggatgtgtttactgcagagacaaacagtaagaaagtatacaaaattaaagaaaaatgacagttatctttacc

SEQ ID NO: 60984 - DNA, 4534 bp, Homo sapiens
ttgagggtcaattgattctaaagggtaagtttattacccaatcagccgcagatatcagaagaaagctccaaaagtgagccctgggccccgaacaaaatctggaggcattaataaacctggcaaccttggtgttctataatagggaccaagaggaacaggccaaaaaggaaaagtgagatcagagaaaggctgcagccttagtcatggccctccagacaaacaaaccttggtggttcaaagaggacagaaaatagaggaggccaatcacctggtggggcttgttatcagtgtggtttgcaaggacactttaaaaaattgtccagtgagaaacaagctgccccctcgcccatgtccactatgccgaggcaatcactggaaggtgcactgccccagaggacaaaggttctctggaccagaagcccccaaccagatgatccaacaacaggactgagggtgcccaggccaagcgccagctcacgtcatcaccctcaccgagccccgggtacgtttaaccattgagggccaggaaattgacttcctcctggacactgtggccttctcagtgttaacctcctgtcccagacaactgtcctcaaggaccgttaccaaccgaggaatcctgggacagcctgtaaccaggtatttctcccacctcctcagttgtaattgggagactttgctcttttcacatgcctttgttatgcctggaagtcccaggacccttattagggagcgatatattagccaaagctggagctattatctacatgaatatggggaacaagttacccatttgttgtcccctgcttaaggagggaatcaaccctgaagtctgggcattagaaggaacaaattccggacacgccaccattctaacttataaaagtgtacggagcccaaaccgtacaaacatgtggtttacacgcaatactacccatttttcttctgggattctacagttttggtacatgctagcagagggtgattacaaactagttttcaataaaaactccaggcactgggtctctaacaagcctccctggtagacaacatttcacatgcgttgttacaatttgccgctggggtaattaagtgatcctgcatcagttctgagggagaggacccttggaagcttctaccttgtttcctccagacttcccccccatgtaccttgcacctgtgctgattttgctttgtccccttttgctgtaataaatcatagctgtgaaggcaactatatgtcaaatccccctaccaaatcattaaacctggggatggtttaggggttccctgacacagatgcattagaagtgggatttgctagaatgaccctgactcactgatatatggtgaaagcgttaagaagaggaaggctaaagggcagaatatgatgaatctctggggcctgagtggtcatggagtcatccacagtatgaagcagtagctgagctgctgtttgttgagagccatagaatctgaaagtaaaagatccagctccaggaaagctggcttgctggatgcccctgactgcttttagtcctgctggctaaaatgagggaaaaggcagtgtattgcaggtgaggcctgtagtttttgttctctcttctagatgggaagagaaaggacccccaaattcccaaggatgggccaaaccaaaaacgttacaagtttgaactgctctctttaaaaagttaaatctggtctggaacaaaattttagataaaccagaaaacaaacaaaaaaactgggggaggtaacaatccagcagttttttttcagcctggctgctgctcttgctacaatatcctcccccacctcccttcctccactgcattccaggatcttccctggcagctgtaatgttaacagtgcaaacactgaatttactgctaggaggctgagtaaactgcagtagggagaaaaaagaaaaagaagaatatttttaaaatagctttatattttgtggctattgcatctagatgtattgtaaaaattaaaataaaatgttaaacacctgtaattttgtaaataccagaggaataatcctgatcaggggaagctgcaaaaaaatgtttagtgggacacaacttccttgctttttgctgccagtgagaggactggaatttgaactcttttgagttttggaaacagagtatctgtaattgatggtttgcttccagggttaccatgtgtaccctctgggactgaacttcttcttctttttttttgagacagtctcactctgtcacctaggctggagtgctgtggcatgatcttggctcactgcagcctctgtctcccaggctcaagcgattctcatgccaccatacctagctaattttttatattcttaccagagatggggttttgcaatattggccaggctggtcttgaactcctggcctcaagtgatccacctgccttggcctcccaaaatgctgggattacaggcatgagccactgcgcccggcttgggacggaacttcttgtactctgactctcatgagactgactcagccctggaaagcttttaggtcagcttccacttactaggccacagttgtgctgcagctgattaaaaaaaaaaaaagttaatacagaaacttaagaccacgtacaaaaacaaataataggtaaaatgtgttttaaaaaaggtaggccgggtgcggtggctcactcctgtaatcccagcactttgggaggccgaggtgggtggatcacctgaggtcaggagttcgagaccagcctggccaacctggtgaaaccccatctctactaaaaatataaaaattagctgggtgtggtggcaggtgcctgtaatcccagctgcttgggagactgaggcaggagaatcgcttgaacccaggaggcgaaggttgcagtgagcagagatcatgccactgcactccaacctgggggacaagagcgagacttcgtctaaaaaaaaaaaaaaaaaaaaaggtaaaaagattagaaaggttaaaacttagggaggaagcctattgtttttctaagatagaccattatgataaatgggaattgttttaactggctaagtccaggcctcctaaaaggcatacctaaaatcaatattgcaggctggtctcactactatctgggtcttattggtaactctgctataaagatgccttggccaatgacctagggagtagactgtgcagagaagagttaaaaaaacagacataaacttctctctttgagaaggctggcttccaaggttggcccttggttagcatctggaaatttagatttctggagagttctcaccatcctacagataagagtggctcacccaaactgtacaatgttgaacacctgctttccttctgcaagtttggtacatgccaggaagagactgccaacttaaccagcccccaataaaaactctagttctctaataagctacctgggtggaaaacatttcacatgtgttatcttaacttgttgctgctggatttaagcactccgtgtgactcctccgggagaggacccttgaaagcttacatctggtttcccctacacttcattccatacttttcctttgctgattttgccttctagtcttccactatgacaaattatagctgtgaacacaactctacactgagtcctttgagtcagcatagatttactaggaacacttcctaccaaattactgcacctgagggtgtggtcttggggttccccaacacaactgggaataagtgtgaaatattcaagaaatagcaagagggcaagtttggtgggagtcacctaaaggggagtggcagaagagttagttaaagagacaggaagggcctgatgtcaggccttgtaaatagaagaagtttggattttactttgagtaggaccggaagccaaaggaggtttctgagcaggaagtagtctcagtctggctgctgttagggaactgatagtgggggaaagagcaaaaggaagaaggccagataggaagctcttacatatagtaaacactttggttcaggaaccacttcagaaaggagaaaacctacatttatttttaagaatgaacagaaatttgtgacagtggatttgggcaaaggaatgaggaaggcatcctaaacagtgaggagaatctgtacaaaggcccaggggcataaactgttatgttgtgtttggagaacagaaaagggttttgtattgctgaaaaaggctgcttagggaaggggtacactgaaggctctgtgaatcatgctaaggactgcatacttcatctctcaggcaaacagggaagtaatggaggcctgtaaacaggggagttatggggtcaaatttgagtttgagaaagattaatatggtagcaacatgattgagaggctgacaaagggcaaaagtttcaaagtaactgtcacataacccagttctagtgtagctggaactgtacacagagccatatatatgcaatttatgtcatatatatgcataagtacttaagcattttcatatattaagaataaattaaaaacaaatctaaatcattattgaaaagtga

SEQ ID NO: 60985 - DNA, 2578 bp, Homo sapiens
agttttactgtactaatttttatttatcaacacttagaaacacgaagttttcatgaacactctcaaaatggaaattttcaaatgtaggcagattaaaacattaaaaaagggggaaaaaagcagaaccagaataaacattagctaactggaaaatcaattcaaaagcacacaaatttctgtatctatataaaacgcatcttataagaaccaagattttcccaaacatcataaaatgactgtcaacaaacatggggcaactcagaaacactgtgacaggtcaccgctttctcaggaaggtttcaaaaaagtaaaaagtggctacgatgagatcaaaagtcttcgtttttaaacagacagaccagggaccatctcaggtgttaagcaaactactgtcaacatcctggtctggatggatcctcctctgccccaaagtgacagctccaggtttgtcaattatttaacttacaattcccaagcccagagttctagaccagacccttcctctaccccagggtcgaggaagctccactcgggctcctgtatcaggattcattcctttggagtcaattccgcgttcgtgagaagagtcgcgcaaagtttgttacgtgggagagaggtgtgggcagggtgaccgccccttctttttccaccccactccaccttcctaaatagcccctttggcgcaggccaagcaaagccaaagagcgagtgacagcccagtgcgagatgtgcccagggagaacggggtcccgagcctggagtccccacggccccgccggctgtagaggctggggggcggaggctctgggccttcagcccgagggggcggatactgacccgaggacgccgaggccaagctcagcagcaccgcacacagcagcagcgtcagccctatccggacccgcatcctcctctcggggccggtgccaacccctagagctgtcgccttcgcctctgccaccacggactcagccaccaccgccgcctcgccgctgctcttcctgctctagtctccttcctccgccccttcccaggcttccctgacccagcgcgcagccaatccccgcccgccgtcgcgggcttctggtccaatcaccatggtctccccgcccacccccattgctccgccccgggggtcattcattggccaatcattgtacgaagctcccacaccagctttctcggttggaccacgactcacggacatggccccagctaattggtagcccctgggttcaaccggaatcagcgcgtgagtccaagactgggagaaagaggctcatccgagactacaattcccagaatgcgcttcatgtgattaactcggggggtgctcttgggaaacgtagtccatcgtagggcaagatttacaagtgcgggtgactgttgaagttagaatttaactaacacctgggctaaatattaactcaaggctatggattcacaagcctttttaaattgacccaaaataaatattaaggaataattttaagaacttgtaatgtgtttagcatcttttcctgttttatttaaaaaatttaaattgggcatagtgataagagcactgagaaaaatgccacagctagttgaatttgaggtgttttttaaaacttagataaaacagtaccgtgaagtacggaaaccagggtgcaactcagtacctgtcctcctttctccgacaaaacaaaaggaaataaatccgctcggcacagattatctcaatacagtatttattttcactaggttcaccagacaataatcataaagaaaatgtgccaacagctttgaaaaattattttaaacacttgtcctcatccttctcctcttgtgagttgcattgttctcttctttcctaactaaagtcaggagaccaggttcacgtgtgtggaggtagaggtgatagtgattgcatcgcaggcacggaaatactctatgtaataagcacgaaatccaggcatgttccaactgagtagcagagcagtgacttggtgtgcctgccctttcttttctcaaaccgtgtcattctgctttccctgtcatccacccacagtcagctctaaggcctagaacctagtccagccaagtgaaggactttggaaaagtctctgctggccatgtgtcttaacacttctgggcatttgtcttccttcctttttttttttgttttttgttttttgttttttgagatacagccttttattttcaggaagatggtaaaaaaccaaccactgtttctcattcacatcggaggagatgaaggaaagaattatctcctccaaaaacttgtcttttcagctacatcaccatttctgtcactaacaatgttccctctgagttcctctgattataaatcatagagtaaaatctggtatattttcctttctttttcatcttattgataatcaagttctatcagtttaaactatgtaacttttaaattgttttattttattatgtacctctgttctcttcctcactgaaaactcccctaatggctttcattttctctcacctggatgatgcacctgagttccagccatactcactgacatcattctccctttaacctgaatcacat

SEQ ID NO: 60986 - DNA, 453 bp, Homo sapiens
aacttcaggacagcatatggcaggtgatcaaagtgatcaaattaataagttttgggtgttcatgccagtttccatgattataattaagagcattaagtttggattgcagatcatagattgtggaggagtatgtttgatctacctaatgtttgaagctgatagaagatgaaaggggggagggagcctcaggctgtttaccaagtttcatcgtgaggtgacatttgctctggacatgtgtgttctctgagcagtgttgactcataccagataaaggaaaggccaggatatgtttttaccctaaataactggacaggcatccttgggtccaatattttcataaatttgttaactgctagttccagggagagactggattataactaaatttaaataagaactcgatgaagtgaactttataaggtagagataaacagcttagagctcccattaaat

SEQ ID NO: 60987 - DNA, 1270 bp, Homo sapiens
ctctcaaactgctgcgattacaggcatgggccaccatgcctggcctaaatcagcttttgctgaaacaatattgcacaataaacaaccccaatcttagtagcttccaacagcaaacatttatttattttgtttcagtctgtggggttaactgcagttaactgtgctcccagctgcaggtcaaatttaggtctgttcctatggctttcattttttggcccaggctgaaggagcagtagctccctgaggcaagctcttctctaggagggctggagcagaagtagccaagccagactgggcaagcacttttaaagcctctgctcagaggtggcttacatcatgtctgcgtccattccattgggcaaagccagtcacatggccaagttcagtatcaaagtgggagggagcggaagtctattccttcctcagaggaggggaggagggaagagtgaacatttaagaacagtatttgctaaataatgccacccacatcctctaaccttcaggaaatctggggaagttcactggcatgcatgcacatgcactgccttgaattaggatttttattttatttgtttatttactaatagaataagggaaagtatgagttgcaaatcaggttgccacagagtgaattcagatgacacaacactgagctcattaagtaggaatccgaagccaggtgaccttgaaaatcctctatttgcagaaactgtgtgtgtgtgttttgcacagttaacccttcaaaatccacagactgagcattcagatcaatcctttttcttttttaagggctgagagaccatagtttacatctggactacgtgtaagctttgagaccagtaaaattattctctctggttctgcttgtcgaaaaccaattcatgttctcaagtctatctcattttatactgccatttcttttccccagataaaaatcacctgattggctctccgagactcactgaagcccttggatgagtcaatttcctatccagccttttagtgtcacctctgttttcactaagatatctggcaaagaaaagggagagacttcttttgccaaaggctgtgaaccattgaatttgagagttcagctcctgtttttttcttactttttgctacaggctcaattaggggactcaaaaaccaaaagaaaagcaaaaccccaaggctcattgtttgtctcagttttgcaccagctttctgctacctcctgagcccagatcttttcaaatcttttttaaatttgaagatttgcagtctgttactt

SEQ ID NO: 60988 - DNA, 512 bp, Homo sapiens
attgtattcaaactggatttttctgcgatgatctgattttaaacaaacagccctattatctctataattactctatcgacaatcttaaatttgacctgagccctgtgctcttagaaaagagcaaagtgtgacaaatcctctcattctttgtgttcccagaaagggcttagtgcaaagaaccaccctttcccgtatgacttagataagactcatgaaaacatgccttgtttacctttgacaaggccagacataaaccctctaaattcccgttcttcaccacgtaaatgattagctgaattgctctgcctgcactaatcaatcaaaaccatctgttggttaaaccaactttaggttaagtttccctccttctatcacattactaaactatggcccatcttcagcctgagcttgcacacaacccctccttgatagcacctacccaactgaggataggggatactgaggactcatgataaaatgttctctggcccagtgtcccatcacaccacctt

SEQ ID NO: 60989 - DNA, 797 bp, Homo sapiens
taggtaaacctaagtcaatttgaaaaatcccaactggtgtacaagtaaatggtaactcttgtggttcaaaggtcttgaggaattaattcatagttcttcactgcaagcagagaagctgtgtctagtagttcaagcaaaatgaatttattttatcgtgtagctcacagaattactgggagaacagaagaaaagaccagcatgcctcactcagaacatatctgtcaagcaaactgctgtccccactgccaaacaccagattctagagttggtatgactactaattctggaccagacactcaaccttgcatcccacacagtacctgctgccatgaacaaacagagagctctccattctttctctcttgcatcactagctactgggtcaaagtcaaaccaggatataaatcttactggaggtccctcagtcaatgtcaagtaaataagcaatgctaaaaaagcaatcagagagcattgccattttctaaagcaggtctttgctgtccactcaaactaataaactgtggaattctccaaatatgaaagggggttcaaccactgagcagcttaaataagagataaattgtcacatacaaatcaaagtaaatattttcctgcaaggcttgtttattcatatatacctatatgggacatggtgaaggaattttagactacatctttatggtttattctttgtaaggttacaattatccagccaaccagctaattttgtacttctacttcatctacttatatgagaggttttcagattattttatattatatttcccttttcagag

SEQ ID NO: 60990 - DNA, 536 bp, Homo sapiens
catacatcctttcagcaatacagtaaaagacagataagaaggttgtaattctgactctttggctctcctggcattagtggcttaagaggttaacactgtcctagacttttctttacagaattccctgcaatcaatttccagacttggaatatgctgtggcacctgctctgctagagtgagcatctactggctctcttccgcttcgttttgggaaagtaacgaactgttggttataaactgttgaaaacaaatatcagaaggtcattgtgctgctaaactttgatatattgagaaatgtgaactttagcaggacttctaaagtactgtcacgcaggaggcggtagtgtaagtggattcatctatcactggtgaaaacatggcacagcatcactgcttgaaggttgagcatggaaacgctcaaccctgattaaacgaccataatttctcaagcctgggacatggttggcagacataggaagctggggccttaaaatataaattgttggaatttataatgcactgtcaatctgtcaggg

SEQ ID NO: 60991 - DNA, 804 bp, Homo sapiens
tacatacaatagcatgtgttttttccagtatgatgacctaaattcctttcgttatatacccagtaatggtgagggactaagtggctaagttggctggacttcctgggtcaatagggacttccctaaggggactatcccctaaacccaaataagtcacagctgcaagctaagggatttaaacttcaaccaatcaaaggggactttcccctaagccaaaatgagtcacagctgcaagctaagggattgaaacttcaaccaatcatatagggagtttaaggtctagctacagcctgatgtttttaaccaatcaggcccatcaacccacaagtgggttgaaaataagctaattgtataggacagaaaaaggaaaaggggaggggtcataaggcgatataagcataagacacccaagccagaaacagcaacccttctgggtccccttccaccacgcagaagctttactttcgctttcactttacttttgctttcactttaacaaatcttgcagccgcacactctttgggtccgcccgtttctctaatcaagttgtaacactcgctgctgtggtccacagcttcattccttgaagcccgtgagacacgaacgcttccattgagaaaaaccttccatcagaagaagacttctcgtctcagtgggactgctgagttgaatggtacctctgttttaagttctctgaaaagtctccaaactgctttttatagtggctgaactaattttcattctcaccaacagtgtataaatgttcctttttctctagactcgccagcatatgttgttttttga

SEQ ID NO: 60992 - DNA, 1232 bp, Homo sapiens
tacctattgcataatttcttgaaaggcagtgctttttttagaagttctgtgagatctttcattttggaacattgaacaaacaattgaataatgaataaaataaacagtatgaatgtaattcaagactatttgcccttggagttggagcataacaaggagttcccagtatcagtttaacacactactggctgtttatggtagataataattacatgacaaaatatataattttagattattagtgataataagaaatgggcctgtcacaaaaataattacctttcccttcaagataatatgacatagctgtggcacttaagctcatttagttctaaagatcctatggctagagatctatttcaccttaattttaaaacaggtcagataagaagaatataagaaaatatttggtatttcttcttttttccctattacttgcttgactgaagatactgggcaaaattgggagaatataattattttttcaatctgtatttattgatcttgataacttcaaccttagcatcctcattatactaaaataatcagtgggtgataatttttgctgcaaataacatgctaacagattttcaaaaataaagtgttttctgtttcccttttcttcatgggccattgctgtattttccacctcctttatgtaatcattttagtatccagttgtgtcacaatgcccactgaatgtccaaggttcagctgtgactcaatccatgactaccttcccacgcagtttgcacagtcaaagacagcattctttgctttgaggctaactaaaaaatcctcatcgtctgattgtaaattcttttgacaagtttttttgacctaaatttttgaccaaactaaattaatattaagaaaattagaatagtgagagcgcctgattttcaggacattaaatttctcaatggagataaatttctcagttaccatataaatgaatacggtatttgacatagaccttcttctctttctcatttcatttaactttattcttttgaatgtgctgatatgcttgattttattaaatcattggttctcaagcacttcctttaagtttcctaaggaagggctttatacctcctgaatctttcccttagactctttacctttactccccagcagtaaactttgcacttttgtgcaaaattccattatccatatggtagaaaatataccttttcagttaagtctggttttaggtgaacattttaatg

SEQ ID NO: 60993 - DNA, 1342 bp, Homo sapiens
agtacatatggattggatttacaagtcaagtcagcaaataataatttcattattatatcgcttcttgtgaaacaataacagcatcagaatagatttttatattcaattagcaacataaaaataatttatgttcattctctgcagatacatgattttgcataattatttcaaccttcataatagaaattataaaaccttgactgttctcttttaaaatctctttagctcctgccttctactgaaaacagttattggcattttctccctctggttttaacccaagttgaaaatgaatacttaattattcttctacagattctatgtcctgtggccgaatgcaaatatggcatcagatttctcataaaaaattttagccacacctggcaaaactctgtttagcctaagttacttcctgattatacatttacagaagaggacaaagtacagaacctgacttcaagccttgatgaagtcaaggcctagctgcatgaccttgcacaattaacttctttctgtttgactctgtttactcatcagtgagatgagagtgcaaaaacaatctttcatctctgtgactttagaaagcagaatgcagatttaagagtataggacttagagacaggcaggctctatccaagctcagccacttaccatgtggccttgaactctttaatccatgagcttccactttctcatttgtaaaatcaaatcaacacattttaaagggctctggaatggattacatggattaaaatactcttctctgttgtaaaccttgggtcttcaagaagaacctcaataaatagcaactctcttctctaccaggttctgaatgttttaagcaataaggcaaaaagtagataaggaagccaaaatatccttaacatcagtggagaaaaggtacctttaagcacgagccaatgggtctcctaaggaaaggcaaattttatccaccaatcaggcagagcaggagcaaaatggtagttagcaaatgagagcccaggtaacatttggcacaaggcataacagatggaaactcacaattttgaggaataaacttgctcccaagagaaatcaagggcagaactgggccaaacaattggactttgcaaatcaccaattagaggtcactttacctttctttgggcagaatgagggcaacggtagaggccaatgatgataatgattgagctctctttccagaaagaaaactttagaatggagaagaagtaaggccagctaataataagcccttaatatccagtagttattgtgattatttttcaaaatattacatttgctcttttagatcactagaatttgtttggatctctttgctctg

SEQ ID NO: 60994 - DNA, 1861 bp, Homo sapiens
atttggaaattaagtatggtttaaggagatgcatatgagtgccaagtcaacaaggggtagacttgtcaatttaattttaggtgtcaatttgactggattacctagaatacctagacacctggtaaaacaggttaggtgtgtctctgatgatgtctccagaggagactggtgtgtaagtctgagtgaactaggtggggaagaccttccttcaatgttttgaggggcatagaagtaaaaatgcagtaaaaaaaatacaagaaatatcccctatcaaattattcagtcatggatgatttctgcccctgcacacttaatgccaagcttgcctttttaaaaaaatgtccttggtcagagaataaaaagtttatgatgagttcagcaaccttgtgaaccaaagacacttgctgatatagaagttcttgcagtgttacgaaagacattaaatggtgacctattcttggtttaattttaccattgaagaagttagaattcttatgtttatcactaaatttaacacacaaataactagtgcatgtttcactttggctaatggatagcattttcaaaactgtccctactgtttttttcttttttttttttttatcagctctatacaattcttgcccctgttagatccaaaacttttagaacatatctgctctactgatttgtagaacttatctgctcacttgtgtattaatgattggaaaaagcaaaggattttgtaaactcttatatgaagatttggtggacttggcagaataaaatggatttcaatttaatccccaaactacaatgacagatttggaattaggtttaatcaaagcttctaaaagtgaatatcaaggtttaaccaataatgtctatttttttttcactcagctcaattcatttgaaaaaaaatccagatgagtgaattggtcatgtgatatggcaatgacaagacttcagtttaaaaatgagtcatttgtttgcattggcattccttctagttggtgatattccaggaacttttattgagttaaaactgtatttttctgaagaaggcagtgaagctactgatgttagaaaataatcaggttcataggaaggtaaaaagacactttcacaacagtgttgcttttcgattaccagtattgctttgtgaacccaaaagtatgtgagataggtctcagtcaattacagagtttattttgccaaagttaaggatatgcccatgtgaaaacctcagggtgtcctgatgacatgtgcccaaggtgatcagggtacagattgtcaaggagatataatacgtcaatcaatacatgtatgatttacattgtttccatctggaagagcaggacaactcaaagaggggttggggtggtgattacaggtcataggtagatttaaacattttctgattggcaattgattgaaagagttactatcaatggaaaagaatgcctgggttgtggagacgatggtttcatccctgcagatgaaacctccaagtagcaggcttcggagagaatagattgtatttgtttcttatcagacttaagttctgtgtggatgctaatgctgaaggggtataatgaggcatgtctgacctctctttcatcatgacctggactagttttccaggttgactctgaaatgcccttggtgaaaaggaggggtccattcagatggttggggggccttacaattttatttttgatttacagcttccaccaaatttgtggactatatatgagggcatgtaaaatgcatttctacataccaaaaataacatagaagaatgccacagaatgtgtgaaaattgaataagggatgctcacattggtgtatatagaattatagaatttcaaaaagagca

SEQ ID NO: 60995 - DNA, 558 bp, Homo sapiens
gtagttattataaactgaaattaaataaaaagatacatttaaaaaatatctcactctatatgttccctgtactctatttttgtctcctattcttatatattagtcagtgttctccagaaaaacagaacaaataggacaagcatctgtctgcctatcgctatctatctatcatctatctatctatctatctatctatctatctatctatctatcatctctccctcgcgcgcgtgctctctctatgcatctatctaatctattgatttattttaaggcatcagttcactcaattgctggcaagtgtgaaatttgcagaacagcccagcaggctggaaattccagaaagagttgatgttgcaactcaacattaaatcaaacatgatctagaggcagaattcttcctcttgtgggaacctcagtcttttcaattaaggcattcaactgactggatgaggtccactcactttatggagggtgacatgttttactcaattaatgttaatcatttactcatttaaatgttaatcccacctaaaaaacaactgtggctacatatag

SEQ ID NO: 60996 - DNA, 1910 bp, Homo sapiens
tgatacccacaataataacactattcatcatcaataatgaagatgagatgtaccctgttacattaaaattatctttcaatgtgtctaaatgttgtagtattagaaatggtcaagtgtcctcagagctgagactggagaatgacaccttctctttggggaattcaggtaaaaaataaacaagaatgtgtaattctgtaaagaacttgggcatggaatcaaattgacctcttagtcaattctttcaatgtaacatttatgtgacctagaaaaaaaaatcccaatctctaccttaatgttttcatctgaaaaattcaacagtaattactacctccaaggaatgagttgctttgaagatgactgatataatgtagaataaccttctgagaaagttttaaaacatgatgatttctctctctttcctggaaaaagattaggaggtcagaaagcatgtggttatggaagaatagttttcccatggctggaccaggagggagcaagccaggtagggtctatacatgataatcaaaatttgggaagggctagattgtttcatttgtcaaaagtcttacttgtcatagaactttggacttgggaattgaaactatgtctagtcacccagtttaaggttcactgcataagcttgactttgctatttcagaaaattcttgctctgagggaaaaagttgcaagtcattgtaattgctttaggagcttcctaaaaattcatttatctgaacagcttgcatcagtcagggtaaatggtaccttctcagagcactagactcatccaacaagtgtttgagcttgtacaaatcattttgtcttctggatctaccaaccttaaagtattgtattatgaaccttgcttgatcccaatcagatctatgcattgatggtccgccttaaaccaacctttcccactcaactttacaaatagtcttttccttgatctttcttttttgagatgttactgagactatcaaagtggtgatcttttcccaccataagcaaaaacatggcttgtgttatcatgaaattaatttggtgattttttaatggaaattatcagtcaataaacttcatcttcaattgcttttaaaatttgttgtttttgtttgaaatctgcatgatttcatgaaatttgaattatcaagagtgtaagtttgccagtaagagaataataaactaaagagacagagagaggtagaaaaattaagacaaagcctgttgaaagcatctaggaaaaagccaacaaattgaactgaagtagtggaaatgcaggtagaaagaagtggaagaatagagtgacagctaatggaggaccaatagggcttctgaaggggtaagacttagaaagaagaaagtagtgttatatgactctgaggtttcacgtcttagagatttggtgaatcagtgaactcattaactataacagagaatgaatatgtaagagtcatagggtgaggggggatgagtaataagattagtgtttaattgttgtatttgtaaagtctatagcagtggatctcaactgggagcaatgctgccccttatcttcagaaagggaacatttgtcaatgttgggagacatttttggttgttataactcagggtgcagtgatactggtatctaatgagtcacaagatagtggtttccaggaatgctgccaaacatttcacaatgcacagaacagctctcgcaacaatgaattatcctgcccaaaatatcaatagcaccaagatggagaaaccctatagagacaaatatagaacaaaaattgtttgttaaaacacttgaattaattaggtccatatcaaagggtgaattaaaaacagtttattataagcaatagaaaaatggtgttattcatgagaacatgttttcatgagagaagaacagactggttgtt

SEQ ID NO: 60997 - DNA, 1284 bp, Homo sapiens
gccagattcataggaaaatgagtcatgagtgatatttagctgaatgtgggaagcttttctaacattgaaatacatttgtagaatgttctcttttctcttctcttccctttttctattatttgagttcttgcattgtatatttattccaatccagacattatcatggtttttaactttgcacattctttctccttgataaatgtgtgttcattgatttctcttcaaagtggcatttccaatttaatgaatgagacatttactgtgtgacctttggaagaacacttaacctctctgggcattaccttcttcctctgtaaaatgaaaaagtgggaatcactcaatgatttccaagttctattattggatagcattttaattctgaccacaaaggatattttcatttgttccaaaaatatttataactgcacacttatcttggtaaattaaagtacaataaaatgaatacatttttaacagtcaccctaataatctcagatttttaaaaaggatatttgcttaagctctgctttccagacatgcactttatctcatctactgatgattctttcctttggggaaaggaactaatgcttaaaagaagtatttacataacagaagtcacagtctctactaatgcctgtccaaggacgagaatatatcagaaaaggaggctttgtcctatgttgaggttaaatacttaccactcctagggaaagcttacatttcttttgtgctatgtgtctgtgaatgttttatgaatccaattgagcttaagaatcaagtttctctgacagacacagtttattcagaggaataaagatacagcagaaagttattgatttttgagggatctacgccttgtgaaaaattaaccagacattccttcaaaatcaatacgattacccttgctgcttcagaactattacactgagtctgactaaagaatgtctccatcacagagggcagtggttggttttgtgggtcttttgaaaaccaagggcaggtgattttcccttattttttctctattttcattccatattttctaaccctctcctcgtttccacaaatgcatgcatgcataaaaatgtcttccagggccaggtacagtggctcatgcctgtaatcccagcaatttggcaaacagaggcaggaggattgcttaagtctatgagtttgagaccagcctgggcaatatagtgaggccccatctctacacacacacacacaaatgccttctgttttctcaggatccatctgaggctatgctgccttaagtagtga

SEQ ID NO: 60998 - DNA, 1716 bp, Homo sapiens
cattttcaagaaacattagccctagatgtaatttcggatacaaaaccaaaaaacaaaaaccttctcacccaaaggtcggccaccatgaagcccatgggcccagagggagtacccggtagtttcaggccgctcgcttatcttccttttaaagagaccttgaggcaccagtcctgcctccaaacgaaatcctattcggcgctaccctctctggaggagcccattcttaccctgcactaacaactgcacgggacttaacgactccaccacccaccaactcctccaaaagggagagacacagccaaagcatcccactggggcgttctctttcgcacacggacgctcccgcactccctggccctttctggagcgacgctccccgactgccatctccgcgatgaagacagcctgtgccccactgcctgggacgagggttccagccccggctacttcactacttagacctgtcactttactctctgcacctatactctctggacctccggatcctcatttgttcaaacctaactgcctgtctggttcgtgttaaacgagaaagcacccgccccagccccgcagcgggcccgccccaaccgcctgctgactggcaccctaggggaatgcggcggagagtggagccggtggaaacgcagggcaacgccgcgggggcttgtggggctggccccacggggcgggctcttgccgccccccgcgtatccccgcagcttgccgctcaccccgccgccgctgaccgcgccgatgccgtcgaactcccggcccagcccgtcggagtcgtcgagcacgtacgcgccgccgggcgccagcagcgcacacagcagcaagggcaccgcggcgcggcccgccgaacccgcggccgcagtcatagctttcgctcggcgttgccaggaagccgagagtagccactcagccattgtgtgggtcacatgactccggcgcccagggaggcgggtcccgtcgccgccacgatagatacgggcaggaggccgctgatgctgacgccgccgccgccattttgagtgcgggtcaagggcctctgacgcagctggcggagtgttgagaaaagaagcagcgagctttttcttatcgctcgcgtgtctgtggtcagctactggatttcacatgtacttactgctggcttctcttccggcgtcacctggtggagcactttaacgcagggaaggtggattccaaggtccgccaaaggaagagggccatgagtggccctaccatggctcttccccagcatctcagggagtatctacctcgtgcgaggaccaggcttggacaccaggtcccgattccattgtcatcttggtggaatcactttgcttttggagcctgagttttcccttatgtgagatgaggcgagaagagcagcagagtgagggactgagagaaaagttaataagcactcagtacatttgaatgcattccacaagtggcaaatagctgagaaggttctccagtctggtaactaccccggcatattcaaagcttttagccttgaaggagttaataatataccacctcaaaatatgctgctgtggcatattgactattttaaattaaaggcacttaaaaacagcaggtgcaagatcactgtcatggatattatgtgtcttaaaaggaggagatgaaattcccatgtgaaagatgtcttccctataaaataacattgttatcttcaaggacagaaag

SEQ ID NO: 60999 - DNA, 2813 bp, Homo sapiens
ttttatagcagcatgatttataatcctttgggtatatatcaagtaatgggatggctgggtcaaatggtatttctagttctagatcccttaggaatcgccacactgattttctatactttctactcttaagactgaactccttctaccagattattttacaaagccaaatggctcactcctggagagttgtttgatttggttcagaatccaagtctgttttcttttgaaatgtcaatacaggccaaccaggttttgaacacgtgcaaagattattgaaaacagattaatttttcctaagaaaggatctagccttgtacgaaggaactactattttaaatgactaaaagaagaattgcattgtttagcttgcaaatactatatttaaaagttactaaagatataaattcgaatcattgccaggtcaagtgaagttcaaatctgcaaagtgaatagcttctaagaggtttatacagagcttggtagttccctgttacatatttatgttgcatttttattaaagaaaagtgttggtaaaattagcatgcttccatgttaattttatcatgtctttataaattctctcaaaaccagatgcttggaaatggtaataaaaactactttgaatggagtttatggacttttctttttagcagtttgtccaggattaagcaatttttgtgaaataatctcaataattaattctttcagcaaaatcatgcaacaaatatttgcacagtgactaaatgctagtcactgttctgtgctccctgttcacaggggtaaacaaagggcaaagtctgtgctcttttggagatatggtctgattgaggggagaggtgattaacaattgtgtaatatgtatggactatgaggaaaagtgttagcaaagcaaacagggatggagttttattcacatttgcatcaccagcatctggggcttggaaagggtcttaagggatgaatggattaatgactcaatataaactgtacctgcagaatctctgatcagacagaacatttgctccaaagccattgaatgggctgggatggagcatgcatggttttagcttcatctcccacaactgtggctttgttctgtgttggtggcaggtggtttccaaaaggaaaagctttgggagatagaagtcctcgttttgacctctgccctccttgtacaccaggagccagaaaaacttcatctcttttacaagaaacattgagattcctgtaaaattaagaaatcacacaatttgatggtctacattatctaaagcaaatgagacttctatttggaacaaagactaccttgttgggaaatgagtctgcaagttaaagtgttttctggtaagtttctttggtccttagcttccttaaaggggaagtaatcattgcccatgggccccttttaatttccccaagttagtttatctattgagtcatttatgatagtttcgaattgcctcatagaacaaagtcagcacttcttgtttacgcatactgtgccacactggcagagttatctgggtcttctctctctcaacatttccagaaagatggtatctgtatcatctagactgtgtttgccctgaggagaaactaagacagacatgcccaaaggctgaactcaatatctttgtagaaattattaaaagcaatatcacctttagccttgtcaagaacctctaacaagaccttttcagaccaaagtgccctcaatatcagagcatgtagtcacccaccccaggttgaccccggaagtatgagagagctaaggtgggagccagaggctgagagaagaaagggggtgacctagttcatgccaaatgaatctcacaagcaagactagattgtaaaatcagcaaagtcgctcacagctgcattatgtcctccctgagctctgggcacttttgcctttgtgacctccttcctccaacaattaacattaaaaattgtattttattataaagacaaacataatcatgactgaatttattattacagatatgttatgattagagtaatttttattctaactttaaaagaaatgaaaattaaacatttttgtggaccccaggcactgtaccttctgtggcttatggaaaagtgtgccttaaagttggtgccttagcatctttgcctcctcttatttttcctgtgtgtgtcaactgtcactttgcccttctttgggacaccactttttacaaacgaatgtctcaggtatctaatacatttgtgtttccactgcctctcctgcccgctgacctgactgaaatattttggccagcaacagagttaggaggggtgtgattcccaatgcacttcccatttctacttcctcattgcccacttggcgctagcttttgctgccacttctccactgaaactgcccctgtaaggtcatcagagtccactagattgccaaactcatggatgatgggcaatctctaactttagaccttcctgttgcatttgacactattcttcatttaactactttttgctgagtacccacaatgcttcagcctgtgtgccaatttgggaggcataattatcaagtaatcagacaagattctggccctcataaggctttttggctagtaggagatacagataaataaacagcaagtacaatacatttggggatactatagaatcacctaattggaacttgagaaatcaagaaatgcctcctggagattacacttaacctaagacctgaaatatgaatagaagctagcctggtaaggggaggaagagtgtcctaggtggaaaaagcaacatacacagagccctagtgataaaaggaatagctg

SEQ ID NO: 61000 - DNA, 1419 bp, Homo sapiens
accatttccatcttaagcacccatacatttactaagagacaagtggatgtgtgaaagtaaaattagctttaatggcattactgggattttgatgcaagcaatagtgatttaatgctaactgaggaatggtgtttacatagtgctactccaaagggtcagttaggctgagtaattagagtcaccataaactagaactaaaagggacctttgaggccaatccctttattttataaataaggattacagtaaaaatccatcaaaccaaattggccagttgcctgattgcattgactggctgttccattgaaaggaccagtcatttattctgaataattagcctatttattctaaccttcctacagacactgctggaggcagccatgcaaaacaggttgcaagcccaacccaccgtcctaaagaagtgaggaagctcctggaaataacggacatcagcctcaatctctctctgggaaacgctattgcctaaggaagcaggcagtggccatttctaagatgacagatactagcaatggattggtaactatcgtattaggtgatgagtgattacagactttcccaccagaccaaggttgtaaccacatctagcgccactgagtcttacggcaaaggcagctgggcaagaaatgtgacctgtggctcctctcgacaagctcaaacccaatcagcaacacagcgcagcagaccatgaggctcgacagctgctgccacttcttaacgttagaattccaacttctctgtgccaagcccccttcggtttggtgcagctgcttttggtttttcctttcagacaactctctcctgcatcattagagctgtaggatacgatctgagttcccgcaccagtaagtggtttttgaggttcatttcgtttctgtgctacgccagagaaatctgtagctttctcctgtgggctatctgggagtaaatatttacctttgcaagtcactattacccagcaaagatggtcactagggtgcgctagtgaacaaggaacaatgaagcaggcagtcaacacccttctaagtatccctttatgagctgcttatctggattcggagttctgtgtgtgctcccagacagagttgcgaaatattgtaaggctgtcctaaagtgagtcagctgcaaaataaatcagcaatcaatcctgcaggatcaatgatctgattacatttctagtagagttcatactatgtcgaatcacagcaaccatcaactcttgttaatgtatcgttttccaatgattgggcaaccttccctatcactcgcagactgttaccaaaagatagagataaacttccagtcttttcaggcatgcattctccagattggtctgtgtaagctcggaaaactggagcttggaaggggtctggcctaactgcagtcagcactgtgactttt

SEQ ID NO: 61001 - DNA, 1042 bp, Homo sapiens
atcacattaactgtctttacttgtgactttgcatttattcacatgtatgtttcatcactccaattacactctgaactcagcaaaggcaaagactatgtccttgatgttgtgtgaggtctcagtcatcctacaagagtaggctaagcatataccacaagcactaaacatatgtcccataatatgagaaaccaaaggccaacatgccagaaaacatttaacactgggttctctcctagcttgtcaaacatgaaacttggtttaggaagcacctgctcactacgtaattcaagtggggttcttactgcactcatcacaaagactgagttttaatagctttcctggacaatgaacctggctcatcataagaatgcatctttagggtattttaataagaaaattgttcaatctggattcattcctaatgcttcttttaaagaactcacctatgccttcaaatgaattgaatgaatggagtccagaattccaaaattcagaaggttttggactgaaaattagttttatttatcatatgttttaaataaataagaaatcatttatcctatattaggcttccttttctcaatctgttaaggggttctctgtcttcatctgagcaaatatagaccagtggttacaaatacggactttggattcagtcagatctaagttagactctcaactctaccattcaccagctccaggaccttgtggaaatttatttactcacatagcaaacattaatcgaaagctaccatgtgccaggcactttgactgacctccctaagtctcagtgttctgagaatgagaataacattccttgacagtagaggcattgtcaggacttttaatctgtcagaattaaatatgataatgtacgcaaaatgcctggcactcttccaggttcatagtaacaataaatgttagttatcactgtcattatcaccatcatcatcatcatcattatcattatcttgagtcgttgtagagcctttagtgctgctaattaagttccccttcttaaaactctctcctcccttgactt

SEQ ID NO: 61002 - DNA, 1469 bp, Homo sapiens
atctgacgttatttccaaggattcaaaggtaactgcttcaaaattaaacaaattatagaaagccatcaataaatcaaccccttattcatgttgcagctctcttccattataaataaaaatggattgaaacttacgataaaagggaggcagggacaggagcggggaagcttggcgagcagaaaggaaattcaaacttattattaaggttaagaattaagatgtaaatatgtagatgtttttcacccctaggattttcactaatccaaaagttcacggactgctttgaaatttaattatttggaactggttaaatgttaccctgacctcagctaacatttgtgtttcacttttctccgggacccaggggacgtggatgccagatgagtccacctcctctccctgctcttcccgcagggacagagcctgccaggtgctggtgactcggatcctgacaggaggtcgctctgcggaagactggcaggatcccagagcaacagactggggctcgatgccccttccccgccaggtctctccgtccgcaactgtcctcctagtaccgggtatcccgcaggcggggctgcggaacgcacgtcccctgcgccgtgacgtcacaatagcgactcactggacccagcccttagcaacggcctggcaacggtttccctgctgctgcagcccccgtcggctcctcttttccagtcctccactgccggggctgggcccggccgcgggaaggaccgaaggggatacagcgtgtccctgcggcggctgcaagaggactaagcatggatggcagccggagaggtaaagggcagctgtcaggggctaccgccgcctcgcccctcgctccaggcggcgctcccagcctcgggtccgggcagctgagtgcaaggccgccccttggggcgcttcctacccctggctgagtcgccagtgttgcctggagctgcccaggcctgcgcaaaggaagagggagagcctgcttgccagcctcgcaggtccgcttctttgccctgaatttgtcgccctgacaccaggggcccctgtctcctgaactcagggtcgtgcagcctttaaaacctcagtagctcccaggcagaggaaccaggtttggtctttggagtcagacctccccgggccccaaatcaaacccctctgctctccatggagacgaccctcagttttcttatctcttgaacgtgagggtcaaatacccaggccatggagttcttgaggattaaatgcagataatatagagaagatcctggcgcatttgaagtggtcagtaaatacgaaatctcccagtaacgaactacctcccccaaagctactgagtaacccagggtttctgtaactttctgtgaataggaatcccctcagggtcatgttaaaatgcagattatgattcagtaggtcccttgggggtggctgagattttgcatttataataaattccaagtaatgcggtg

SEQ ID NO: 61003 - DNA, 567 bp, Homo sapiens
ggagcatcacttgaggtcagtggtttgtaatcagcctgggtaacatagcaagaccctgtctctagtatataaaacaaattaatgaattaattaaaaagataagaaaactgtatttggtacctagaattacgggaaagtactcaaagaaggacaatttgaaagagagtttctcccaaagactggggttcagacctcattagagaaggcgtgattgtgcacttgcccaaagcttcatcaccgaggagtgatatcggaggcttcacattccatgggaaatagactttgataaattgcttagccaagtcactaaacaaacaagtgaacaacaatgaaaacaagctcaggagaggattctgtatctagagttgctgcaatatattacctaaaatgttaacttttcaacaaaaagaaattgcaagtcatgcaaaaaaacaaaaacaaaaaaacaggaaaatgtgacctatacacaggacacaaaggaggaaccagaaactatgagagggtagatgaattaaatcgtcttatttctcccctcaattctgttaggtttttttttttcctttctct

SEQ ID NO: 61004 - DNA, 673 bp, Homo sapiens
ctctcctttccttgttacaaaagatcagaaacaaaacaacaaaaacattaaaggtaacatcactacaagaagagttcacagagagggtaaatccatcatttttccctttaattattcctttgtgcctagtgaacccataagttacccaacatgcagtaaaacactctgacatgccacatatgagaatctctttgtaacaccgtggctaaaaatgtggggcgagagggcaaagtttcaaacttatcttctgacttcaaccttagtttcactttttacatctcactagactatttcctaaaaacaaacggcatgtaatttctcacctggtaatctcctgctgcagctgagaaactgaaggcacataaaacaccactccaaaatagacggtaggttccaatgcatatttatccagctgcttcttcaaaggtttttccaaatctacccaccggcgctgattttgcttgttgtagtaccagaggctgaagtaagtgacctggaaagacagaaggtcattgaaggaggcaataacatacaaaaggatttcaatgacttcagtcgcactaatccctgacctgtgaccaaatgacagcagtctcttattgcctttcttctcagagaagaacaacagcaaaaactgaaggaaaaaaaggaggtaagacctatctgtaactag

SEQ ID NO: 61005 - DNA, 394 bp, Homo sapiens
aaaacagaattataaaatttctggtttattgtataatttgtggttgtaccttttgtgaatggactgtaatataatttaaaaaaataacagctgaacaatctgctagcattctgttaaaaagcacattctgaaaggaaaactgttaaaatatgctaactttatcagtgcatctattactcatgcaacatgaattagaaaatcaaatagaactgaacaaatacatttgttgaaattgcatcataattagtttttcacaaattatagaccatagaagagagtagcgagaactttatctaaaggtacaaacagctgaaaagaatggtgggcttaggccgggcgtggtggattgtgcctgtaatcccagcactttgggaggctgaggccagtggatcac

SEQ ID NO: 61006 - DNA, 508 bp, Homo sapiens
tcagtatagtaacatgttggacaggtttattatagcctaccaggactaggccacagcacatagcaggtgtgcagtaggctataccacgtaggtttaagtactccctgtgatgttcacacaacaatgaaattgcctaacgaatttcttagaacatttccctgtccttaagtgacacatggctgtatttcccccgggtgacaatgcctgagattccaatagctgccactagcatggtgtggtacaaagagcactagatttgcaggcaaaaggctcggcctttgagtcctgactttaccacttgccagctctggaatgtctcacttcctcactgagtctgtttcttaatagggaatttaacatgtactcttccttcctcaaaattgtggtgaagaactttgtaagttctaatcgtactgataatactgaaaagcactcttacctttgtcatggtacctatatttagcagataggatctcttcaggtatgacagaaaatagaataaaacttg

SEQ ID NO: 61007 - DNA, 1188 bp, Homo sapiens
ccgaggaagggagcattgacgccagcgctggggaaagaggaacgccgttagttaagcaaacgtaacgctgggctttgcttgtataaagaaaagccagtcaagctgtggccaaagaacaagccgtccctctccactggaaaaaaggcactaacaggacccggaaggcagggtggaattttatctcagagttgtgctaggctcagggtcagactccacccttcactgtatcctacaaatagggatagcaaactgggccatcctcaggattaaatgagataatagccagcactactataatcccaaattttgtagttagtaattgtgatcctcttcctattttggataaggtgttgttttttcataggtaactctttcaggttgtaatactccaaatgtcagagttctttagtccttaagtgagaaaagtgccaaatggccccaaaagagctaggtttcagtcccaatccctttagaaaattaaccctgaaggcaaatgggaggaataatccccactaagaaaggcaggtgtgtgattcaaacccggtgaggtgcctaacaagcgcttgtggaagtatttacgtcatcaaattgatttactgataaacatcataaaagaccctacaaatgctcgttatccatttaccactagaagagtggcagttctgaaaatccagaccccggcccctctccagggtggggacgcccaaacaggccttcacctaagcggagccgcggcccagaaggggaggcgggcgaggtcttccacgccatcctgagttaatgagcggccggaggcaacaaacccaagaagcccacggggccttggagcactcaggccccggcttctcccgcgtcctccccttgggaagagcacgcggcgttgccaggccaaccagtagactcggaggccccggaaccctctttctgcagccgcgtttctggacggacgcgctctaaaaggaccggtccctcggctcccgaagggaacatttaaagggaccagcgcgtgccctactggcggtggagaggttgggcgggccccataggatgcccgctttggagccacaggacctcaaaatacgctccttacaacgtgttttatagagcgaagtctcgctatgccacccaggctggagtgcagtggcgccatcgtagctcaccgcagcctcgaacacctgggctcaagcg

SEQ ID NO: 61008 - DNA, 1868 bp, Homo sapiens
gatgctccagaataaaatgccctagaaacgaaacggactatattcagagtaaaattactgtcgtgtcccaaacttaaaaaaataaataaactgtcagcaactattaggcatacagcagttgtcacttggagcacacgaatgttctgaatgtgtttgtgagcatacgctattagtataaggctttctcagcaaaaaagaaaataggacgagcatgccaagagcggccaatctaatcaggatttgcagaaatcacaagtcggaatttgcagatccaagaattcttgtttccagagtaaatactctactccaaaaacaaacccaggcgttaccaaacagtccttccctgcgccccttctcgccaaagttatctggcgaatttcacgtttatatattctgagaggcacaaatatgcctaacacatttaaaaccctgatccagaattaacccgcaacaatcggccagggcgttcggaatagaagttcaagactccttttagaaattactcaagtatatgagagcgaacctgaaaaacaagacttttctctttgttacgctcccgctacgggtctggccgccgcgccccattctccgggattccggggccgcgggcgcgctccggggtccgggcgagtggacacaccccaccgctcgggccagccgcccgcccctcccgccggccggggaccgcgccctcacctgctcccgctcccgctcccgcatcctcggggccgcgcgccccgctcagcgacccgcctcccggggccccgccgcgcggccgccgcagccgcacccgcacgccagcccgggccgcggcgcgctcatggggctcgcacgcctcacttcctgtctccaaaaacccggctcgcagaccattcccctgggcagagtccggcggtggcgacggcgaggggcgaggcctggaggtgggaccggccggcgaggagcgccgcacaaagaagccccgtgggggcggggggtggcaggaggacggacagaccgtcggaccgacgcgggacgcgcggccggagcagcggggcggccgggcccaggcgtccctccccctgagccgggcgggcggatccggggaggcggcggcggcccgtgacctcagagagttggaatgcgggcagccgcgcgggggaggcgcggacagctgcgcccggccgccggggagggggcgcgccgctgctttttttaatcgtatgaccacttattttaagagtttccaaataaagcaaggcttttaataaaatgagtggagggggtattatttaggttccagataaagggttttattcctgtgttattaggtaggctgtaaaatgctgttattgatggttattcgtttactctggtatatttctgaacactattggaatacatttcttcttttcctgcttgctcctaaggttatgccccatataactagacacttccagtactgggtgggaaagcccccccaccaaaaatggttcatatgcctcaaataacctgtcagtccccaaaagggagctgtctgcttatgcaatatagagcagaactgttaaggatggagacttgacaaagttgtcaaatcccagctccaacatttactagctggatgaccttgtgcaagtttcttaacttctctttacctgtttcctctcctataaaagagggatattaatatctttgcacagcaggggtgggggaaataaatactaagcaatatccaataacttgtgtaaagtatatatgaagtgtttcgtttaaggtttattatacagtattcttgtactgcattattactgtattgcagcacttaagctgaggaataaaactgtgtgaccctaccactattacaatagtgtaagatcttttcttggcat

SEQ ID NO: 61009 - DNA, 1135 bp, Homo sapiens
aatgaataagcggagggccagcagagagactaacgaaaggtccccgaggtgcccgggaggcggagctgcaagaccacccgcacgcgcacgccgccgccctccttgcctgagcacaggtttcgcgggtagaaggcgtgcgcaggcgcggacacgggcgcatgcgcgttcactccggcgcgcagtgccggccggggcggggatacgccgtgtgcgcggccgggggcggaacggaggaggaggcggtggtgtcccggctgcggggtaggagtccgcggcagcctccgggtaagccaagcgccgcgcagtgctgagttcccgcacgccgcagagccatggagatcggcaccgagatcagccgcaagatccgggtgaggcccgtgccggtcgggggtgggaagccaggtctcggcgagcgggcggttgtcaggagtaacggggactgtgggcccgggtggacgccgcggcctggcctccgctggacgctcctggcgggctgcggctcctcctcgtccaggccgcctcggccctggggacatttgcggcctcggagcgtggctgcggctgaagtagccgccgggaaatggaaggacaggcgcaggcccggctggagccaccaccgcggcgcacggcgccgctttggatccgctgcgggaggtgggcgccgcggggctggggctggagctggagtggggtgcggggtggggggcggtgcaggcgaggctcctcccagcccccgcccgggggatccgaggtgcgcgcaccagcaaagtggcctcagccgctgcagagtccggtcttgttttcctagagccgcctttctcacatgcacgtttgctctttttctctcagagtgccattaaggggaaattacaagaattaggagcttatgttggtaagtgtttttttggttgttagtcttacagaatttagagtttgcagctaatagaattttagtgaatgcgtatttctcaccgtactttggacattgggagagactcccttctaccttcttcaaatcttatactccctggttacttctttatcatctttttgcaaccttgttttttttctcccaaacctccttctgttatggtgttttgaaatttagtttcctccgttaaggctctgtttgacc

SEQ ID NO: 61010 - DNA, 1750 bp, Homo sapiens
atctggaaatacttttagctatcatttataaagatagttttgttctcagtttcactataaattatagaacaaatgggaaacaagggtttaatttagttcagccattttacaaggaaataataaaatactaaaatctgattgttttttgctatttaatagccactgcccagacacatatttaagagtttaatctttcagttgctatggcttatgaacaagctaaggttgaccataaaacatttgttggatgacgtggtttaaaatgatcaccacaaaaagggaccacaaaaaaaggaaggaaatgagcatggttggcgattggaagcaagggtaccagagggcacagtgtgctttggcatgcattttatacataaaatgaatggaacaaaaggtgccagaagtcccaggttacacaatcaggagcttagatactgcacacaaaaataattatctgggttaaaaaagtaaacatagggcagattctatatggcctatcatgtttcttcaccttcccctcgttgctggctgatacagcgaggtggtcagctgatgactacttagtcaatatgacctttagtcgtgaaactgacagcagcagtgattaaggctgacttaatcaggttggccactttgaaggacagaaatgcagtggaaacagttttattctatgtagtttacatgcttaaggttacagagtttctacctgcactgtaatggaaatataatttctctgtagccaaaagctggcaaacttgacccagagggaaaatttaaaactgcagcaggctcaaatgtagagtatttttctttttatgggcaggttgttcagggatttttttcctcctttaatttattgactgactgtaaatacatgagtagaaacttaatagtcatgtatttcaaaatttggcttaatttaggagaatccactgatgaacaagtaccaacttacgtttcaagcttcttagccccataatcagtccttcagccacagctatttagagctttaaaactaccaggttcaatcactggttatgctttctgtgatgtaatttagtcatttctatttttagtattaaccaagtattagacacagaaaataggtattaagaatcttcatatatcctgtcagaccaaatgggattccaggaacctaaagcgatctattatgctataaagataattaacacattaaaaactcatagggtcaatacagcatcttaaacctcacacttagaaaaatatatttttaaatagcagtctacataattttcaatcttcaggaaactacagataggctagacagcgaattcctgaatgatgagtagtgatctttggcagcatttaaagtgaaaagaaataaggatctaagaattcagccctaatccactaaaaaaaggaattctaactgacaagtttttacaaatggagttgggctcattcattttggaaataaacctatggagtggcacacatctaaacaaattttcccaatagaaaaaaggctataaaaattttattccaagagtgattaaattgtataatgttgtatatgtgaatttaacacttttgtttacatgttaaacaaatgtgtatatattagactacattaaatatgcaattctttcttccagttaaatactgttgctccctaaaacccttacattgtacaccattgggaatgattgttcatcatactacttttccattagtgaggctacagttatgttttaaatgtgcgattacagag

SEQ ID NO: 61011 - DNA, 1017 bp, Homo sapiens
aaccccacacctctccttccatgtgtccctataaagaaaacataggatcaatttagtgtatgtgtgtgtatatttatacacagttttatttagaataaagctaaagataccattcaataatatatgataataggataccgaatagtgagtaaatctatcaaaacttttctgtttatctttgggaaacacaataaaatacctctgtaacaactttagctccacaattaccatataatcaagctacaattaaagttagcttataatcctaaaactttctctgggtggagagaataggaattggctgctctgcaatgttaataattgccacacaggaggtactttcctgcatgagagagtgaggagctccacagacctgctcaccagtgaaactagtaaaaatcaattaaaaaaaaaaaacgcaagcatttaaagtctctgaaaatagttccaaggagatgcaacaaaggaaggaacatttactcaagaaaatctgttaaaatttgttaagaacagtgagagtctacggtatttaaactgagatccactcccttcctccctcctcatctggttggaaactccgagactgatgcaaccaagaacactaggctctctctccccccagctcgcggtcagagcactatctttccaggtagggcaggatgtcagcatttctcaccctgccctcagcctcctgttgctgaggctaaattcttgttgagctcagctgacaggtgggagataacttctgcccagcccctcctccagatggaggctctactttggatgtggtgcctctgagaataatggggtcctggggtaacccaggaaaagctgagactactgtcccctctccccttaccaagtactcagggcctaaagcctgagatactcaaagataaggattccattgacctcactctcaactccagagccctggttcagagattctgcctggagggagaggcaatccagaaatccagatagctcctaatctcttctcaaaggaactgacttcat

SEQ ID NO: 61012 - DNA, 1727 bp, Homo sapiens
caatagcgatttaattttaagaaaatacaaaagtagcttatttaggagtattttaatgaagatgaagagaactggaaatcagtgaagttttcagcagcctcttcagataagacctaccttaaattgccttcaggtgtgcacattttaacatccagtgaattgcctggaggttgcctggggtttctgctgattatagcaggcggtgaaacctgaactaataattacggccaggaggtgagagcccttcaggacgccaccctgggcgcgctccccgggagcagcccaccgcttgctgtgcttccatcagtcctttattaggtaaagggtttccccccaccccgggtgctttaagaatgcgtttaataagaaatttctcacaggatctaacggaataaagtgccaccaaaataaccttttcgcagttttcgtaattgtgatggagtgggaaaggggacaaagccgtcaaaccgggtgcccggtggatccgcggacctgatcttcctgcacggacccgagagagagtccctagacgaggaagaggggaaaggcatttgtagggtgttaactggtggactcgggaccagagagacagctgcggattcccctcggggtgatgctccgtgcaggagcggtcacggcgtccagaggaacccgcgggtgcaaactccgggagcggcttgcagggtgacggcggcggcccccgctccccggtacctgatgatgtcgtcgctgtggccccggtagaacttctgcctgtgctcccgcgggctgtacaccacgccgacccccgccacgaagtatacgatctccttggccgcagtgtagtagaggttgttgcggcactggtggccccggtagccgtacacccactcgagccgcaggtggcagctcggggcgctccgggccgccatgtcggggcgcccacccgccgctcccgctcgggcccgcggcggcgacgggaggcggcggcggcccggcaacgaaagccctcccgctggctgccgggacttcccgccagccgcgtcctctaagccgcgcccgtcaggtgcatctcgtttcgggggccgccgccgcctcagcccacaggcgggaggaaaaccctcgcctcgcggaacatgctgagggccgcgagcgccgccggctgtcaagtggatgcccagagcccttcgcccgcctcggctcgcctagtctcctcagcccgtagcgcctgggccgagagcgagggcccgcctccagctcctcagccgccgcccgcgcacgcagctcccagccccggtcacctgcggcgctcgcgccccgccgcggctttgtagccacagcctggcggacccgcgccgcgcaccccgaaaccgagcgagccgagccgagccgagccgagcggcgggcgcgcggccttgcgtggccccgccccctcccgcgctcactccgcccctcccggagccgagaagaggctggagttcgcggggccacggtctagttgcggagtcgctgggaccgcgtctctgcaagtgcgcgggccggtgagccctccctcgttgagctgcttaagcccaggcggaccctcggcgaccccgggctcccgctgctttgcgtcctcaaccgggaagcacctgccggttccgcacggtccctgcacccagcgtaggccacgtttttgcctgggaaaatccacaccgggatgctaaattctcttttttacgcttgataccttgtgtgtcttgctgcct

SEQ ID NO: 61013 - DNA, 1399 bp, Homo sapiens
tgcaattttaataatttctcttctctgagtctatctcagtttctcatctgtaaaatgagtaaaagcaaaccacttgcagttcagatgttgagattcggtgggaaggacctcgagaaacagcggacaatttcaggatttaggactttaggtcttgatgggtggatggtactgtggaagctgtttacttgtttgtatttctagaatcggaaggtaaagcgaaagggatggaaacgagcgaatggaagaagtaggacagacaccagacagagatcaactccagggactcttccggacctgcagggcaggcagagcattcggttgctaggcagctgcgcctcctgggagggtgggggaccccaggggcaggtgtctaactcactacctttttgtttagccgcggtgccttcttttcaaaatcaatgaaacctgtagcctttaaaagtagacatctttttccaaccaagtttaggcaagccctgtagccgagttctgcttgcggttgtttttctttttcctgttctcaggcgcgctgcgggcacctctcggacaaggccccagccgtcgcgggttgccgggcagagtcggacgccgccagctcttcactccacgcccacctctctcctggagcgctgggccttcgctggccgcaccggcagccatgagctcggagatggagccgctgctcctggcctggagctattttaggcgcaggaagttccagctctgcgccgatctatgcacgcagatgctggagaagtccccttatgaccaggtaccggccagctcccgtcagcctgtgcatcctgacgctgaggctgcggggtctggggcatatcccagccccgggttgggaggccggggaggaaggcccgaggcggggctgaccgttcggccctcggaggcgcccggagcgagaccttgtggagctgtgactagcgggtccgctgtccgccacgtccacggggatagcaagttctgtgccatgaccgccccctcctcacaattttcagcctcccctcccctatacgtgtcccagaatgagagccctgaactttacttgacgaggaactttgataattcgtttatacttgcatattgatgggctttaagctctcagcgtgtgcgttgttaatttctaaaaaatatgcataaacaaagatctgtgactctccacctcctgttaacatagctgccttcttccttttggatcgaacatgtgatcctcccacctcatctttagactgttgtccaagagtgaaggaggccatgagtttagcttgaggcaaatatgcaaattagaagaatgagaatctaggagggagaaagatacattcattatttaaaaaattacctaggcaagggaagctctaattgtaggagggagaaatgggaaagaaag

SEQ ID NO: 61014 - DNA, 1788 bp, Homo sapiens
aaacctctcaaaaatgatttgttatttgttaatctttttataagctggtccagggagcttcaaaaagataacattttggtcctgatacattagcttattgagatgaaggccacctctaagactatttatatgcatttatttcgcctttaagggatactattttggtgtagaatcatcaaaagtctttaattattgccttgtattttctattaggatttctggattttatttttgatagtcaggctagccagagaggtatgatgtactatgcaacagcatgtttcttcagagtaatacattttaatttggctacaaaagaactgaagggtagattaaatataataatatggtgtttggtaatggggaagggttcttgaagaatatgggttctcaactgctttttctagacacagaatggtgagggacagaggccagccggggtctgtaagcatgaagagtattaaagttcagatctgttaagaataaagaaagaaagataactgattaatttattataatttcccttttttgattaaatataataggaataaccaattcatagagaagcattatctttttcaaagtgttctttaaatcgtgactgaaaaagtggttaaaagttgtaagatataaaaagaggaaatgcaaaacagtcctctccgtacagcactgtgacctagagagaatgtttgcttctgcagctcatgttgatcatcctgatcagttgcttaatctgtttactgttctttgtgttccatatgtcagattcatggctttaaaaccagtcctgatttttagctccattataattaaacagttaataaaacgtaaaggtttttcaggcagtgggatttttaaaagacaatatgctttcattaatggggtaggtgtctggtagattttcagattattaaaatcggtgattctgagggtgggacccattagctgtgtatcagaatgggagaaagacttttttctaacttacattctcgttttgccccaatctctgcttataatgagagatgttacagagaggagggggttattattgtaaatggtttgaaggaggagaaatggctgaaaatgactggcttagatgaaagacatgaaaccagggctccccaatgagctgtatgttagtagttggttgagacagtgatttggtgatccaagccaaagaacatatcgtgtgattatctaattggtttcctctttggggccatggagacttagccagacttaatcctttgattctatacgctgtggggcaggtcattttatgaatttgtattcctgctgaattacacagattacactcccacttggctgcgtggtcactagatctctctaaccttctgaaatccatcaattcctctattctcttaaactttttcccccttcttttattactaaattttgaacaatgactcggcagtttaagctgaggagactcattagccagcataagtagtggtggtaattagaaagttgcattcagaattatctggagatttaattccctaaagtaacagaaacaagctaagaaaatgctgaaccctagggtggaaggaaggaagcaaacagatgtgacttgaagttgatgctaatgggtattttctggttctaggaagtggcactctactttccatgtcctgttacccactttgagggagattcagaggaagttttaatttgatcttccatcactgggagtcagttctgagttctgaaagggggagtaatagatggtttggtgcttctgttaagcttatacttgaataagtatga

SEQ ID NO: 61015 - DNA, 579 bp, Homo sapiens
tgaaattatctctagctttactttcctgctgggagagggaactgctgctctcgagcatcagagcatttactcatggactcactcccagccatccatgccgtcattcccacctctggttgcagagaagacagcattctcctgctctgcctaaactcatgactcatccctttgttatctgtattctctgactcctggtctctgttggtgttactgatcaaaacagaaattgtaggtggataacagtgttggtggggaaaaaaaaattgagttctgtttggagcccgttgtgtttggggtgtctgggggtcacgtatgtggagatgtccactgagcagctggtgatcctggactttaggaggaaagtcatctagtggtctggtggcaaacctgttccctgaaggaaaacccccttgacttatagcatttgccaacttctattgtgtaaatatggctaccatagctaatttcagctgaccagtggtttaaaaaccagcttgcagatttcctaaatatttaataatcaactcttgtgaaaacaagctggcacgagccagctccagacaccactagaagttgaga

SEQ ID NO: 61016 - DNA, 720 bp, Homo sapiens
agttccagtgtgcagtacagaacattataggagggcttttaagcagaagtagcttgaaattgtttacattcaatattttaaaagatcctaatctcctcaaaagcaagaaatagatttacctttgcatctctcttatttctctcctgtcttcttgtacccttagcccagttttcaaatgaaatttaaggtggcagtgtgccttttgccccagaggtataaaaggtcccaatttatggcatttaccaatttctgttgtgtaaatatttccttcatggctcatttcaagctaccataggatgcgaactgtctgggaaaattctgaaaatgtaacaatcagctctcatgagtcagcatgagctgatgccaacccaccactgataaggtaggactcacataccaagggatttcagagtacaggcatgtaatttcaatgacttaggtagaccaggtggaaggcacttgaaagtgatggggaccgtggcaaattggagagcaaatgcccatctaatgacagtcaaatgtaaatatctggggaaacaatgcttgaatgaaaaactacttaaagattgaatgcagcctccttaattcccagtttaggcgattgattaatgattaattaataaaattaaaattctaaaactggggtatttttccctattatatccttttcccaactatttgacttgcaactcaggcggaggggtttcctactaggattta

SEQ ID NO: 61017 - DNA, 2537 bp, Homo sapiens
actcctgctgtcgctctggctctggtagtttccagagattctctccaggtgggagcagaggcaggaacttctccatgctggtgtacagatgctcctgcttgatgcaatcacttgtcttgaaaaggggtcagattgtggggtgttcattttggaagcaaaataggtgatgacggagtcattgtcacaagggccttcagctccaaccctcgtcctcactcccagtctggctcagctgatctaaggatgcattgaaactttccatccttgagtggtccgtggaaacagagtatgcccctaaacccccctccctctcagagatctcccatagatctctggacgaaagttatgagtagatctttgcagatttcatcacattgtgaaaaacaaggcaggtcaatgctaattgagtgaataagttcaaattctgttgcttgtagccaaaggcaggccacactgcttttatcctcatgagaaccctatgatgatggtcctatcgtttccattttacagatggtacaattttctcattctcaggcacttcaagccccaccttgtgctgatccccacttcagtacaccccttgctggtctgcagcaaacctctcgaggcatctaaagtgcagctcatttttctctcgccccttggcctgatcccaccttcctggcttggcctcggcctgaccagcagcccctggtgtcagcacactccccctgtacatctcatggctctgggcttcagccaccatcatcttggctttcttggctcatggccgaatcatgatgctgccctttgccctggtggcccaaagagatcactcctgatgaacatgatttatcctgtgaatcataaaaattccccattgcctgactctggcttggcaaggccttatagacattaaacctcattaatccttattaaagccccagacggaggagttatttataacccgtcctggatacaaactcacagacatgtgggtctatgggtatttttctgcttcaatgggcaaattgtgtgtgagagccagcttccaggtatgtaaacagcaggcattccaggctccactaaccaccgctcatgaagttgggtaagggaggtttcccaacactggaaacatcataaggattacactagagtaatgtcaagagccatctatctacactaactccctgtaaactacttgaggccaggaacttctgttttatgtgtctccataggccctgtgcccaacacttaaaaatatctgaggcatgagctgtcccagggaagtcaggtagatcatccgaggcccgtagcaggtgacagtgcagaccagagccaagaattctggcctccaggtgggggcctgcctgggagactgaaccccacctgtgataaaaccagtgcttcgttggacaggatggaaaccttcaagaggcgtgtgattctaaagaagattcgaacccacttgaaggtccaaatgctagatctgacagtgcagtcaagtacataagttggagggtgtgggggctgcaaacccgagagagtaagagatttgcacttggcacctttattcattcagcaagcattgatctcactcgtttttcactgtggaatgagatttgcaaaggccttctcacaggttttgtccaggaacctatgggaagtccctgcaaagtagaagggtttaggggcatcacttcttccatggctctcccaaggatggaaattttcactggatctttagattgtctgatccagacactgggtaattggcggggggctcaggggtcatacagccaattctattgtcaactcccctgcctccagtatgtcccctgaatctgaccacctctctctgttgcccctaacctgatccaagtcaccaccccctctcacctaaatgacttcatcggccacctcattggtccacttgctttcattcttaccttttgccatccttcccttgcagagtagccacagagacctttggaaacaagtccaaatgtctctctcccctacttaatatcctctaatagcttcccacctccccttagctaaactccaaacctcttcccatggcctaggagaccagctatagcctccttctgtcacctctcctcactctctacactccagccacactgcccttgtttcccacccttgaaactcactttgttgccctctgcccagataatttttcctgcagatctccctctgcagacctccaggtgcctctggctggcaccttcttgtcattcaggtctcagggcaaacaccactcccaccaacttctaaccctccattgctagaaccgaatgttactggattttatcggttaacatatctgttctattctgagcaaggatggagcaatgtaacagtttggttatattgttttgtactgtgaggttcatgggagaaggatccttatctggtcaagtcacctctgtgtcccacacttagaacagtgttgcttcacccatagttattcaataaatagctgttgaaagattgaattttcctgagattcagtcgtatcacaggtcaaaatgtat

SEQ ID NO: 61018 - DNA, 2788 bp, Homo sapiens
gatcaagcctcagattgcaaggcagaattgacagcctcagcctactcaaagggagatctagagtaaagattatccactggagcagtcctgcactgggcagagatggccggctccactatcccgccatgctcggtcattgcctgaggggtgccctagaagagggcttcagctctaaagctacttgtagtccttgaagctgaatggcagttatttcttgaaaggtgatatgagtggtacaccttcatgactgtcacaaatgctctataatggaaggggaagcacctttttttttggtgatcaggaagcctctttgccatagtggtagcgggcagatttgaacttgactccagaaccatgctggcgtgacttcccccaggtgctgacctgcctttcactgcccttgaaatgtcccactgcctcattgtctgtggcccattaggggactttttaattttactccccagcatttattccttttttttttaatgaaagcctccatttttgtatggaaagcccacccccaccccaccccaattcttagtccatgtggtttggttggccaccttatctccactgatccagctctatggttattcctatcccttagccagaaggaagctttccgtgttgggcacatgacctaaccagggacagggacttctgctaagcatgctcatctacaagagggtgactcagagaggatgcaggctggagttgtgcagccatcttgtcactatggtgggggagcttggagcagctgggaccactgtgggaagcatgagggtgaagccaacatggtggaaagcagatctaaatctggagagaaaccgggtcttacggagtatgtctgagcctgaaatctctgtgtctgaacccagacgtggattcctccacgtcttagtaaaaagtttcctttttactcaagccactttgaattggtttcagtccctttcacctgaaagtgtcctaataaagtccaaccatcagacctgaaacacacccagtttagaaatatttattttcattgtagttactaaagtccctggagccaaccatcagatcagtcccagatggttaattagcatcagctaagtgctttcaaaacaaaaaacggtattttaattaaatccatgcaggttcctccaccctacactgccccccacccccaataccccaatacacgcacacttggtatttcagaacttctgcctacattttaactgaggtctcccttggaaaaaacagcaaataacagaaatgtttttaactcagtttcccaaatggactctgactccttgagggcaggagtttagggcatctcatattcccagagcctagcacagagccaggcaggaagcggtggttcaacccatcttagactcgacaatgcccagctggtgtcctcagccttgaggttgagtggcagacaccttcccacgccctgtctggctgtgtgcatgactcagcagttcctgtagggagaaggtcatccagggcctccctggaaatgagtaagcagtatgattgggtaatctaaggctgcctggtgaggaccaccagcctcctcagccatatgccactctcctccacttcctgccccctcctttttctagctccttccccctcctactccttcatttcttttctttctcctttccaagtccccccacccttacccacaaacatgggggttctcccataagccttgcgtgccctggtaattgtcctcagggctgtgcttgaactagtcttgccctgcaaatcaagacatgtgacacagtgattccaaagggggtatgacctgtatgaagacagatttcacaaggaaggactcttcactctggaaaacaaaaactaaaaagcagcatgtgtaaaagtatgatgggttattagctatctgtttctgtgaaacaaattatcctaacacttaatggtttaaaacaactattatatttattgttgtccctcatttgggggcatcaggaatttgaagggggcacaatggaacagcatgtccctaattcatgatgtttggggccttggctggaaaatgccaaagctggtggctggaatcatcattgtttacttacatgactggaggttgaggctgactgttggcagaaaccttagctgcggcaattggctggagtgcctacatatggtttctccaagtggacttggcttactcacaacatagcggatgggctgcaaaggtaagtatagagagagagagagagagagagagagagagagagagagaaatagagagcgtcctaggcacctcccttgtgttatcccagtcccagctctgcagcctcaccagacatttgctacaaacccattgacagaattcccaggtcccctaaaaagcaggacaaatctgaaggaggttcagtgcagggataatggggcatcccttcccttggagccatagaacctggcttggaatccaggttctctttttcagctctgtgactctggaaaatttcatttcatttcatttctcttggtcccagtttcctcatctgcaaaatgggtgctaatcaaaatacttatcttgtggtgagcattaaaggagttatggctataaaacactttggaattgacaaagaactacataaaagcaggctattgtgattcagtttaaataataagacaaataatgaattatacaattaagtggtcagaaaaattattaaagtgtgattgtccccagatttactctgttctacctgctgattaaaccctgtatttgctcactctctttgtaaataaaaagtattatttc

SEQ ID NO: 61019 - DNA, 1218 bp, Homo sapiens
gtgagcctcagcgagcaagagcccacgatggggttggcggagaggcgcgtcctcgaggtaacagggatgctgagaggtggctgaattcttccttctttcagcgcccctgacctcccggcacggcgctggggaactcacgggtctggagcgtgtccgtgctgggcccccggagatgatttctggaatcgcgacccggggacctgaggccactctgggacctgcgaggcagttgttgcccaaagacaaggcctgggtacaggagctcgggaagctctctgctgcccgtctccgttatccacgttcgtctgggcaccctcctcgggtgctgcccattattcctcccgcacctgccggatccaagagtagacgcagaacccggacctcggaatgggacgatgcgacgggcggggaaggcctggcccggccgaggtgccctcggccccgccctccaccgagggcagggaggcactgcctccgctccgtccactcgtaactggtgacgctggcagccccgccggggggcggggggagtgcaagaaaatcctgaggtgtgtcgggggacctggaccagatgccctcctgcaccgccctagctccggggaagtcgctctccggctccgcggcgcgggacccgccagcgggcagaggcgcggcgctttgatgtcgcgcggccacacggtggcgctgccgcaccgcccgctggcggagactgggggccaggggtgcccggggtggggtggagccgggacgcgcgcactccccagccacgcccggggctcatcctggaacccgggcgcccgcagggtcgcgaggccaagtgtaggtcattcccctccccgcgggacccgtgcctggtggacgcatcgccgacgcggaccctgaacgctcacatgagatccttagggaaactgaggccgaagaattgggaatctgcatttagtccactctcctgtccgtaagaagaaaggggcgcgactaaggggaagggaaggagccacagggattcattcccagccggtcccagtagccgccacaacacccggcaggtccgagttaatccgttctgcaagctaggaaatgaggctcggtattggcggaggccacactgttgagaggcggtgttcaaccccagggctgtgtgtcccagctctgcaaactcggtcacagcctctatctccgtggcattcacagtccttaccggtttttgacagtgaccta

SEQ ID NO: 61020 - DNA, 1472 bp, Homo sapiens
gagagatttgagtcagaggaaagcacgagagagaagttaagaacagcaatttcttaagtcataaacggagtcaggactgtaagtgtgattttctgttacctgccccagacctcatggaattaaactttcctgccctgatcccttggattcgtttctccaaccccactcacctagcccggcctccccgaaacacaaattggaatggcgttggctcccgggcacactagggggcgccagcgggcttgttttccaggatggccctaaaattctctccagcgaggagaggaccatgacggccaggccacgcttgctctgaaaagcgccgagcgtggaagggtgtcttggaatggggtctaaaagggagaacgacatccttatgacttgctttaggctgctttctggatgtattttcagagctggggatgaggagaggttgcgtaaaggtgccggcctgctgctggccggggctggcagcctttcagccgccgcgggtgagtcaacacctgggaattgcatccaagggcggccctttcaagctgcctggaactttctgccatcacactgaggccactgtttgacccagtcccgggccagggaggcaggagccgatcacgtcccagggcagtgcttctccctggcactgagtccgtggaaagaggctgggaaggttctttccacacttgagggctggcgttgggaaaatagggtagtgctctccgccccagtgaacagcaagagctcacttcccccagcagacttctgctccactggcctactttcagcatggagtggaaggaagccagctccaggagggcagaggcttcctctccacccctctcttccacaaccttcaacaggcgccttgttctccccggccagggaactgcggatggtgaccatcgtttcccagcccagcaaggggaaatgaggggaggaaataaacgcagggtttttattgccaaatatttctttccctgggaggacaacgcattcaaaccgctgagtggagattggagttagtccagccataaaccatcttaatgaacactaatagagaaccgcaattattgttgacttcaaaatgcaaacaagaactttagacagtgatccctatcagccggtgaggccgggcacagatgccgggcgctgtttttgccgttgcttagcaatggaaaatgaactgttcctgtctgttaccactggaggtggaggtaggacaatgagctttattggacagaataggtatgaaattagtttattctttttcacttggagaaggcaattggcagccaagagagtcactcggaaaaggggtattttagaggttgagggtgactttccttctcattacttcggtaaatcctaaccaccttgttttcctctacagataaagtttgaacttttgccgggagtgtccctccaaaacgatcatcaatcagacagaatagctgcaaataccaactcacagacca

SEQ ID NO: 61021 - DNA, 658 bp, Homo sapiens
ttggatcaaatagttttgatagacagaaaaagatctgtaccattatttcctttccttaacagctattgtaatttcctggacttggttgcttttcacttgggcagttaagaagacacagcttgttttccccatcagttttctctctctctccttcgtgtgtgtgtgtgtgtgtgtgtgtgtgtgtgtgtgtgtgtgcgtgcgtgcacagggccaatcttcaggcttatggcttttggaacattttcttaatttaatagagaacagaattcaatgattagcaacatcactaaaaatttaccccatttcttctccatgagtcactgacacccgatgcgcatgaacagtccaacgtccacctcgtaagatgtcatcgggcttcagggttcagaagcatcgaggactggtggccggccctctgtgctcgccgtgtgacaattccagtggctttcctggcaccatcagatgcctggtgccacaagcttgggtctgctcctagggggacgaggggttcctcctcctcctcaattgctttatgtgccttcactcagtgaacccaatgggatggacaacctgactttttaaacctaagggttgggcctgaacgatgattactttgcccacgtgccttctaggtgccgaatgtgtgttcctgtgatat

SEQ ID NO: 61022 - DNA, 657 bp, Homo sapiens
aaattataaatagcagaaatcaatggaatagagaataaatgcaaagtagagctaatttaaaaagttgattctttgaaaaaaaatctatggcgaaattaagcaaaaaagaaatgatacaaatgaaataaggaataaaaaagggacatagttacaaaagatgttttgaaagatgacaaggtatattatgaataactctttgccaatatatttgaaaagaaaaacccctagagttgccaaaagaaattcaaaaggaaatttaaaaacacaagtcatcctattatcattacgtaaattaaatcaatagttaaaaatcatcccacaaggaaaacatcagtgccagactattttgcaagcaagttccaacaaacattaagcaatagatatttccagtcttagataaactctgaaagaatgaatacgcctcaactccttttctgaggctaatgtaatcttgacactaaactagataaagacagaactagagaaacctgggttataaacaaagacacaaaattcataaataaaacattagcttggcaactccagtaatatgtaaaaaaaagtatcataagcaagtatattcagaaatgcaagttttgttcaaaacgacaaatttatagtataattcaccacagtaaaaaaaagaaagaaaaattt

SEQ ID NO: 61023 - DNA, 772 bp, Homo sapiens
agtttaaaaactaagtctcttggggcaatatgcaaacaaaaaaaagtggcaaaatgttctggaagaagttacaaagttcccaaagatgaacaaataattcagtgtgccttctctctcaactttgatgatatatcttttttgtttgtttgtttaaaatacctaccaaccagtctgggcaggtttcggatggccactgtttccttatctgtaaaagaagggggttggactaaacctctaaaatggattctatcatctgtgaagcaagctccgtcatcctcagctccacccgatgttgaaagaggaccaggtttgtacgtgcaagtccctactagagaccaggtccctgcctcctgcaccgtgcggatgactgcactcccttggctggacagaaagggtcacccttgccaggccttcttgtttggttaatctcttcacatctatttgctccgctgccccgacaacttaacagcaaacaaaggcctgggctccatgccactcactccgaatcaggaacctgcctattttgtttactttggggcacaagaaggaagcaaacagcagcttttgtaagtcaagttggtgatagtcttcactcaattacggccgtgaaaagagggagagatggaaaggacccttttccagggcaggcacttcatgctgacccactctacccaagtttcctttcactggcatcgaccctggaagtggctcgactttgagggagctaaccatattttctgcactttgtcagactgtttttttctcagcccag

SEQ ID NO: 61024 - DNA, 530 bp, Homo sapiens
tagccttgtaactggattccacacataacccctgttccctgtcaacctactctgttctccaccctgcagagtcatctttataaaaagtacaccagatttggttttgcccttcctcaaaaccttccagtggcttcccatcacaattagaataaaatccagtctcttcttcatgacttacagtgatctggcctctgctaatcattcccaattcctgtcctaccactgtttgtcttgctcattcctcaaacattgctgttctttcaacaagccgtgtttgttcctaccatctttgcacctgccctctgcctagaaagctcttctcctccatggtggcacaattgcaccttctcatcattttggaatcgatatcaattcttcaaagggccttccctggccactttacctaaaataacaccttcctcctgctccaacccctctaccttcaccttacttttttcttctgtctggcgcttagctggacctgaggtcacattacatatatgattctctacttgtttgctttctgtctt

SEQ ID NO: 61025 - DNA, 899 bp, Homo sapiens
cagtaagcccagttaactattttcactggtggagttagagagacatcctccaggtttcctttaatgctgctgctgacttgagggctgcagagattctgacagggtggctggaagcacaaacctgtttgtcaataacagtggaggggctagaagcacaggggtgcctgccaggtagtaagaaatctccaatgccctcaaatagagccagcggtagactcctatctgccacagcttgtacgggcagaaattgccctgcactgggagtatcaaaaatcttaagtcagctacaagaaagaaacagacatcccgcttctgctacccagctgcccctgacctcatttctggctcaccccgagtcttctgactctcatatccaaacatgtgaagcaagagtacagaatggagccagcgtgaatcactgtaacttgtgggtaggagcatgtcgcttgaattgccatttgcagggagcctggaggtcttgcaaagaaagagggaagagtaaagagagaaaaggctatttgtttatgggttaaggctaaagaccaactgatgaaaggggtgagaccaaaagaaaaaccataaacgatgtttttccttggcattccaaaagcaaattgtgggtttatccaaatgctgcaattggaaaaatcagagctattagcacatgaaaggtcattggctaagcatcactcgctgctgtaaaatgcatcacctgtggaaatgccagcagtcatcacctgccagggattccagaatcaaggccacacttggccacagtcggttccatggattcctaaggccagggagcctgtcctgtttgcctcagaatcctcaggacctgggcccaccaaggggtaggctgaaggaataaacggctgctggaatgtgaaatgaggtct

SEQ ID NO: 61026 - DNA, 440 bp, Homo sapiens
atctgcctgcctcagcctcccaaagtgctggggttacaggcgtgagccaccgtgcccagccacatttacattttctacagcagctgcaaaaaagtttcctcctgtgacaatatttggtgccttggagtcaacagcctggaatttataacctttctatccctgggcagcctgtcttaggcttgaagaatgaccaggtccaaacagtctggcctcgtgcatacccagagggacactcggaccttggcagacagatggggaagtagatggaaggtcagaaacaccaacactgcaaaattgctaaattgtctttcatagagtccagcttctccctccccctccaaacatctggacttgtgactgtaaaggggaggagggtagccaatgatttctggcatcccagagcaactaaaggaaaatatttttcactactcttataatct

SEQ ID NO: 61027 - DNA, 1100 bp, Homo sapiens
cactgtttcctcggactggcctcctcctcctgagggtgacagagccgctgtgcccatctgcagcaccaattcggggccactcccctgcaaatgcaggtgaagctaagcctgggctggaggcctgggggctggtgaatgcaccaaagccaggccagaacccccacctcccacgcgggactctgctgggaagcttgaaatgcagggaaatctcttgatgtgtttctcatcagtagaaaagaataggagggtttgggggtggggggcaatttccagttcagaagaatcctaagataagaaactctgctctccttacagttaaaacaaacaaacaaaaagctttcattcagaagacccacagctgcaaagagaaagagagaggaaagagaagaaggaaggggggtgcaggggaaggaggtaaaaaaagctactaaaatttggtaatgttttttcccctctgaatgtgtttttcccattcatttttcttctgcccaaactggttggggcgtgtgttctgagggaagggggaaactgatgtgtgttagagagacatatgttggaataagcagctcataaacagactttgaccaaaactttccatttaaaagtaaacacacaggaaacatgtctcaacttggactatggtgattaagcaactcaatttgagaagataaggattttttttaatgtgtctcaatggtttatggaggttttctccagatgatttaaaaatcagcaaaagttaggaattaatgtggaatctctgatgcttcccacgctctttccgtacctctcacatccatggcagagtctcagagatgctttgacaaataatgcaacacgaaccttatgtaagaaaaacaaaaggttatgaatgtgatcagagactctggccaagaacatgtgcttccacaaaacaaggacaccagtttggctcttccatggagatttatgcaaagggtgggtgttattctcatcaattcagtggataaacaataggggggaggttgggatgatttgatggacagcttttggaaatgatcttctgcttggcaaaacactgccgtgatcattttattcacacggaaggaaatgcaaagaag

SEQ ID NO: 61028 - DNA, 1054 bp, Homo sapiens
actcttggaatagaattctgtaattaccttccctaagcaacaaaagaactcaggcagcaatggtaaagcccaactcagaatccactatttattttttggattcctcagttcccagcaatcgactccagccattaagagttgaatctttagaagtcaaactttaaaatgcaaattttctaaaaccgttctgtggagagagggaggcttcctgtgaggcccacttcctgtgaagcgtttggtctatggacagcctatttttaaaaatgtaagtccttcctttgaggccccccggaactggcagcaggccgacgggcaatcgttcctctggccgcacactttcaagtgaccgaatgtacccaaactgtttgataaggtcatttgtaaatatttactgatttgcagagaaaagaagttaaattacataaacccgtgcccacctcctgctttcagccaacagtaagattgatgttgtcctccaacatttagaaagcaaacaagaagctgtttaactaacatgggggaaggggacaatccaagaaaatcccactgaaggagctgtaaaaacaagttactcctaaaatctttttaaaagtttaaaaaaatctgtgtttcatcatcagttcacccgagtagtttccttacaaacattattcacagagcccattaaaatactttattatcaacaacatcagcaagccgtgcaactggaattaactctttctggtgcaatgagaataggagaattgctcaaaaccacagccaggggctggaacctctgaccactctagtcacccacccccacgtgcaggcctgaccccagacacaggtcagagtctggctggacactctatgcttaaacatcaatgttctcagtttaaccaaccggatgtttaaagacctgaaagatttcaactttggaaaattcaacattcctacgtgttttttcctttcacgcacacattctcaaacccagaatagttcagggggagcagtgagactttgcaagtaaatcaggcgggccactcaataatctgccctggaagcttcatccctt

SEQ ID NO: 61029 - DNA, 1308 bp, Homo sapiens
aaaaaaaaaaaaaaagaacaccgaatccctggccaggcacagtggctcatacctataatcccagcactttgggaggccaaggaggaaagatcacttgagcccaggagttcaagaccagcctgggcaacatagtgaaacccaatctctagaaaaaatgcgaaaaaattagccaggcctggtggtacacgcctgtagtcccagctactcaggaggctgagatgggaggatcacctgagcccagggaggtcaaggctgcagtgagccatgattgtgccactgcactccggcttgggtgacagagtgagaccctgtttcaaacgcaaacaaaagacaaacctgaaccccagtcactaaggtattcacctcagctactacagtgacctagaagatttacacagggtcacaggggcagctgggatagcatacctgtttctaaagccttctcagctcagctgagaactcactgcaacctggggcacagaacagtcctcctgagagtcaacccaaagctcatccagttaattaataactgacgtgatagccaacgagagggctatgggagagaaactccgccaggggttaagagttacttgattaggaagcataggggaaaagatccctggctgaacaaacactttacacagtgcgtttcatctgacaatgccgaagtgccctctggccaccatgtcatgagtcctgagctgggcctcaggaaagactcctagagccactctaccaatcttcctgggggaggggagaggcagagaagcttgatgcgttatccaggaacacacatggatacttcccaaccacactctcagaccgtgcttcaattattgattaggatttccaaaaacagccagcttttgattatctgtggagactttatacataagaaatttttaactcactcattatactgctgagtcacctggcctaagtgtcagtccagcttggaacttagagtacacacaaacatctttagtagcagtgatagtagcagcaacagcagcactggcagtagtaactattcatattaacttacaaccgaccatgtgccaagcaccagccaaaacattttacgtacattatttatttcacttaattctaccaacaaatctagaagagagatagtatatgttatgatcctacagataaggaaaggttattagtccattctcatgctgctgacaaggacatacccaagactgggtaattttttttttttttaaaaaagaggtttaatggactcacaattccacatggctggggaggcctcacaatcatggtggaaggcaaaaggcatgt

SEQ ID NO: 61030 - DNA, 580 bp, Homo sapiens
aggctgtggtactttgttatgtctgcactagcacagtaacatcatgatagggaagatttccagcaaaaggagaaagatggttcccctaatccaaaaggaagaacagcttttgctaccttgtgcatattatccattcattgatacagaaaatcaagagctcccaggatagtacgtgagtgtgcatgtagggggtgggagctaagatagctactcaggatgatgtcatgtctgcaccatcagctggggaatacccagacatgctggaatcacaggctctctctcgtgcacccacaggactccttctctcagagccagacaggtctggggacagcccttgctgcctggatgatatcctgggagagatgcttaaaacgcccaagtctgcctgctgtaagtgatctgacattggatttttcatcgctgagcagaaacgtttcaaatatatattaaagtcatttctccttgacataaaagaaacattctcaggcttatcatgataagaggggacaatttaaatatttctttaactgtgtgcattttctcccttttggaacaaaaaaaatgcaaataaaaactagga

SEQ ID NO: 61031 - DNA, 1192 bp, Homo sapiens
tatgtttgaaaatttccgtgattcaaaaataaaaataaaactcttatcttctgaagtcctttcagagataaaacgaaagccaagctgtctcttttgccctgactgactcattcatgagaacatgctcttgatgaaatctcagcaactggaaagacctcaagagggcacctagttcagggattctcaaacctggctccatgctggaaacacctaggaagcttagcagaactaccagttttccccaacccacctcacacctaatgaatcacaatctccagaaaggggcccaagaaaacgggaattttttttttttttgagacagggtctggctctgtcacctaggctgtatctcggctcactgcaacctccacctcccgggctcacaccatccttccatctcagcctcctgagtagctgggactacaggagtatgccatcatgctcagccaattatttttgtattttttgtagagacatacatgttgcccaggctggtctcaaactcctgcactcaagcaatcctcccgccttggcctcccaaagtgctgggattacaggtgtgagtcaccgtgcccggctgggaattgttttttaagtgccacaggtgatgtaatctagtatgttccctccccaacatcccagccaaacagttgtccagcagggtatgtgttccaagccctcagggacagggatcacacaggattccacattttcactgctacgtcaagcctaaccgtattcttcactttcagaagaaaattaaaagtggaatagctaattcactgcatacaacttgcaaggtttcaatgttctcgttcaatttaaggtatttctcaccaaccttcaggtgcatttagtcactgtgttgaaggcaacttcagtgtgggagctcccgccaaataaaatctcataggaaaaaacaagtttacccatagagctaaaggagctttcactgggcagagtatcagggagaatgccatagtagcataccccaagtgactgggccaggtcaatgccctggaaggacctgggtgtacctgagcatacctgggagcctgcacctctcacagcagccagcagctggcctgggggaacccaagaaagaggagaaaagtggaaaaactcacacctcttgctttgttctcacagaatcgcaaatgctgggaacaaactcccaaccacaaaactgact

SEQ ID NO: 61032 - DNA, 3268 bp, Homo sapiens
aaatcccgcattttataccaacagggtgaagagctgctgatcactacagttccatgtaaaaacaaaacaaaacaacaataaccaaaaaaaaaaaaaaaaaaaaaaaaaaacagttcccagaaaccacagctgaggagttttccattattatactctaactacagatttcgccaaatctttttttcctcctgtttcagagggaaaaaaaaagaatctggatcatgtgagttgcagttaagcaaacatttttaatctgctgccaacaaggctgctccaccagatacgcaaatagttattcactggtgacctccttacaacttttctctacacacacacacacacacacacacacacacacacaccctcttttgttttttttatgacttgctgtgttttgttaccctctttattttttaacggagaaaatgcggcaagaaagcttagtttctcgcctagtaaacagaaggtctccaaataactgacaaagacattactggcccagctctgaacagatgttcgatgcgaactttaaaaagttaagaaatcttcccagagccgagcagtagcgagtttggggggccgggtcacccccgcccacccagcacgcgcgcgcgcgcacgcacgcgcttcactctcgtctactgtacttgtcaaaaacatttcaaggggacctgcgggagtggcgattggctgcaccccgcgtcaatcagcggcgttgccgggcaacgggggaaactgctcttatccccatatacagggcaattgggagctcgcataccttcactgccggtcagatgtcataaaccttttattggccgcaccgcggcgagcctcgaaaacaaatcaataaaagcccgccgtcccccaacttatccagggcccaaggagggtttcaaacagggccgggatgaggggggtcgggcctcgggggtctccggagacgttcgttgcctgtgccaagtctgcacagtttggccggggggtgatctttgttaggagcctgtttctcatcttggggtctccacttgatcggaaccccctccccggcccggaacggcggggaccccgtcctccgcagacaataccaactctgttccttgcgggcgtcttttcggaaaccgaggcaccgggaagcagcacgcacgtcggggcaggaaactcttcggacccggcaacttcccggctcgggggctcccggggtccacacccgaccctccccccaggacctgcggggtccctcgtcttcccagagcggcgaggtagtctccaggaccgtctcggacgcgcctcccgccccgggtgccccccgagcccacgcgggagccggcaggagcggggtgcaaactcacctggccggagcggggcacgggggtgcgggggcgccgctgcccttcagcaggagccgacaaactttcgcgggcgcccggcgggcatcgctcggtggccccgctaaggacgcgcgggcgcggcgcggcgagcccggggcggcgggcggcggggggcggccgcgggcgcgggcggcaggggcgcgggggtcgcggcgcggcatgggacctgcggcgtccgccgggcgcgccgcgcgtcctcccgccggccccgccgctctccccgccccgtcccgcctcccgctcgcctccgccgcggcgcgtcgggccggggcgcgccgagcggcgagaaattgtttccactgcaaacaaaaaaaggcgacacatgaccaggcaggaggaggggaagcgcggggagggaggagggcggagggagggacagagcggagggcggagggagccggagaaagggaaaacgtgggcctggccgccagcggcctggggcgcggggcactgacccgccggggcggaccctgcccgcgcccctcgcgcgccccagcactcagccagggcggaggccggggctgggccgcgcggcctcgcctcttgggccccgcggggcgggggtgaccggcgcgggtcccgcgacccagggcggccgcgaccgtgggcggtggggcaggtgggtcaggcggcgcgtgccctgtcccctccccgggctccggccacacgagcgggccggcgctgcgctgctggcaacgtgtcgcgggaacgctcctaccccatctgcatgccttacatggctcgaaagtaaaaataaaaagaattacgatgcgggcgaggcttgtgggggtgagaagaggagattccacgtctccccagtgctgcgtcctgataggacccccagggccttccgagccctctcccagcgaccacctcgtgtcccggaggtaagcaccgcagcgtcccacccaggtggccgcgtgtctcccgagggagggccggtggccattacaagacaagaggcaccgtcctaaaggccacgccggtggggcctctcaagtgggttgtgcggaacgccccggccggcctagagagaaaacaggtctcatttccatctcagtttgagctctcaggaaccagactgacaattcgcaagccacccagcgaaatggtgcagccaccactctaagtctctaggcacctccaaataatagcacccactgctaaagccacaccaaccagccgccttgggagaggatgagaggagagagtccaacaggacaccctggtggtgacaaaaataaaaatgtgattgcacattactcccaggtagccaaattggttggttcctctacagaggagaagcccagggcacccttcctgccaccccctcctgagccagtggacaggacatcgtgagcggtctgaaaactacagaaaaaaacagcgagtagacctggagaaagctttctagcatgcagtacttttaaacctagccaaaaggagggactaagggaaacaccagttaggcttctgaaaattttttctgtctcaaaaaatagaccccccccccccaatctgagagtcattccccctaacaaaggttcaagagggcaggtgacaagtcttcagcaaagatgtgcctttcagactcaccggagaccttactacttccaagttgtgtggcatctccccatctggagacaattaggaggtggaagcccaggggtagcctgaggtcatccagccccacccctttgattactgagcacttgatgcgacctacccaaagtcactaagcaaaaggcacaaggtggcagagacaagtcagatgatctttgaagtctcacgccagagattctcagggttagaagtggtaacaaagccaggatgagacaatgtgtaccctgctttcctgtagctccggctaatgcaggtcc

SEQ ID NO: 61033 - DNA, 3159 bp, Homo sapiens
aggttgaggtgcaggcaaaaggtgtccagaaattgtgagacgtgactgcatgtgagtactcaatcttaaaagggtcggggctggaaaggaagcaagcaggtgaattgctagctctttctgtgggtatgttcaacagcacctcacttctctgcactcaaagacgtgattctgactggtttcaaagatttggcccccaaacaaccaggcgtcctttttaagttggcattgcttccagagaggaatcctgaacatgtttcctctatgcctcacacagcgccaggccagctgtctaacaatatgggtcccggagggggtgctgcccacgttggtgacggcagccatgagtgcctgttgctcgcagcagacgtcagagagacctcagcgcaggggtccaagcacctggccaaggcaccctgcgcaggcctccacgccccacgagtgcctgcagaggctacctgaggaccaaggtgggcatgccacggtgtcctggacttctggatggaggccagtcccagggagtgaatggcagagctctccggaggctgcccaggccaggttcaatgggagggatgaacttcatgacatccgttccaaagaaatcccacctgctactggcatgcctaggcttgtcttccccacataccagcctcccaggcatgtctccaagggctcagtgaggaggcagctgcaacagttcgctttctcttaatgatttggagttgggaggcacagagatggggaagaggtaatgaccattcccagtgatcctggacctccgtgttggctgcgaccttgaaaagtcatgctgtcaacccctttgtagaaaaaatgcagttttctttgtccgtggaaatctggcctcgcagatttatttgctgtagcaagtttctttaccctcatcacactgatactcagaattgaaacagttcaaacctaccctgaaacatccttctccctccaaattccagtgacatcctcggtctaaaacgcctggcaccatgtgggagcctggctccgctgcctctcaacgcactggcttgctttttgcttttgagtagcttgaatatcaaaccaagcacaaagggaatcatacccaggagttgctggaaaaagctcatttcatccacctcattcccccattctctctggcagacacaactgatttttttttttttgaagcctgaaaaacttctcatttaaacttggggtgcaaaaggcatgtgaagtgggagagttgctgcctggaccagcgaagggttagccagggaaggattcaacgaaatacaaaagccaacacagacctgaaggggaacaggcggccccagcaacaactgccaaactgtcattttgctccgcggctgaacagaaggctcgagtaatgacaaccacaaaactcatttaaagtctgaaaaggtgactaatgagctcattcatgctggctataaattattcactacaacactgatcccactcaagacaaacagtaaagtaaactttaaacacagacatcgctggccttccaaagtggaacaagttatgcctgtaaaagttttcacaatgagagagatacttgtctcccccttgtctattgtcacattcgttcttctgtttacttttttttactgcctttaatcaagtttaagcagacacagctgttacacatttatttctctgagtttttttccattagttattacaagcaatcatgatgctctaaaaatagcagcaaattatattctctagaaattgaaggctgaccttaaaatgaagcccaggtcttcagaaagaatattcatatgcacatgttggataaatgacaacaatgcacaaaggcaaaataaaagtacaaagctttttccactctttgagaggtttttgatttgcttccaaatttcctttggttctggtggaaacaggttgcttcaaaaccttaccatacagaacctgcttccagtggtcatgattccagtttgaaggattttccttcaaacttacaatcttaaggcaatcaaagaagaaatgtttcatttaggctttttcagcacagataaacacagcagcaggttgctgaaaacccaccacattgctgcagactactttcggtttcctgtttaatattaaataaagaattttagctcttctgtttttataaactgtgctatttgctactactgtcactactaaaagcattatgactgggtggataagtagtcctatgattttcaagccttcttttttctttaatcttagtatctattttgaagacatcgcgagagttaagagtctcaaatctgtttaattgatttttttatttttaaaaggcccaaataagtacttccgttagctcttagatctctgaacattatgtatttttaaaccactttgaatactttgaaaagggccacagaaaacactcatattcaaataccaccagacggaggttctgcctaaccaaaagtaaaagcagaaaagtttaaagctgaattgtgccctgcacacaccttgagattgtaggggtgaaatgaatggtcttgggccggggatcttgctaaaggcatgataaatcatgcgttgcaggcaaattaagacccaggctctaacttgaacctcagactgtgccaaactccatctccatttaaggaaaatggttttctcagtttcttgcacatgacctaaaggcttgtccagtcatttccgttgtctgaaatgcaaagcaatctttcttttttaagtagagaaagaagagtcctgaaatatttataggaaagtgcttcactacctactgacagcaatgtggttggtctctacgtgtttagcacatttttttttgtttgcttgtttctttgagacagagtctctctctctctcccaggctggatggagtgcagtgttgtgatttcagctcactgcaacttcttcagcttcacttgaaccgggttcaagtgattctcctgccttagcctcccaagtaactgggatgacaggcgcccaccaccacacccggctaatttttgtatttttggtagagacagggtttcaccatgttggccaggccggtcttgaactcctgacctcaggtgatccacccgcctcggcctcccaaagtgctgggattacaggcatgggccactgcgcctggccagcatgttttttatccat

SEQ ID NO: 61034 - DNA, 776 bp, Homo sapiens
tttcaagtgcagccttggcatgcctgaaaacaaatgattaccaaaaagctatccagctgccctctcaacactgcaggctattttgtcgggggtgtggagccctctctgctggttccatgtgagcctcagcaaacagagcaatcaagaccccctctaggtcccagtcaatcacactccagccacaagttttggccagtcctgccccagagaagataaagcccttaaataaagattcaccacgctcagtccagctccactcacagccaagagtcaaagtcgatatttgctaagtggaaaaggacaaaaggaaacaaattcatctgcaagctctccaaacagactagaaaaagtaattccctactgctcaccccatccacttttaagaaggctaagctaatatgttctgagtttgcaggaatctcaacactttggtctgtgaatcacaaactagcagttgggcattcacagagaaacgtgcagagtgaatcctttaaacgagaaacaagacctgtgcttggtgaatcaggaaaaaaagaagaagaagaaaaaaaggggaaaaaaaacagggccattttaaatgaccttatgatgacataaaatgacaagattatgacactgatgcaacttcaaaccagtaggggcttgggaaacctttggaaggaaactcctaaaaggtcacattatttcttgacaatccactgaggagctaggccattaaaagagcccttttaatcagagtgaatttaaatctgcacccaaaccattagcctttcagg

SEQ ID NO: 61035 - DNA, 963 bp, Homo sapiens
aaaatttgtagtattctcccacgctaaaaaaaaaaataaatccacaaattaagtttttccatagcaaaatacatcaaaacacatatgtcttacacagttgcaatgcagtctaagaaagtctgctaagctgtgaccgataacatcttcatcattgctacgtaacagaccctacagacacagatgctgtttacacaaacctactgatttactcatcttaggtcagatttactgttttagccatcattacttttttcacttataaatcagaaccaatctagccattttagtggccaaaataactataccatgatctaatttcttagattgttaaaataaccagatcagagtgagtcactgctggtgaatcaataaagtgcttggaaataaacagggggaaaaagacatgaccaaccaattggctatcaaagccaaaggacctgcccaccaccacatcctcaccccaagccttgtaatttacacctacattctgatattccaaggtgccgagggccagtctgtaagtaccttgatgtatgtgtggcagaaccacttggttataatagtcaattaaattattaatgaaagaactgtacaaataaaagcatcatgctcttttatggagtaataattattatcttaagcaatgcaaattgaataataagaatcgtcaggacagttcagtgataagctaacaatttgcggcaatcagaccaaacatctctgctcaagctgtctaataaaataaatagcagcttgttgacatttttgttcagttgaacacacagacaaccagaggctacttgtatgtctcgggtagaagagccaagaaagaagtggagactgaatgatataaaagtggaaccagttctaatggtggtaatttagatgtttacatatctttttatttatttattattattattttttcttgagatgccgtcttgctctatcacccaggctgga

SEQ ID NO: 61036 - DNA, 982 bp, Homo sapiens
catttgaacactcctccgaaattactgcacaatttggttgcaaagtcacacacttacaaagtctatcatctttacttggttgctctgtaaccaacactgaagtcatataaggttacaatgtggcagcatgagatcaacacagataccagcaaatggtactaaaaagtagcagcaaatgtcaaagacaaaccagggtcagcttggagagaatgagatatttacataagctttcagaaaagacaatggagccccgatttccccttaaccgcacacctaatcaacctctctgctcctcacctgatcattctgatataaaagcaatttctacagtgatacattcaaagaccttagttgccataaactcagcagctgttaaaaagattctgttgcacattcgatttgctttaagactcagctatttccaaccaaagctttcatttcttatccatctctacccccctccaaaaaaaaaaaaaatagcttcattaacaatatccttctttgatatgtcatctgccaaggccattttcttacctttgtaactcacattttttttcatttgaggatatttacccaagcaaggacaattgtttgactggaatcttgcaactttcaactttgcccagattttgccatcgtgcagaaggggaatgccgcaacccccgacacatcgttcagttgagctaatacacatctgaatccagagctatattttaaattcttttacacttacttaatatagtgcatgccgcctgtccactgatgcgatatcagaaacctgcaagctactatttctgcaactgtgtcactgtagatagtctgaaacatgtacgtagctgttgccatggaaacaaacacagctagggtagagtgccacgctgtgttaattccttcacccatgaaccccaggggaatgctaacattcatcttctttctcctttagtctcacactgctttaatatttttttagcattatcaaatg

SEQ ID NO: 61037 - DNA, 601 bp, Homo sapiens
tacaccatgaatttcatttacgggcactcttcagtagaactcagcttgccaactctcacccagagcagtgctctccttcccactccttccatgagccaccgttgtgtgtttggaagccatcggcacggatggcctaagaggctcctgtgatctttgcactgaggcaatgagtcaattgcagaagtctgaggaccactcacctgaaaacccaactcttaatgcaaggagagactgggagaagcttcacccaaggtcagtgggcatctggcatgatagagactgatgacatcagccttattcaataggagaggtcagggacctttaccactctgtttcaagcgccctttgagagggaaaccaaagaacagacctgcctttaaggccagaagccaagctgacctgtgagatcaggaccatgctgggggtgtgcccctatccaacagcatcggggctggaaaaagggacagggaaaaatgggagatggttcttgttaccctctgggccactcatccactccgcagaaagcaggtattgtaaccagcctggtaccctgacctggccctgccggctggtgagaggtggctttgttcctggagcagcc

SEQ ID NO: 61038 - DNA, 1945 bp, Homo sapiens
cactcagggttgaatggattaagggtggtgcaagatgtgttttgttaaacagatgcttgaaggcagcatgctcgttaagagtcatcgccactccctaatctcaagtacccagcgacacaaacactgcgcaaggccgcagggtcctctgcctaggaaaaccagagacctttgttcacttgtttatctgctgaccttccctccactattgtcctatgaccctgccaaatccccctctgcgagaaacacccaagaatgatcaataaaaaaaaaaagaaaaaaaaaaaaagaaacactgtccctgaacccatccactctacacagcatggacagcagctgattaagcagtcaatcagtttagcttagaaagccacctaacagcataatggcagagacctgaaaacagtaagcattgggctaatctggaattccaaggtggtaaggtaagatgcaggcaatcggagctatcgagttgccccaccaatggaaaatggcagtgacaaatggagactgctttctattagagtccttagcaggccaggtaacacttgagaaatttgagaatttggccacaactagaaaccagtgttcaataatcactccaccattgagccagggctttgctgaaaaggtctttctatttgattgcaaaccatacatcaacttgccttaactttattgtaaggagaaatccaaaatatattctgaaagagatcaaccctaactttatttaggtcatgctgctgccatacacaaacaatgagaagtgtgtgactaattcagaaacagcaaggaaaggtcaatgcccagtttatttcttaacccacagtaatctgtgagtaatatgaagaggcatttgccactacctgctcatcaatgctgcagtctaaatgaacagaaggagggagacaatttcacactcattaaaaaaagaaaaaaaaaaggcacactagtatgtagtgacgtaagcctggaaatgacacatttaaggacagctctcaaaagcatttagataatgaagcctcaataacttgtgaagtagaaatgattgtaactgttttatcaataagcagcttgatgttcacgcatggaaagtcattcacccagagtccctcaggagttaacaatagttaagccaaatagttagacctgaaaactccaggctcgggacccaggccacagggctgtgtgttttgttttgggagggtgggccgactatatgatgcccaatcctagcataaaccagtcaatacaatacaacatctgtgcttgtcatgaaaacaggcatttccatctacccttgaaggcaaccagccttccgcatctggaaccactgggtgcataagggacctggcaataaatgatgggaatttggcctataggtgaatcaccaggcttgtggctcagctcaaagcatacgccctgctgaacggaggagtggcattatgtgcacacagagaaggcagcaccgttccctgtcacaatatagactttgtaatactctactatgaggaaagaacatcttctctgagcacactgaagaaagacagcctagaaattccacagagccagagtatcagctcccagaggcaccttcccagtctacaccaccccagagagagattggtctgatggatggggaaagcggtgttgaaagtggcactcgctcagaaaagccgaagagcttgggcagagcagagaatgtcagcatcattctcatctccttgcaggtgaaactacaagaaaactgaggccagcaggcaatgaagtagacatgttttgagcagcccccagggcttctgatgcccaaagtcacagatgactccagaccattgcttctccaatgttcgtgggccatggatcacctgcaggccctgtgagatgcaggtttcgatccagcaggtgtgtggtagggctgagattctgcatttttaacaagcactcagga

SEQ ID NO: 61039 - DNA, 674 bp, Homo sapiens
ggccaggccttatttggaatacatttactatcaggacataaagtaaaatggcctcttctcatcagctacagtagtccctccttctccacggggaacaagttctaagacccccagtggatccctgaaaccccagatagtaccaaaccttacacacctatgttttctccatctaacggagacagctactgggtgacttacagatgggtagtatatacagtgtagaaatgctagacaaagggatgattcatgcaccgggcaagacagagcgggacagcacgagatttcatcacaatccttagagcaaggtgcaactgaaatatacactgttcatttttggaatcttccatttaatattttcaagctgcagttgactgtaggtaactcaaagcatgaagagaacagtggataagtggggactacttccacaaaaggttaatttggcatttactatgttcatttctgaaagatgcctcccagagatactgaacaagctggctggactctaaaagtggtcagtttttcccagggttctggaatgaagcaggcctacctgccagggctctgaatgccataaataccttcacacctgatgtctaacttttctttctctttgagaaacacatgcttgatagcatttgtaatgaatcgtcaccttcagtgagagcctcttcaaa

SEQ ID NO: 61040 - DNA, 2402 bp, Homo sapiens
ggcacttaaattatcaaagtaatgatacagttaagcatccatctactgatggtcctttttttaaaagactcagatcaaaacccggttaggaatcattattctaagttgaacaactttgcattctacaacttatgagcagaaatcattgagaatgtattgtaaagtgctgtgtatacgtgtaagctagtagctgacgtctgcaaagaaatttgtcaccaaaatggcctactttatgtggatagaaacaacaacaaaaaattaaacataaaggtatctcgagcaaactgcacccaaatgaaaaaccgaccctgcagaaatctgtgcacaagagggctatctgaaactacagcacgattttaaaagaaggttttgggtgactgttttcataagtctcaatctaactgaccaatcagtgtgagagttaaagtgggctccagtcattcgtgcagccttcagagctctgcaccctccgagctgctctcctctccaaggcagagtcggcgatcaatgaaaaacagggaacaaaaggaatataacaggatgtcttccttagctaaggaaaacgattccctttttcctcaatgagccagtcgcaccctgcctacgacagctccacacgggagcttccagcagaccagtcctttcgggtgaggcacattttacatttgcaatcatgtgtcccaactgctagcaaatgtgtcaccttaagcacagcctgtgacggagggctccccgagcccaaccaattgaaactaataaattaaataaattaataatcccacaattaaaacctccggagaaagattgcatttcccttccccaaatgtcatcccgggagtataaacaaagcatgaaaaatagtctcttcagccttcccagccggcaatcatggttttcccctcaaaacaatgtttctccaaaaagagaaatcttcttattaccctcagtggaaactcatctgtagatgtcatatcaggataacccgttacagtatttgaaaagaggctgaaactgcccatagatttgacactgtttataattgatagccaaacagttgcgacagcaatgctgtaaactctgcccagccaaacaaactccacatttaacacgttccttccttgaaaataaaagtaacgcccggggagcccacagaagtgtgcttccctaaaagtaattaacagaattgcatcaattatttgattatttttataaatatccatttgtctgcaattttttaaaaaaaattttaaaaagcgactatccacacattcctaagaaactttttttttttttaatgaacttacttttgagacaaaactaatgaaaataagcaacttgccatggctggatctttcccatttgggctgcaagctataaatcaatctgaaaccaggtggaaataggggggcggacacctttaaaaaaaatcaaagagtgccccaaaatgcagcagcctgaacacggagggcttctcgtgacaatgctaaacccgagcagattaggaggcaggaaatgagccccattttcgttaccttcgatcgcctgcccccccgctgcttctcgcggccgcattggggggctgcggcgacgctggactcgcgggtggccccgccgccgggtcgcgccgtctcccggccgagctgcagcagatcgcggccggaaccccggctcctgcgcccggcgcccgcccggggtcggcggcgcggctcccaccccggcctggagccctgctgggtcctagtgcgcgccgcgcgcccgcctcgcggcccggtctgcagcccgcaccgagggcaggcagctcccagcgccgcgagtctccgggcgaggccgccaccctctcggtcccttgcgaaagcggccgcggggtgtgcggatgaactggagcttaatgtcaaatcctggcacaagatgttcaaaagaaagacattggctccaactgaactcttagaaggcagatgctaggatctgcagcccgagggtaagcgtaggggcagtacctggcagacagaggtttgccgggtgcactggtgacattggccgttcacagacggtgagacgcggtacgggatcgataaagatagatttcaaaaatataacgctaaaaagaaaaaaggttgaaaatgtgtgtgtttaaaacaatgttttaaactgtttttcccaatattttccccctgttgacaacaggcccttttgcatttcgccttcttttactttataatatgctcttttaaataacaaagccccatatggctaaacatgtagtcatttgattttcaaaagacctcaaaaattgcatgaaaatatgcactcatgtatctcctaagaaatcaacgagaaagaattaatggaggcatatggcgtgcctcatagagagaacttaattacaaattaaaacaaatgcg

SEQ ID NO: 61041 - DNA, 1154 bp, Homo sapiens
gctcagtgaaaaatgaatgagcagaaatatttttatccaaattattgtagctgatgcaaccttctttttaaaagagtgttttaaattaaaagaccaatcatttcttcatcatctagagggggaagaaacttgtaatgtaaaatcctatttactgagttgttggataggatagtaaaattccacagatctgggtttacacacacacacatatgcacacacatttacaattgtattgcacagacagcaagtgtgagtcttgcttctaccaacgcagtacaaaaggaagctgagagagtcaagggaaaaccctgtccacgttgtgttgacacagttagagtaaagtgaaagagtcaaaggttgaaaccgatactaagactactatcagatttcgcagaaaagagctcttctaggtactgcagataaaataatactccaataactgatcgatcattccttttatgaaagtaccactgagttgtttgtgaaaccctcagtagctttaaaagatactccaaatatcatatcccagatattgttccacctgtcttttcagaaaaagaagcagaaaaagaactgtacctttctccattgcctgtgtccggtaaactcttggcaacaacatgatagacaaccactagcactatttaacctctttgagcctccatttcctgatcagtaaaatgaagcaggtgatcacttgggaatcccctggagtctttgaaatcataattctaagctttgtcaaagccaaaatcaataaaaagaagaaaataggttctaagataacgcgagactagctttatttttttctgtgcttgggcagagctgtgaccagccacctggaacatcatattggattctgactccctttctttctgccccaaattaaagtaccttttctttggtatttcactgaatctttaaagtagtcaatagtaaacaccattttgtaaataaagttgtctcatctggtaactacaaaatacaaatatatctttcagacacgatttcagatgaattcttcaatgcaaatggaaatgacttttttcaatgtattattaagagatggtagataactagcctaatgcaaagacttgatctagtgtaaggtcagtagacaaaagaccacctgtgaaaaccaagggttgtaccct

SEQ ID NO: 61042 - DNA, 1930 bp, Homo sapiens
taattgaaggctagcttcagctaggctcaaggtttatctacagtagtttcactcttaaagcagctgtaacccgtaccctgcatgctgccacggggaacataaataggtcccctaaaagcaagcacaaatagaaattgccttcagggctgacatgcctacattctatttccttgctgttactaacctcctggagtttctgaccttatactagtcttgatctccaaaacccaattgctgcttctcagattaactgatttactggcttgacacaccaccgtggctttggcctgaactccctggcttccagacccttggccctcctgactgcaaacaactgtggagcttccacccttggccagatactcctgggcacaatcctcatgactctcaatccctgtttggctgcccctgtgacttggggttcagggaaggagagagtctgaagcaccgattttcagggggaggtgagctggtaaaaaaaaaatcatttataccattagacttagttttcctgaatgtaaacttcaacccctgattataaggactctgtaaggctaattattaattttaaagaagtgctaattagaaatcatgcaatgaatatatttatcattttgataaagttatatctacataatttaaaattttacaaagaaactcttcattaagtgttgcatgacattattttaagaaattctatttcaaagctctacctgattctgaaatggcctctatagtaacactttcttttttttaaaaaaaatggttctttctcacaagcgaagaataagtgtttgcattctaactataatcagtatttcaaccgagtggagatattttagtgccttcggtgggcatttatcttcttgctatcagcacaatagaacaaaaatgtacccatattagcattaataataaaaccaagtccattatgcagactttcttgtcagttaaatttgttgcaggcacaattttggattcaatttcatccatttggaagtacttttgctgtcaagcaaatttttgttttatcattttaattttggaggtttttttgctctcctgtgtctgaatcacctttttagaggttggaaaatggttcttccccactgatataggaaggaattgatttggcaaacttagatattttccctgcgatgtgaatagagttaattttaacagagctgtttcattttaacagcctcaacttgcacagtgtgtgtcatgccaaacagctttgtgtatcatcatcgactgatgtcagcacagttctagaaatagtatttgatagttaacagctgccacagagccagaaggggaacacgagacattgtgtttcaggagggttcacaaaaactcgtggctattgtttttatttatttatttaatttcttgacaacgaaagaagagcttaaaataccaagtgtaggcttttaaaaaaagactaatattcctcagtaggtcaagtgactcctagaaccttgatatcataggcaatataaatattgtgttctgaactacatatttccctaatttaatacagcttttactcattttacaatcatgtatttggtcaacaggtatagagcaaaggtttgcctttagaccaaatagatggtgaaaccatgtcttttttttgtttgtttttttgagacgaagtctctctctctcacccaggctggagtgcagtggcgtgatctcgtctcactgcaacctctgccccccgggtgcaattcttgcacctcagcctccctagtagctgggattacagacatgcaccaccatccctggctaatttttgtatttttagtagagatagggttttgccatgttggccaggctgatcttgaactcctgacctcaagtgatcctcctgccttggcctcccaaagtggtggagttataggcatgagccaccatccctggccat

SEQ ID NO: 61043 - DNA, 688 bp, Homo sapiens
cggggcgactcggtttctccactgacacccccgggcgcgaggtctggtccatcccggagtgggagctaggcagggacgccacctggcagcccactctgggcccctggcccgcgtttcccgcaggcgccggcggcgtcgggcgcggccgccgcgctgccatggcaacggcggtccgccccccccccgcttcccggcgccggcgcgccagcggggcggggcggggcgggcgttgctaggaaaccggcggcgggccgcctccgcggcgcggtctctcggcttccacccttcacctacttcccctgcggggccggagtgggggagggtcgggggaggccatcgggaagccacgtggtggcccggggcctcgcggctcattctgcgttgcgccgtcccttccaggtcgagttgacggccttttcccccttggcgtacaagtattgagtcccgcgccctgggagggagacggcgctcagcaaatttagatgaatgcaacgcttcaacgtgggctctcgacctctggtcccccatcccctgccggctctattaggacaatgaagtccccaaactccactggagggttcttcacccactcttcttcccctccaaaggaaccatctcttgaacttcacgaaatccaggagcaatgctaagcgttttgtatacatcacctcattttcaatcctgtgag

SEQ ID NO: 61044 - DNA, 695 bp, Homo sapiens
gaaagatcattcatggactttgcctcctcttctggggaaagggttagtgggtttttggctgtacacaggatagttctatcacgttaggcagagctataaccttatgattgtctttacttgaagattaagtacagtttagggagatgtgtgtgggtgcccagttgacaggagtggacttgggatggttaattttatgggtcaatttggtggtccatggtgcccagatatttgttcaaacattattctggatgtttctgtgagggtgtttttggaggagctttactattaaatcagtggactttgagtgaagcatattgccctccatatgaggcttctgcagttagtggaaggcctgaatagaacacaaagatgacctcccctgagcaagagaaaccccgcctgcagacagcctttgaacttcctccgcatcatcgcttttcctggttcaccggcagacagcctttggacttgaactgtgactctttcctggacctcctccattagatttggagattttagatgtgccaagcctccaccgtgatgtgaaccaattgttctctcgtgtgtgtgtgaatccttttggttccgtgtctctggagaaccctgcctaatacacttgcctaagattatatagatgataaacagtagaattggctttaaatcctgcagtttggtgccagaatccacactcttga

SEQ ID NO: 61045 - DNA, 935 bp, Homo sapiens
tcttagggtactcatgtcacttggagtgttgccagcttcactcggaagacaggagagtcggacgggtttttatattgtgggaagaagcaggaagaatggcagaggagggagaacgaaaagattcagaaaagttaagctacttctatctctttagaattaacatgagcctaatgattggaggacagggtaaaaaaacaaagagctaaataaagagaactggagacaatgtagtataatattcggatgtacaaagtacaaaccataaagtctattttgttttaataattaacaaaggtgcacctagtacacacactatggatcaggcttggagaaaacagacaaatgaatccaagactactcattttgtgagagcttaaagcaaacaacttttagcagtattttaaagcaagctagtaaaataaatagaagtgaagtccaagggatttaaacatgaaaatttggggaaaaaagaacttcgcaaagcaaaacagacaaaatacaaggctaaccaaacaaaggctaaatcaaataaataggcattgccgtgtgccctggagaactgccaaggagagtgaatttcaacaaagaatgcttctgccaccagttaggaaaacttcaattccagaaaggctgaaggaatgctgcaggcactgccgagtgacaaggggggtttgggggtggagaggcagtaggtcagacgttatttcagactacgcagacaaacacgagaaccttcctcaagacaagtaaaggcagcccactccctcccaacgtgctccgcacacagctccttgtaagaaacaaatccaggtcaaagatgagaaatttgcatcttcaaggactgcctgtagcagccttctcttctcaatttgcagataaaaagacccctgtaaatacttctcagccaccatcctagtatccacagtcttgagatg

SEQ ID NO: 61046 - DNA, 521 bp, Homo sapiens
ttcacccaatttctaatattcaaaaaaggagagttagatgtcctatgtcctttgaccttcccttgtgtaatatgaagaaagggattcttacaccaaaaatatcaggatataactttaaacgtctccagtcatgatgggagcatttggtgcctcgatattgccactttacatcatcatgtggcaatctgcctgtgcactcaggatcttggacgctgggtcagggcatggaccttatgcacattcacatttcatctcatgactgggaagcaaaagcagcttcccagagctttttgccaactgacaggtggtgggaatgtacaaatagcagtgcttacaatgagatggagaaggttcctaggcatggagaagtaaacatatccatgcagagaaaaatgccagccagaaataccacagggtgttgatggcaggcaaagtcaagaaagaactttaagtcagcttcctgatgacagccgaagttaaatcatgcactgaaaatgcctctgaaataaagcaaaaagaga

SEQ ID NO: 61047 - DNA, 2513 bp, Homo sapiens
cctggagttaggaaggtgaggcaaaggggctggctttgaaaggcgggagagatgcagactcaaggttaccattaatagactatatagagagaaaggagatggaacttggaggtagccgtagtcctggacggggagccaggagccctgcagctccaggatcagtcattaaccacgaccctttggacaggcagcccaggtcttatctgcacacccggcagagtgagacccagacacgggagaggaagcgagaggcccaggccaagctgaagtccgaggctcagtcgccctccggaaacctacttccacccacttcctgtgttccgagggactggcttcccacgtccgcgacctggctctggcctcggagaagaacatcgcgactacaacaaccgagccccagcaacccaaccagctaccaccgctttcccagcctggctggcagcctaccgcggccacgcccaccgcggctcaggaagccgaacttcaccgcgcaactccgacgtctcctcccattggacaacctgccagccactcgcgttaatcccgcagggctattggccagagtctttgtttaattacgtttccttggagccgccctggcagtgaggcgcccaggcctgcccccagcacttggctccaccccctgactgtcccttaactcgttgagcgcggctggaaatccaagcgcttctaggtgctggttcaatgcctggttcatgatttatttcattctctccctccatcttgcaataggttacttttaatcatttagatctatgacactatgctaaacgttataggagacaaaaagactgtgaacaaacaagaagaaccaaacgaaaagagccaagtccaggattctcgttcagatcagcaagtcattgggatcgagctcctagggcagctactacatctgttatgtcctcaagataatcccagcacctagcactgtgcctggcacaaagtagatcttcaatgaaagaacgaaacgagccgttatatttacacagatgtatttcactcagtcctctggaagagatgcctagtgtgaaagagattccaagaataaataccataaacagcaccgagcccaaatcccacagcaaacatccttattaaaggcaaggaacgtggggcgagttccttttctcagaagattttacgagaacgcaactgttgcgaagaaggaacagacattcgaggttctgagtccaatgggaactcatttaactttttattttgcagcagatttcaaagtctgcacccagcccctcccaggacacaggtctccttgcagctgcctttaacctaagcgtatcctctctccactttaaaccaaacgccgctgcatggagccctgggagcctgagccatgagaatcctgtaaagagggtgagtcttgctattagttaactagagcgaagttaggggacgcctttctggttctcctctcgttttaagaagtctccaggaagtaagccaagagctaggagagaccaggtttccccagccccgtcctgggtaaacacccggcgggctttaggacccagcggtgggctctccggaaggggaaggggccgggcctcgaggcacaagccgctgccgccagggtttgaactgcgcgcatgcgcggcggccgccgaaggggcgggatccgaggcaagcgttggttctgtgcgcctcaggtacgtgttgggcggcagtgggcgcggactcggtgcggtctctcgcgggctgcggtcgggcccgggatcctgctcctggccgagtcgcggtgcgcgggctgctggggtccggcagggctggaggcggaccgcgaggaagcggcgcggccgggaagatggggcagggtcgcctcggccccggggcctcggtttcctccgatcacagcgcctcagggggcgcgcacgggcgctgcggagacctgtgtcctgccggggcgcggcgctaggggcccctgctcgggtttttattcccagacctaagcttacaggtgcgtggtcccagaaagtgagtaggaaagcgcccaccacgtgccaggcgcttaagctttctgtgctcggtttcccagtataggaggacggtcacggtacgtagtatagagttgtcctgagggtgaagcgagtttacacttggtgaggcgcttcgaatcgtgcctggccggccccaaatgagcacgcagtaaggttagcagctgctgccgtcacttcctcacgttctgaatctgctccgtccccaacgccttcagcaagagccctctcacttcctttgtcttcaacccattctccgcagagttggagcacacagctgtattaaaaaggcaaatcgaaggccgggcgcggtgactcacgcctgtcatcctagcactttgggaggccgaggcggctgaatcacttgaggttaggagtttgagatcagcccgggcaacatggtgaaaccccgtctctacaaaaatagaaaaattagccgagcgtgatggtggatgcctgtaatcctagctcctcgggaggcta

SEQ ID NO: 61048 - DNA, 561 bp, Homo sapiens
aggctccgggtagcagaaaacaggaattgagaaccagaccaaggttaggctagttttgaatgaagagaaaaagggaacctgccactgcctccatccccgcttctcatgatagagcattcatccacttgtagttgtttgaaaacggacttgcaacactctcgttgctcaatcactgcgcagcataatctcagctctttgtgatgattcagaagccatttcaggatgttgccaggtgctgagggtcatcattggcagcataatttaccacagtcccttagagcagtgggggaagaagcaagcatttggaaatgtcctatttatagagtaccctttgtacagtgtaggggactttgttcagagttcccgccctgctcccttgtctctgccttctcagctagtgatgatgtccttctggtgcttagcccaccacctaccctgtggtttcagcatgccatgtatacttggctgtaaatgctgattttggaatatataatattgcttcttggtgattcaatgctacttcttgcttaagtttatttatttatttatttttatttttta

SEQ ID NO: 61049 - DNA, 1429 bp, Homo sapiens
taaattccagaagctgaataataactgaaatatttgtgcaaatgtatatgtcaacttcccagttccaaataccattccagtttttagaaccataaagttcttcccagttataaattttgcataatttaaatattttatattttcacgattgtcctaattctttgacagtaggggtcattgtcttaagttgttgacaagcgcctcataacgggtattcaaaaatttctttcaagtaaaatatttataaagttcactttatgcttataaactgctgcgttgccctagaccgcccgcacaagcccttggagcacaacttggtcagcgcagaatttggttcctatcagcttccgtagcgtccctaacgacttccgcctctggcgggccgcagtggtggaggaacttccggcagcggcagctcaagtggccaaggcaagatggtgagtgactaagggtttctttccgctggtcgtcgcggtgcgatggggtctcagcagcctgaggcgagagaaagaggcggctgcccgaggaactgggacagccctcttctccttttgccggcctgatcttctcggcgggtggaggctcccagagaccgcgctcatgtccaccgcgggccggggccgaccaacgggccttgcccggggatcctggggccggggctcagagcagagagagggtctcctgcgtggtcttgtggggcggcagaacggatcaggccgctggctttgctgctccgccgaccagggctttgctgatcggcgctgggagtttcgggggcgcctcctcgagtcaccgggaaaaatgctttttgagtcgggcaggtgaagggtgctggagaagagggtgggattcattccacctgaggagttgagcgcggagtcgtggaaggcctttcggagctgggggcatttgaaggaggccttaaagacgttgttatgacaggcggagctaagacggaaagggcccgtggtgcagtagtaataataaaaacagctagcatttattcatcaattcactaaacaagtatttactgagcacttggtgttttgttgttgttgttaaacttttggctagcttctgttgtagacactgaggattgattgaagtccctgccttcatagtgcgtacattctagagcagaaggcagacaatcatcagaaatatgtaatatgatgtcaggggtggggtggtcattgttgtatggttattgtatagaaagggatagcttggaggagtggctgctttttatagagtcagcgaaggtagctctgaggaggtgaaatttgagcggaccgaaattgagggagtaacccctgcagatgtctgagggaaatgtggtcaaggcagaagatacagcaagtgcaaaggacctgagatgggaatgtttaacctgtatcatgaacggcaagaaggccagatctcatagagg

SEQ ID NO: 61050 - DNA, 880 bp, Homo sapiens
catttacacacccaaaaagtgtgcaagatgtgagaggctggcagcccacattattactatcgagaaagaacatttcaaaagccgagttctcctaacacacacgttctctgctcgcgcctcctagctccgcagggtgggcaacttggcctcgcaggcacagcccgttttcccgctgctctctaatcctccagcagcagctccagctcctccagcggcaggcgcacccggagctccttctcagtcatcaggtccaggatctcctgcatctcatcggggaaatactccacggcgtccaggtacaacacctagggggcaggcaggaaggccgccccactcagccgccacttcctgtcagcctggaggagctcaggaagcaagggccaggttcctggtgaccctgccctcctgtcgccctccacggcccctgctccccttggctgagactttcttaactcgggcagcactgggcatgttcaggaaggacactgaactcgcaaaagtgagcaaacgccaagcgaggccttctcttttaaaaggggtccaggaattgctggccgtcgccctcagtttcacttctgagtgtcacctgacctgggctctcacagccaggctgggacatgatcccaactctttcagcatctgggctggactctgaccaaatgctgggaaaccagctacccacggcaacacttccatgaagcaccagccccaggtagggccaggctctgactccacaggggacagtttcaccaggaaaaggctctggatgtaccttgggacagggtatggcgtccatgagccgagcatccccggtgccgcggggcaggccgggaagacactagctggacggagacctggcgggaagttttcgggaagctga

SEQ ID NO: 61051 - DNA, 1694 bp, Homo sapiens
aggagaaacgttacagaaagtgtaggaactatattagaggatataacagacaggtaagactcaattgcgccctgtcacatatggcacataatttagaattacttttttttcttttttttttagagacaaggtccccccaccccagggcaggatgcagcggcacgatcatggctcactgcggcctcaaacttctgggctcaagcaatcctcctacctcagcctcctgaggagctgatactataggtgtgcaccaccacgcctggctttttttttaagagacaggagtctcgctatgttgatcatgatggtcatgaactcccgggctcaaactatccttccacctacaggtgtgggccactgctcctggccaggattaattacttcttaaatgaactatgtaccccaattttgaacaatgcagctctgctggaaatgtctgggacttaagtaaaatgtgtaaagccataacctgatacacactaggccctcaagaataaatgttagttattttcactgggtgctgtgcccctccagagagaaactgattaggttttggatactaatcccctagctctaggccgctaagtaataccaatctaataagcatttcagaaataagtataacaggaaaggaagtaatatgtaataaaaacattctgcatttgcatcaagggtttcctcgagatgtcgagtatcattattcccaatttaaagatgaagtaactgaggctcgaaaagaagaacaggacctaacaacatcgtacagaagtcccagctccagggcatctgctggtctttctccacccctccataactctacaaccttggtccagaacaggcctctgggccccagacctcggagggattgagcctttcccagaaggctttgcagcgccgcggagaactctgggatacaaatggatacacaaatccaaagcaaaagtctagacctgggcccgagaaacagcctcttaagccccccaggtgccttcttcggctcgtttgtgtgcttacctttcctggagctcccgccatcgggagcctcactaagccccgcaaaggctgggaacagcgccatgaccacaggccgtacctccgttcttctctatagggatggcgccggcgagcgagcgccggtctgaggacccctgccgtcgcggtgcactctgggaaatgtggttttcgcggcgctctctggggcttgaccccgaagcgggaggggcggggcccagagaggagggtcgtcaagggactggggcgcggcggggcagggagaggcagggcaaagcagggtggggcggggccaaggggggcggagcgaggagtgacgggttcctagtggttgggaccctgtgagaaccggaactgcgaaaaccggagaagggaattgttgaccgcgaaagggactaaggaaattgggattccagttcgacccctaaattcacaccatccttgctaactgggtcaacttaaacgctctaagcattactttccttatctgcaaaatattgagaagattaaatgaacatatttataaagggcctagcattgagtccggcccatgaaaagcacttaatatgtgttagctattatgtgaattacgactgcaagttcggctcaaagtcatgtgagatatccgaacttcaatcaggttaccatattaaataccccagaacaaggaaaaatggaaagtc

SEQ ID NO: 61052 - DNA, 622 bp, Homo sapiens
gctggtaacaatcttaggggcatctatcaaattaaatttgtaaattgaaaaacacagcaactattaccaggttaatgcatgctattaattcatattgaatcacaaaatattattgccagaagaaaattaacatcatctactttagtcctgcctatttctatgtaaagaaaccagagtgcagataccagagctttgcccaagatcacatgacaaagtgagtagcagagagaggaccagaatcctggtctccttcctcccaatctgtatcagtcctattgttcccagtatttcttcaactcctcatggtggcatcaaagtccaaatgactgctctgctgtcgagccctatccttgcagtttgccacagattgctgtttccttgtcaaagagtcactcatgagtcaccactaggacaaggatctggactccacatggaagcatggaattccacaactctcttcataaaccagttgtgtgcatctcaaactgggtgtgatgatgtgtggggtacttgaagtcacaggataaataagtactatctcctttgatgattttggtggtggtggggggcaacatctttttaattagaaggaacataaaatgtgtatgaatgtcaaacatga

SEQ ID NO: 61053 - DNA, 2930 bp, Homo sapiens
gcaaagctgcaagtttctttctattgccatgcccaggaactcagtgctttgacattacactgatttacaataatatgaagtgttaattttaagcacaaggtaccctaaggtaaggtgtcggctgacctaagggaaaaggcaaaaaagccaatacataaatgtccaaaaccagtaagattaagcaagaacagcaataatctgcaaatcaaaatgtatggcaaatggtacaaaaactatgctcccagatgcagcatctaatcagaaaatctacacacggtagtgagtatacctgtattaatcaatacagaaaatcaacatgcccgagtgtgcctgcattgatcgatccaggaatcttggccggggatggaatggtgaaagccaggatagataaaccacggtagtaacgtactactaatgctccatacacttaaggggcctggccctgccaggtttattgaccctgcaattcaccagctacctcctcctgtcgccatggcaacacccacacccaagcagctccagaattcacctttggatatccagaattcacctttggatatccacaatccaccgaatttgcacctacgcagttcaaataaaccaacaaaagatatccccacccgctaaactgagacaaccacgaccttttccatttccccgatctctaattcatccacggaacatgtctttaatttttcacccatatccactgaagggagggtgagtcctaaacaacgaccacttttgatacagtaagaggttttttcctttcctccccctcccccactctttttttgcggggttggacatcagagacgaatgaaaaccggatgcgcacacaaacaacatttgcctaaaaaagacaagttagttggtatgatcaaaataattttcagccaacgtctcgtggcacgtctgtcaggcaagctgagttttgcctctgcaggcgaccgcctctggagctgagaaatagtttccagcgcggctgtttgatttacagctctcaaaagcaaaaacgcattctgtgccgacgggaccgcgcacagcgtgagcaacaaccatgacgtattcgggagagttttccagaacggctctccggctccagcaagatgcccaggcagcaaatctcatttctgctgggagaaatggaatcaaatcgcaccccactgcccgagcccacagaacgcaaatcaagcggtttcattacaacggtagttaaacccttcctcagaccctgagctctgccccgagccccggggcctcgctttctacccccaccacatccctaggacctgggaaaaacaaaacgacccgccgtagaggaaaaggaaaccccaaacaaaactcgggcgcagagcctatttctactggccaaagagcgccgccaagaccccttccgtccggggctgtccgcgctgccactagtaaagatggcggccataggcggagccgctcactccgaaggccgcaggctaccctgccggccacgaccattcacgcggagccctccacgcccttcgcggcttgacgcattgcaggtgcagcgcgaccaatcagacggcgcggctcttttcggccaaccactgcagggtcgcgccggcctatcagagcgtccttgtcaaactgaacgaggaaagaagcctcagcagcgccaactaagcaaccggctacagaccgcgttccggtgcgtgtgtgacgacaccgccgtgtgctcctccgctgggagatatagtgccctcgcccttgcctcgccccgcccgcgagcgctccaaaggcttgggcgtgcggcttgctcttcctctccgcttgacgggcggtggttcccccgagacagaaacttgactgaaaaataataccaaatacccgtgctgcggcccgtggccctccatagggccacctgaactagcctcgcctgtccccttgctctttgccgttcgtccttcgcgttttgtgaaaacagttggcgccgcagaaatgagataaacgcccctgagctcgaaacccgcactcgaactgccaccgagccgacccttcctgttttggaactcagggcccggccacccgagaagcaccctcatgggcactttgtttctacaagggcccgtttccatttccttcctaaggtttccttatcccctgcggcaggaggggcccgctgggctcgggttttcagctgcgttggagctgcagaggctgcggagtgaacgcggccaggagcccgcctgggagcgcgcagcgctctaggagccgagagccgctgcttggccctcgctggccgggtaaaccgaggggaagctcctggcctcctttcccttaagccccttattgcttctgtggggaaggccctcctaggtagaggcgaaggaccggggagataacctctcccatgggccacatccgctgccatggtctgtgtcgtgccagaaggtacctctcagccctcagtgccgtgaaaaatctgacactcaagaaggtcgattgacacgcctaacgtcgcacagcaatttagtagcacagcacagaatagaagctacccaggctggctgtctcccaagcctgtgtttctctaccacacacagtaacactgcgtcttccagagctgaagctgtagtcgtgagatggctcaagcatttgggggaactggaaggcagacctgggaatgaagagaattgttttctttgagcagaattttcagtcagtggcctacagaaaaagtagagaagaaacattacttggttattgtcactgttccaagaggctagctaagaaaattaaatcgtgtggatttcttaaaactgctgtttcgtgtaacctccaaacatctatctgtgactttggcacaaggtggcttggatgtctgatctttgtgattgaactatattcacatcctgtttctaagattgtgttactaatggtttttcctgaggttt

SEQ ID NO: 61054 - DNA, 2494 bp, Homo sapiens
atcaggaaaattacgaaaaatttaaagcctgggtttaaggtctgtagaagctgcacaggtacactaattttagtaagacgggcgccaggaaaaagaacaaaatagtaggggagaaatattcaggcatcctaaaaaatattcagtggaaacgtaaaaacattaaagactgattaaacatcgcagcatgacacagatttagcaactgagcataaataatttgactcggatactgctccaaaatccgaagaggaccaatttcttccaggaggacaactacctcgtcctctgcagacccctctcctcggcagctgaaggagtgtggccaatctgcctccacctccccgcggaccccctactctcaggacctcctgcagcaccccaaactggaagtggccgctgcagacccaaggacgaggggcacgcgggagccggcagccctagtggagcggttggagatgttgaggtgggagggtcacccaggtggggtgaggctggggtaggtagcggagtgaacggcttccgaagctctgggccgcccccaggttggactaagcaggcgctctgtcttcgcccccgcccagggtgggcgtctcctgaggactccccgccacacctgacccgagaccgcgcgcccagcctagaacgcttccccgacccagcgtagggccgccgcgactggcgcgcagggggcggcgggaggcctggcgaacccgggggcgggaccaggcgggcaaggcccggctgccgcagcgccgctctgcgcgaggcggctccgccgcggcggagggatacggcgcaccatatatatatcgcggggcgcagactcgcgctccggcagtggtgctgggagtgtcgtggacgccgtgccgttactcgtagtcaggcggcggcgcaggcggcggcggcggcatagcgcacagcgcgccttagcagcagcagcagcagcagcggcatcggaggtacccccgccgtcgcagcccccgcgctggtgcagccaccctcgctccctctgctcttcctcccttcgctcgcaccatggtaggtcgggagtggcaaatgccggcgtagcagctgcccgagatttcttcccagatttctagttgttttgtttgttttttgtttgtttttggttcttggaggtttttcttttctgagtgttacgcagcagctgcgcttaaaggaggttgcattttggatttgcatctcggcgacctctgccagggagcttcatttattggttccccttggagctggacttggtcgtaggccgtccacgggcaggggctccggccgcaactgcagcgggggtttctgcatccaatccccctgccccccgcccagccccgcacccactgcatccactagcgccgcacccgggctgcctgcagcgcagcgtttcggcctgggagccgggcggggccgggcactagacccccccccccggcccgcccctccccaccccgcttctccgccggcgcgaaggtggcaggtcgggcgggcagtggagaatgaatgggctggagctggccggtggcgcacattgttccggccgggtgttgaggggcgcagtcagcgcccgccacctccccactttggccggccctgctgggcgccctccctcggtcgctctcccctccttcttcccggggggcgcggcgcgggcgtgggctgggaaggaaggagccggggaagggtggggttgggggcaggaaggcgaggggttgggggcggagagggcggaagcggcggccgggccgccctgcgcccgggcggggccctgcggtgtggccgtggcttgttcctgccgctttcgcaccctgcggccccccacccagtgcagcagtgcgggcgggcgtgagcctcggtgcaccaggaggcacttcccgcgggaggcgctgggctcgcgctaattggggcggggggggggggcggcgggggaggagggaactggcgcgcggcttggtttccattagagacgcaaagtttctgctccgggaggaggcggcggcgccgcgggctcgtcgcctgggggagcagaagcgggtgggaggtgcgggtggccttggcctcagccctggtgcgcgggggccgggggtggtgaccctcctggccgaggaggggcggcgtccagacgcccgctcgggggccgccttcccccccacgcctgcccccgggcacgcgccctgcccggtccctcgccccgcgccacttccagtccgcagagagatgccctccacgtttctgctttctctgcagcctctagattgccagatgcgactgtgcgcctcgctgggtgtgttttccacagccccttcctcctcggcgtgcagggctgacatcaccgactgcgtttctggtttggcgggtggggagatggttccccgcagggttctggtacacctttgcccccagggctagcgccatttgggggaggaggttttcgttgtcgagaaagttggatgctcctggtaacccctctaacaagagagttctg

SEQ ID NO: 61055 - DNA, 620 bp, Homo sapiens
acctggcttctggatttggttctgtccctccagcctcaggcaggttctttacctttcccaggccttggtatcctccttggtaagatcatattggacttggtaccttctgcctgtggctttctaggattatgaccgacctggtttggcatcactttgtgtttagatagatgaaattgcagcctaaaggatgggaggcaaaattgtgtaggagtgctgtgtcctttgagatgacaaatgggatttaaaaattctcaccagcttcatgttggaggtggagtggaggttaagcttgctattaagacgtgatgtaatattggaacctgggtcagagaaactgattgttaagtgacttccattctcccaggacggaaataggaggctaccactgggcctgtaagggattcagtccaagtgacatcatctggttttcagcagctccggtttagaaaaacacacacacatttccgattcaagctgaactttcccgggcactggggggctggagcacccaatgactcaggatgccttagaaggaaataaaacataaagctttttatagcttggtgcttctctcccactgccctcaactctctgccaaggagtgggaggagttagctcat

SEQ ID NO: 61056 - DNA, 633 bp, Homo sapiens
cagtccagtgagaaagacagatactgaacaagaaagctgggcaaaaggaagaagtgcaggctgctacaggagcaaggcttcatggaggaggcgagagaagctgtcagcgtaggggagagatcagatggtcaatcaatgcccacacctgctgcagaagcccagctgtgagccacagtcaggtgacaggacctttacagggaggtatcctggtttccttagtccctaggttgccaatggaagccacttctcaatgccattcccaagcaaccaggaagacaggtgcatacctcagcccaggcctgccaggggaatggcatgtctggagagctgacctttgaatcaccctcccagtcagcactcaggaatgtgctggggttaccaccagtgtcttgcacctggtgggtggccaggcatgtggccaacatccccagaacagctgggaggggataggagggtttcgggaatggcagaggcagcatctaaaagctgcctttgggaagatgaaggccgacaaaacttgcccctcccgcaaggagatagtgttaagtcccctttttcgagtagccacggtgtgtaactgttcatgttttccacgtattgtaaaggacctggttcttttgtctctgcctgctg

SEQ ID NO: 61057 - DNA, 835 bp, Homo sapiens
gacacagaagtgaagggcctgctcaagctcacaggcccagtgagagagtgagctgggagctttctaccgtactctgttaccttcctgggtacacataagctctaaaacagaagtgtaactctagaggaaggaacaaaatatgaatccaagagttcaggtctatgttttgcatcattaatatgcaaattacttcatatatttataacataaattctgtgtgtcccagtgatgacagctaataagatactcattactggtccaaaactggaaagaaaatccgttggcccaggtgaagaagtccagtgaatgcgggtaatgccctgggctgccgaaagagatcaatgacgggtagagaaattcaattcccccgttaaggtgcaagacggtttctcccatgcaggaccgaggccctctggtggaggaacggaggaagtctccgccccgaaggaggccaggcaggatgaggcaacaccagccactgggtgcgtattcccaattaagcctttgaagcaaatacaagtttttctcaaactgtttccagtttattcctggagagagtttaagattcagaagcaaattcttcctcaatctgggaagcatctgcttgtaaacaaagaagccacagtaaccacagagctgagaaggcctgaagctacaacccattgcaatgaatgcggcacccagaagggtgcccgccccaccacagatcaatcggacagcaagaagaggtgaaacaggcacatcttaaagtgcccaaatgtaaaagcatgattcccaggaaatcctgtcttccaaacatgtttaaatcacataatcataattttattcaactaat

SEQ ID NO: 61058 - DNA, 1421 bp, Homo sapiens
tgagtgtgaacgcctcccagagagctcggcttggtgagtccctaagaaggctcactaatgcgaggttaatcaagagagttggcaagtttgcctttcttctccatccctgaactcgagttgaatcgcggaatcaacccaagtacaggggcttcaaatggtcagccggccttggggcaccactgtcccggtggccgcggcaggaaccagtcctgcagtcctgcggcggcacctgcgcgagatgcagggcactggctccaggacggcggggcggggcggggcggggcgcggcggggcgagagcgcaaggaggggcggggcgagacggggcaagagagtggggcggggcggggtcggggacagcagtgagcggggcggggcgaaacgcgaggggaggggagatgggcggggcggggcagggggggcacggtcccaaggccgacccggccgaggacgcccggagcagctccgcgcatgcgcaactgtggcgcgcgactgcgctagaacgcggctcccgcgacccctggcggcggctgccgaggggctgcgggacgaccttgggcggcagctagcagcgagtcctagctgatgtggccctgagtcagcttttagaggtcccaagactcgttcacaggccgctaaacgcaaactaaggcacctcccagcacaccaggatcgacgtgtcctccttcagtccggactcggcggaatctgcacctgggagcccctccccaaatgacctgctagccgcagtccaggaagcaggcacccctcactccccttctcaaatgggggctctattcctgtctctagctctggagttgttgtgaggataaagggaggtaagggacaagtgcttagaacagtgtctagaaggaattattttaatgctgtagtcattattaataatgtattatatttttacaattccagaacctggcacacagtaggcactcaacaaaccgttcctctgtctgtcttgagagactgcggtgggccctgcagggcagctgcctgcctctgcctggttcgaggaaggcccagccaggccggccccagcttccttcctgctcttctgtcccactccgacccactccggagagccacgctctgagccgcacatgactctctccttctccacagaacaatctgtgttctgctcccgcccccgagagagttctgagctttccaaatatggatgctttttgcattcccaaagcatcacgaacatttgggagaagaaaatgaacaccagacatggtttggaaacgatggaagccaagggatgggtggtgacggaacaagcaccgtactaggagttttaaaatataaaacacgagtctggcctaggtgatgtcttacaaccttactagctttgtagcagtctaggccccaaagagatcctagaagtaagcacccaaaccc

SEQ ID NO: 61059 - DNA, 1114 bp, Homo sapiens
ccatctcaaaaaaaaagaaagagagaaagaaacagagaaagaaagaaagaaagaaagagagagagagagaaggaaagaaaagaaagaaagaaagaaaaagaaagaaagaaagaaaggaaagaaactttgctgaaatgtttttccttcatccccttcagtgacagctgatggccactggcttggagggacaaatccctgctgggcttagcatgacccagcatgtgctgcagggcggccccagcagccttgctgggaactgccaggttcatcaccagccaagggccaagggtcaaataggcagctccgaagaggcgctgctggctccaggtcacgggacactgtgttagaaggcacgggcctcacctttggtagcgtaggcttctgcgatcacccgcagcctgtagggcgggacagctgtcagtggcagatcgtccaggcccacccgggcgtaaatgttcagagcttctttataatcaccttccacataattcaacttggccatgatcagattggattcttgtaggaattctgactagaagcaaaaggagagaaagaaaagcattttcctacaatatcaggcatgatgctccctcagagtctggccagctgctgccgtaaaaccccacagctccccgcacaagagcttggacgtgaatgttctgagcagtgttatccacaatagccaaacagtggaaacaacccaaatgtccaccaaaatgtgggctagccataaaatggaatattgctcagttgtagtaaagaatgaagtactgttatgctacaacatagacgaaccctaaaaacatgatgccaagtgaaaaatccagtcacaaaaggccacatattgtatgcttccacgtgtatgaaatgtccaggatagtcaagtctagagttagaaaacagattagtcttggctaggaatgggaggtggctgctggtgataatggggtttctttgggaggtgatgaaaatgttctagaattcattgtggtgatggttgcacaacttcatgaatatactaaaaatcactgaagtggacactctgaatgggtgagttgtatggtatgtgaatcacacttcaataaagctgttgcaaaaaccaaaccaaaacaaa

SEQ ID NO: 61060 - DNA, 871 bp, Homo sapiens
tcagagcaaaggctcccacacttgcctactcaaactaactgaggctgtttacaaatgtagatttccagcttctaccttgggccgagagaatcaccaccctcagccaagatgtctggtaatctataaactacacttagtttagtatttggctcaaagcatgctgcatacctgcaacactgggagcttaagaatgcagaaccccagctccaccctagacctactatatcagtatctctgggagtggggctttgcaatctggattctaacaagctgtctagaagtgattctttgatccaatcagtttagaaaaacattagtgtaatagaagaacagtgaaactagttggaagtgggctagaatccagttcaattaacggctctagcctcagtctactcaagccctgaatgagaattacccctgacatcattcgcttgttgtgatgattaactgagatctgtgtaaaagttcatagccagaatctggcacacaagagagacgcaagaggctgggcacagtggctcacgcctgtaatcccagcactttgggaggccgagggaagaagatcacttgagcccaggagttcgagaccagagtgggcaacatagggaaacccgtctctacagaaaaaatgaagagagagagagagaaagacagagagagacccaagaaatgcagttcattcttcttccctgctagcactattttaacactcatcaagtcaggacagctacagtttcagatgatcatgtgatgtgtacaaggtggcttggagggcaaatgcagaagattctgactccaggcctggtggcctctaaaaggaccagaccagatctgctctacatggttctggtgctgccaccactagccacac

SEQ ID NO: 61061 - DNA, 522 bp, Homo sapiens
ttgaccgggcactagctcaactgtgtcatttcttggtcccccactctcttttttccctgccaggctgacagctgggacctggcctaccttgcccagggtcacaaggggtcagctgcagggaaccaaccccattatgaccatgtgccctggctgacaggtaccatcccactgaatcctcacacgtgccctgagagtgggcattctgagctggctgagcagggaggaaaggcaggctccgagaggctaagaacctggctggagatcacctagccactacaggtaaggtccaaattttagacccggtgccaggtcactgcactttcacacacagtggtgacctcatcattgggaggctggagggtgacattctgtagagagaggacagctgggcctgtcctcccagagaccaggaccgacctgtgagcccacatgaagctgatgtgcagctctgtctttatccctgagcgctcaggctgctgcctcagctccaagccagggcacctcaggcttctctgagtcccc

SEQ ID NO: 61062 - DNA, 592 bp, Homo sapiens
ttctgggtagtctgaagtgagaaggttgaaaatagtgcagatgtcctttcttagagcagccccgccatccattcattcactctttcattcatttgttcagccaacatgtgctcactgggcctggggaagcccaggatgaaatgagacaaaccctctgccctctggccacggtgtgctggtgcctgcgctttaggcgggtactaaaagacaagcaaatattaaagatactcgcttccaaaacaaataaggccacgtggagctgtgcactggaatgggattctggatgcaattttatttgattgggtacaagaaccaatccagttaaaggggtcatgaaccaactccaggcaccaggctcctactcagaggctgcctcagacccccttctggcccaggcaccaacccctcacccacccaactccatctcccgacattcttcaaccacattcccatctcgctccacaatattctccctccaggtccccctgactctatttctcctctattcccaaccctgacctctctaggtcggcagccttgatgctacttctccgaacgccaggacgcacatcccagcctgctttctaccacc

SEQ ID NO: 61063 - DNA, 719 bp, Homo sapiens
atggttattaactgagtgtgtattatctgcctcccctcactagagcaaaagccccaggagggcagggatttgtgtgtggttctgttcacaacagcatttcccagcactgagaacggtgcctgatgcatggtgagtactcagtcaatacaggttgaatgaatgaatgagctgaaggaaggtggaggggctgggattgggcaggtgagcatcctggtgaacagccccacagggaagtggagatccactgtctgaagccgatgggcaggttgaagggggagacagaaacccagaaacggggatccacaaggggcctcagtgtgccagcagaaagaatgatcacctctaacctttggcctcaccctgccggggcaacagccctgtcatctcgctgccagagccagggacaggccttgcagccccaggaggtgtgagccatcagcagctggtgctgtgggcggtcgctgcggcgatgctcacggggaacctggaaaccacaccacagcttgcaggcccggggcgtgagtaatgagagtgcagtcatgatagctggctttggctggcttttaattatgtaatatttgatacatacaaaaatacccagaatcaaggggcacctacataataaaataataagatgaacaccagggaaactattggctatcccagagttaactacattgtgatttttgtgtttgttatacccttgctttgttttttag

SEQ ID NO: 61064 - DNA, 1236 bp, Homo sapiens
gtcacggacgtagggaggggaagatgaaggtcccagcaaaatcccgggaacatacctgtcaaagggtcagcgagaaaaccagtcccttggctggttgaaaggaacacttgattctttgtcagaaagcagccttgcgcttctaaggggtctgctgtctgaaagaagccttcgaggctcgcagacctggggaagaactcaacctgccttcagcccatggggactggggccggcgcggctttctggaatcgaacggaacgaggcgaccaggcgcggcggcggcagccaatgagggagcctcctgatgaggtcatgcagttcctgggcgcttcattggcggatccttcgcggggccgcggcgggggccgcagggcggagcgaggcggggcgaggcggggcggaggcggtgcctgccagagcccggacctaaaaccgcggttcgattttccttatttcctcccagcgcttatttcccctgagcgcgatgggtcaggcccttcttaagagagcagtgaaaatacccagaaaaaagggcttttactcactccagagactgggtttacttattttgggtgagccctcattttctttagtaaaagtggagggttgtttagttttgtttcaatccaggccaaacgcactattaactctaaccatttagcaacgctgagagaatgtcccttggtagccttttatttgcccactgtggtcctctaacccgctgtgttgggagcaccgaacaccagctttgttccacagacgtggaaacagacccaggcgacttgcccagggttatgtggccattcagtgggacagtgggggaacagagaactaagcttttggtccctgctgcctgcccaggggacccactctcatgaccctgggtcacagcccagggctccccacagcccagggctccccacaaggaaaggcagtcaagtcaaccttgctgcttcctgttgcaagcttttgatacatcagtttcattttcaaaataccgcccagagtagtctatggtcagcagaaagatgctgacagcactgtctattctaggaagttattttcgaatgaactacagtgtgagggacggttggaatgtccctgatgctgaaggagcctggcagctattacgctggtcctcagcccaccaggccttcctttttaagaggtatctaggaacttgcataatgcctctgttttgttgcagtctaagggcgctgaccctttgcccagagagaa

SEQ ID NO: 61065 - DNA, 694 bp, Homo sapiens
caggttatcatcatatgtaaccataaaataaaaacaataagttaaaatcttctctcaagaaataagtatatgccacacataaaattcattacagaatcttttttgaaaacagacccctttctctgataaatcattgtttgaagggtgcaaatttcaaaaacccacattgtccacaaggcaaagcaaaaggtatcatcacagtatgagtcatttcttgttggcagacatctggaaaacctgtgacttacaagcagctcaaatctagccctaattaaatttacaggaacctttgctctttcaagaatagtcttgttggcatcatgctaggttgctaaaaagagtaatatgtgctctattcacagtaacattctctgtccagtgcttttgaatgaggataaccaaacaggttttcctgaaaaaaatcattaggaggcagattccaatgagaccaacgggaaacatttttaaaagcataaaagatcgcctcaggcatatgctgagggaataaaggtgcaatggatcactgatacactcctaccatgcctaagctactgagtccgagaactggaagagggtctccgggttattgctgtcggcaggattgctgggctgcagtgtcttggtgggtgtagttttaccgtgagaatgagaggaagaagaatgggaactctcactggaactgctgcgcgtctcg

SEQ ID NO: 61066 - DNA, 501 bp, Homo sapiens
cttaacgtgacatgccacacaaacctgaaagtcatttctttttaatgtcatgccaaaaccatctcagtttatttttgtttggttttagctcaacattctaatagtacactctataaatgcatttcagcttatcaaaatcattacaaagttctgactaagaacatcttatcaatcttgtgaattagtcatatttacttcaaagcaaggaagtgttttcagttactgtctgtttcgtcatactagtgactgtaatatatcatgaaccattctgttaccatctcagcaattacaattattgctcacccttacaattattgagatgaaaccaatactcaaaagtgaaactttaatttttaaatacctcttaactccattgaaagaatgactcatgatcacaaaactgtctacaaggctgggatggcattcattattgggaatgatccttggcattacctttacaaacactttggtgatttgcttatttaacatcttgtgaattct

SEQ ID NO: 61067 - DNA, 1022 bp, Homo sapiens
aagtcatcccaaatgaaccaaaaagcatatagccaacttactcagaacaagaatatgatgtacaagaataatgatcaaattgaatggtgaaacccaaatattataatggggatccaatggaatgtgaagtatatcaataatgtccatgtctctacctagtatgaaagcctggtctgctacccatcactaaaccacttatgaaacaacctgtctgctcacttctctgtgtctttccaataaatatcagagtggcagcaactagaggatggttggtggcagttaaagcagaaaaaaaaggttgagcatctaagaattcaggtcctacctcagtttcctaccacatttttagactggaaataaatgcctgaatttgaaaatgtttacatggtttgcatggtttctgattctgtttctgtgtgttacatttcaaggaactagatgtttgctatgacttcaagtgaaattgaaattgaaactaaaatcgggaacaagtatgcacatgtacttatgctcttgcatacttatgtaattacaaatatatattcaatataatttaagatttgtgtactactgtccgggcgtggttgctcacacatgtaatcccagcactttgggaggccgaggcaggcagatcaccaggtcaggagttcgagaccagcttagccagcatggtgaaaccccatctctactaaaaatgtaaaaattagctgggcatggtggcgcacgcctgtaatcccagctactcaggaggctggggcaggagaatcacttgaaccgaggaggcggaggttgtagtgaggtgagatcacgccactgcactccagcctggcaacagagtaaaactctatctaaaaaaaaaaaaaaaaaaaagatttgtgtactactcttctacctatgggcccatccttgttccttagtctcagctctacaaataagtatattaagtgctcaccatcaggttgttttctcaatctgtttggatgaaattcattgtctagtagatcctcagggagactacctgt

SEQ ID NO: 61068 - DNA, 1611 bp, Homo sapiens
tggagctttaaatttctaaagccatcatctccagggacctctgaaggaaattcaaggccaagtatagtatttcatgataagtgagaataaaggcactcaatccctggagccggcgattcctgttcctgtctctagactggactcggtaaaagcccgaggcgaaacctcccgtttatctcctacaggaccccagcaccttaggggatggctccacagagccccaccgggaccccccatcgcggggaccagaggggcggaggagggagacactctccaaaacaaagcgccgctcgccccacgcggaggcaggcgcacctttcgccctgacaggacgcagacacacgtgtgtcacctgtgcgggaagggggagcagcgacatcctcggaggtgcgtgccacgggcagcggtcggcggctgcgctggccccgatgcctggtgcccgccgctcattcccgggctggggaaaactttcggccgcctcccccaaggcgcgcccccacctcccgggacccccggggcacgcgccccgaccgcgacgccccgccccaggcccgcccctccgcgcccacggctgcggccccgcgcccccagccccgcgcgggcacccgcgtgccctcaggcgcgcccccgcgccgggcccggccggcagagggcggggtcgctcaccagtccgcagctcgtgcttgacagtgaggagctgctctcctccgtcgccgccgtccgcgctggtccccgcggcgccgccgctgctgccaccctcctcctccatcttctcctttttttccgatcccgcgggtcgctacgaggggaacccaggagacagcggacgcccgtcccctcgcagccgctgccgcggccccaggagtcggggtgcggcggctccagaactcggacgcaaagacgagtctctttcccgctctggccgcacggctcgctcctcgcctcctcccccttcggcgggcaccgctagtaccgcgcaaccaaaccgccccctgctccaccgccgcctcctcaggccgctccgcccacagccagcaaggtaagggagccattcgagccgccttcgctgattggacacagggcgcgcgcgtctgccaacgccggttcccattgggcagtacgctgtgacgtttcacgagcctccccgcctcgctcctcgaattgttgttgcttggcggggaggcaggagagggaggagcgccgccactccgattggtgagacccaaagctctgccccgcccatttcctctggtgcgcactcgcagtcaagaccttcccttccctgacctccccagaacggtcacaccccttattccccagcttcgatctgttagtaaacagtgtctagtagtcaggaggcgctcggggtctctgattggctactgccgaaagaggcggggagggatgattggaacgtttggtccgccaatcaccgtggacagaggaggggcctggagggtagcgcttatcacccacgtgtttgcagacaaacctaagggtcccggcagcgatccatgcgtgtgtgacaaccagcgagacggcgtgccctaaaaaggtcttactcgctctagtgaaccctaaacaagttaagcagagtgtttgttcttaaat

SEQ ID NO: 61069 - DNA, 846 bp, Homo sapiens
aacaactggctcacaaacttcccaaaaatttaacactcagctcccacaagcttgtgtgagccacctccagcctcaggatgagtacctgcctcatcctgaccactgctgcaggcctgtcctcttgccaaaaagatgtcatttcttagaaggcagactcgatactctatgaggacagggattgtgttaccttgttgatcattgaataacccatgtggcccatggccagcacatcctcggtacactcagtacatatttatggaatgagagtaagggactttccttgtaagcgcagcaacagttaatgaatgcttagcaagtaataggctcctataaatattggctgattgaatagtggaaaataatggaataaaagaaaatttaatgcatgtaggtctttagcttatttatcttgatgagttaagtaaaggtaaaagatgtctgttctgctctaggcacagagcaagctctctctgcatttgggatacagtgtaaggagaatgagagaagatgaagagccgaagaaaggaggctgcttgatgcaggaggtagctttagaagaattaaggccaacaaatgggactacttcctaacctactgaagagaacagcagtttaagaaaggaggtcacatggtgtggggtcagagtttccaaacacttttaaacaaatgcccttcactggccaggcacggtgactcatgcctataatcccaatactttgggaggccgaggcaggcagatcacttgaggtcaggagctcgagaccagcctggccaacatggtgaaaccccgtctctacaaaaaatacaaaaattagccaggcatgggagcataaacatgtagtccca

SEQ ID NO: 61070 - DNA, 2196 bp, Homo sapiens
tcacagtgtggcccacggaccagcagctgcatcttgtgggagctttttagaaatgcagaatctctgcctgaccctagatcttctggatcaagcctgcactttcacaggatcccctagtgatcccagtgcacactgaagtttgtacagcacagatggcgattcaccagatcggctgcacattggaatcacttgagggatttcaaaaatccttagtgcccaggccatacacccctagatcaattacatctgcatttctgggtctgtcacccaggcatcaggatttttcaaaattacccctctgttgagccggggagagcaggttaactcttgcagggagaactgggcttgcagggtccagccagctgccagcagctctgcagctttaagaactggggcgggctagctgccgaggagaccacgctgctgcatgggccacgtgagctcaggctgtgggagcggatggagctgctacagtcagcgcttggggctggcctcagcttgtagacccgagccctgcagaacaaccccccgtggcgcaggagagcagaagaaagggggcctttatgcccttttgagggaagcacacattctgcaaggccgtggaaacaaagggaggaactgtttgtagccctcgtccagacgccccaaacaaacagtaagtcagaagggaacagagcacagcacagtccctccctccgccccaggcagtatccaccttgccccgccccacctaaggagcccaagggtattctgggagcccaccccaggacaatggcagggcaaaaccagtgagcaaggcagaaaattcctgaaattctccactgaggcccagctgttcctctccttgaaaagtcaaggcttggttcaagccagatagcacctgaggacagaacatatcaggtattggtagtgtttctcctctgttctctctcctgcaaggccctttcagtccttgtcactgcccttgagaactcccaggtcacatgaaggcaaagaaagtaaaactgaaactgcctttgagccacaggcttgctggggatgaggtgacaaagctaatcgaggtggcaattggggaaggggttctgggctgccgcaggcacacaggccagagcttcgtggatacctgcagggcccaaaggtccctccctgttttgaagagtgagtgatggctatgaggtagcggccaggctgatcacccctgcgttggctggaggcagaattctgtaaatcctcgccaagtctttctccaggccactggttagctcatctcagcctcctctgggagcatcaacaccaacatggcacaggggactgcagtggtgtgctttggacctgtgtacccacccaaggctaaaggcagagccaggtgactttgcgggggtctcttctctaggattatctgtacttcccctctgtcctcttttactacgggagatcgagctagctataacccaccttctttcatgagaaccacactaaattgcaaaaattatcccagtgctggaggagggcagcaggttgagattatgttggcaggaagaatgttggcattgattggcacgcaggggacgagagctgctttgtgctttaaaggtaactgagtatgagctaaaaagaaggaaaggagaggccgagagtaggaagaagaaagaaagctgacttggctggaggggtggagtgaagctgaggaagcaggaaggggaaggaggtgatgggtgggaagggcagggcagggtggagttaactgaaagaaggctaaactgtggcttgtacataattatgaggaagcacctttttttccccccttcattttgagacggagtcttgctgtgtcgcccaggctggagtgcagtggtgtgatctcagctcactgcaacctccatctcctgggttcaggctattctcctgcctcagcctcccaagtagcagggactacaggcacatgccaccaggtctggctaatttttgtagttttagcagagacagggttttgccatgttagccaggctgagctcaagccatccatccggcctggcctcccaaagtgctgggattataggcgtgagccaccacacctagccaggaagcatcttaaaagagtcagatgtcacttccagctgagggctagatccccggaggccaactggtggcccctgacatgttttatttgtaagagtgaggactcttggaaatttg

SEQ ID NO: 61071 - DNA, 596 bp, Homo sapiens
tggcaaattctctcccagtgatggagatgtgtggagcccccagtctctccaaccagggagtggtgctcatggtgaccctgaagtaggcttgtgggtcaggccgttggttgagctgtgcagtgccagaagtagctaaacatccttaaaggaactgcctagtttatcattaggactaaccatggaaccgatgactcagcgtttactgttggcagtatcatacactcaacctgcatgtagatttcgtgcatcatattttgtggttacaggaatttggcctgatggacccgttgcagaaactctgtactaaataagcaaacacgtgtgctctagttttacaggccaagcaaactgtgaaacagaagggttggcctttcttgcccttagcagtcataccttggacttttgccacttggttgggttgctttatttggctaagtaactaaaagcagatttactttgaagaatgaggttctcaaatattctagaactctctaagaatggacattcacagtcatgctgggcagacagagttattcccaaattttcagagtcataaagcttatgtttgggctgggtgcggtggctcacacctgtaa

SEQ ID NO: 61072 - DNA, 518 bp, Homo sapiens
gattacaggcatgcaccaccacacctggctaatttttgtattttttgtagagatagggttttgtcatgttgcctaggctggtctcaaactgctggggtccagcgatcctcccaccttggcctcccgaagtgccgggattacagccatgagccactgtgcccggcctgtttctaaatcatttcttttacaaacagtgctgctgtgtactcagtcactgtttgagcacatctgtaggatacagtcctaggattggattgcttgggtaaacagagaaattactttctaaaggtggaatttcagaaatctgtgacaagcatacatgagatatttttacactgaagtttggggcttgtcagatctggctaggggttgactgtctgtggggctcctctctgatatatttgatgttagggaatgatgtttctgggtttgatagtttgttctctaaagagaaaagagagagctcagagcagaaaggtagctttttggattctagccagggctcactgattggatct

SEQ ID NO: 61073 - DNA, 664 bp, Homo sapiens
gggggcacctcaagcccagtaacgccgtcattcttgcagacttagtacaggtatgggtttgatggtcttggagaagatctaggagcattctctggtttaccaggcagagacccttgttctcttcccttactttctcccaaagagtctctctctctctctgtctctgtttggaaccacctaaagctgggggtggaatgacacaatcacccctgtagccaccaccactgtgactgtgctgggccagacctgaagccagcacagcactgggtcttgcccaagtcctgctgtaaccactccctggcaactgcctatgtttgctcaaggccatggggctctgcaattagctggtagcaaaaccagccaggcctgtgtccttccctgcagggtggtgagttcccccaggccctgggtgagtccagaagagccgtctgggagtcagggactacagccaaaaaccttagatgcctacctggtgttctgttgtattgtggctgagctggcactcaaattacaagacacagtcctttccactcttccctcccctttccttctagttctttcactcactgactttataaaaaggagaatatgtccaacacattgtttcattacctagtatagttcctttaatgacacataacaaacatcttttaacataaccgtt

SEQ ID NO: 61074 - DNA, 1768 bp, Homo sapiens
ggggcgccggctccagagttacaaagctccggactccaggacgcggccccaaccccggccgggagccacttgctgcgtccctcgcgccccggagccacccggggccccggccgtgtcgggtctgcggcgtcccgtcgccgggctagagagaagccggtgcaccaacaaaggggcggggagccaggcgcactcacccaggtcaccagcgggctctgcaggaagagctccaggagctccgagactgtcacgtccatgctgaggctgcgcccgccggctccgcgccccccgccccgcgtccccgttcccccgcgccgcggcacaaaacggctccgcagcgagcagcgggcgcggggctgcggcggctcgcgcccgggagacaaaggcggggcgcgcgagcccacgttccgcggcttcggcggccccgcgccccgcccgggtctgggggaaggggagggccagccgctcggggaggaacaatacgggcggccccgcccctcggcggccctgggcgaccggcgcgccgcctcgcggtgccagcccgggagcccgggagcccgggcgcgggaccaggctacgcggggcgctgggaggggactggtggcccgaggcgggtgggtcgcggggcccggctccccgcccgtgggaccgcgcgccctcgccgagcgcagcctccccgcgtgtggggccccagcacgtggcgcatccctgcgcgcgtgcgcgtgcagccggggcccgagcgccacgtgcgagctggggtgcgcgggcactggtgcgtgccgggagcggggacgccctgccctccgaggttgctctgccctccgaggtcgcccgcagctgccgcccgctctgggcttggggacctcggccctgcgcctttccgcactcctggcaggtgcagccccaggtacagtcaagaggccccgcaaacccccgctcctcacgcttgtgcgcggcgcgataaacgcgccccgaccctggggctgggctggagggcaaagaagaaactttatgttgagtttaggccttaggggcgcggcccctcgcgccctaccgtgccccaccgtgccatgttccgggctgcctgccttctaaaagttcctgcaggaagcaggtgatgtggcctccccgacccgggcccgcccccaccactttgccggaggcgagctaaattccagccggggttcctagcagcagcttagtggcaggcgacaggaaaaagggcaaaggccccaactggctggaaggcaagcccgggggcaggacctccttgcgggacggcacgaggcaggagccggctccaggctggtctcggcctggtaataatttcacaccaccagccggtcattgttcaaagcactgtagaccattttactaatttaaccctaacgatcgccgcatttcgcagctgggccaactggtacagggttgacccgaagggccctgcgtggcgcttggcaagtatacagcaggcactaaatggctgccgacaggctcggtggtaattttgaaagttggctctgtgcagcgttggggctgcggcatctgctggtggcgagtggtattacagcccagcgctggcggaccccgttgggctggggagggttgtgagattatggcctgagagccaagggggtcggttaggggtccctagagactgtggaaggcggggtagcataaaacacaatgggggactgcggaggaactaaaatttcgagactacatggttttgttgtgcaccagaagttcattagagaagttccttaattgc

SEQ ID NO: 61075 - DNA, 3629 bp, Homo sapiens
tgtgagtcacatacaaaattacactaacacttgacattcaaattgtattttaagaagccaataactcaggcccagaaaaatacacccaacattcaaaaatttttaaatgcctccaaaagaaaataatttctctccagatttaagttactttgggtaaccttataacctgtgggcaatatactccagattaccactttcaatttaaatagaacatcaatattcccagagtcttcaattacagaagggctagtcttgttggtttttcatggaattggagttctggggagagtccaattgaagaaaattccttgaaattagtttgcaataattcagatacagaatcgctacaatcataataaactggcatcgttagcaactgcaaaatataaactaatgtacaaaaagaagtggaagataacttactttcacgtttggaagtaacaatttgagaatagttttaccccacttgagtattttaagtgaaattcactgtatatcgccaaaaacagtggcaatccctacagagaataagccttttaaaatatgaaacagcacatgtggaaaaaagaaaaaacgtgaaacacttattttcaaacaacttagtctttgaaccttgagggctgtttcaaaatttgtgaagcataaacactagggaagatccgaaaggttttaaaaattatctgccaacttctctgcacctgttaaccaaattatgaacacccatttaagcaatcaaaaaaagctcatatgattccaactttgcaagatgtttatatagtaagctacacacaaaattctgcattactataaaaaagacaaccaacactggtgaacgaaaatcttcgcaagggaaagcgttttctcttagtgtagagttgccagatacagtgttgccaagcttcaacacgatcagaaacatgtagcaaaaagatgtttaaaaagaaaaacaaaaaaagcacagcaaaacgttcttcaaagtgtgaaaggtccaagaactttcttagctccaagcaaagtttcatgcctgctttacagatgggtgaactaaggcagcagatcggattaatcagtgtctttctcaaggtcactctagtgcaaaagaacagcacactccggactccctatctcaggtcctcgacctctccacactccagggcggcacagctcaaacacgcttggctctcctcgtacccaaaatgccaccaggcactcagagaaaggaaacatttcaagcgctctccggggagctcccgcaagactggggtacctggggcccgtcctcccccgaggtggccgccctccccagccgtccctctgttctcgtggagcgagcgccatgccccgcaagaaccagggaggcggcccagggccgtgggggctgcgagggtcccgccgcgcggggcttcacttaccgtcgctctcagccctgacaagcagggacatgcccttcagccgctccacgtagccagacgacacatgcccggtgccccggtcgtcccactgccggtcctcgttgagcgtgtacaccttcacccgccgccgggtgtcggtcatcgtgccgcccgggaaccggggcgggggccccgccagtagacgcccaggaaaggggccctggagaggcgaggggcgaggcgtgagggcgcccgcgagcggagggctccccggcctcactgccgccgctgggcgccgcggggccgcgccgccgcctgcatggcccgctccagggaccgagctctgggccgccgcctttcctcgcctccggctccccggcgctattgtccaggcctggcgagcccggcgcccggcagccccgagggggccgcgcagcgcttcgtagcctcccgccccgcagcgctaggaactcggggctcccgtcactgccctgctcccgcctccgccatgatctccgcgaagcagcttcccgcgccgccgccgcctcctcaggccgccgccgccgccgccatattttccttccttatacctggccctgccaccgcggccagtggctcccttccgctccccctgttttaaacgtcagaagccgacaggcgcctgatcctgctgcaactgctaccactgcccgggagactctgagggcccccggccgcccaagcgacccggactagtggaagtcggtttccctccgccgccgtctcttccgtcttcctcacacagccaaaaccgccgccatcttggttcgcccctcaaaagcggcgcgcggggccacccagggagcagctgcaggggcggctcgtagccccaccatttaaagagacagcagcgagaccgggagccttactgcggcggaggcttccgacggaggcgggaggcgggcgcggagttgccgaggtggcgggagcgcagggagcggaggaggcgggacgcagattgcgccggtgacagcccgaggctccctcccgcctccttgcacgcaccgtcgtgcgagcgctgggcggtgtgtgcgtccgtcgcgccctgtgttcgtcatcagccccgctccaggatgcacgaggggcgtggatacgtttgcggcctctgcccgcgggccccggcgcttcggcctcgcctccgcccgccgccaccttcccttgttcctgccccgtccctgcctctgcccctgcccctggcctgcggacgccgggcagcgtgggcctgggcccctacccgcttccgagagcgttttcccggggccgcctttatggctgagtcgggcgctcgggacccacccggcgccttgcggacttgagggaatgaaatggaaacgcttccggggaaggtcgcgggtgtgggcgcctaggtcggcgcagccttgggagccgccgtgggtcgcggactggcgtggccagtgtggaaacttgggactgtttgcgatttctgggcgtgggaccgagttccaagtgacaattctaaaacttcaccttacagcctaggcaagccccaagtgctccattccttcatccctatcagaactgtctgccagcctttcttgtcggaaaaggaacttaaggcgctcacaaaaacaaatgcgacactgtgtaatcgggaggagtaattctcagcattaggtagtcctgtgttttgaagacctacttgatgtcaagtattgttgatcttcacaaaggaatatcattctcgttcctatcatgcagctcatatgccaccattttggtggcttttaccatttgccaggccttgccaggtcgggcttgtccgctcggaatataatgcagccacacacataactttaaattttgcagtagccacaaaaagtacgaagaaactggtgaaattagtgttaacgttttagtgcggtattttcaaaagttatttcaataatcaaattactaatgagatatacgtacaatgtcttaaaaatgtgatatattttgtccttccagcaagtctctgttgggatactaaattttcatcagaaatatctacgtttagattttattgaaaaaaaattttttttgagacagggtctctctgtcacccatcctgaagtgcagtggctcagtctcagctcactgcagcttcaacctcctgggctgaagcgattctcccatctcagcctcccaagtagctgggaccacaggtgcgcagcaccactgccagttaattaattaaat

SEQ ID NO: 61076 - DNA, 783 bp, Homo sapiens
agcaagagattctcaggagggcctgcaccagcaccagggcagagttttggaaacagaagggtgatgacagagctattttagatatacagtcaagaagaataagacactcactgaccattgaggtggggaggagtcatggatttctaatatttccaagtcacatgacagaaagaatatgggaaagggaacacaaaagaaaatttgatagaaataagtataatttacaaaatgaaaaatacaaaagcagttttaattaaaggattgtgaagcaatcattgcctctttatctaggtgcagtgcagtcaactctgttctgtattatttgcaggaccaaagttcattagtggggctaagagcaaagttccagattcagattgtactttgccatgctttattctttttttttggagacagggtcttgctctttctcccaggctgtagtgcagtggtgcaatctcagctcattgcaacctccgcctccctggttcaagcaattcttgtgcctcagcctcccgagtagctgcgattacaggtacccaccaccatgcctgtcaaatttttgtattttgagtagagatggggtttcatcatgttgcccaggctggcctcgaactcctgacctcaggtgatccacccgcctcggcgtcccaaacgggagtataggcctgagccaccacgcctggccgtagtctttctatccctaaattttcttgacatcaaggtacaagagataagtctatcagatgaggttaaagtctgttttaagttatgaaatgtattata

SEQ ID NO: 61077 - DNA, 1242 bp, Homo sapiens
ggagaggaggaggttggcagggaggaggaggctggcaggagaggaggcggccgatgggggaggaggaggctggcagagagaaagaggctgggcagggaggaggaggttggcagggaggaggcggcttgcagatgagaaggctggcaggcaagcgctgcgggcgaccgtgggtggtgggcgggttttcccctcaggcaggtgcaggtcctaagggggcgggccccgttgggtgctcatgacgcaaaggtccctaggatttgctcctcacagcgggagcgccctcgagaggaaccgcgtctgcgcctcccgagacggaccactcgggcgcctccgccccgcgccctgcctcgggggccgccccgcgcagtgagctcagcgtggaggcggcagcgccctcgcccttccgcgccctcccagcgcggtctctcctcgtccgcgcgccccgctccccaggcgtttctgggatgctggttggccgggcacttacgtgtttcaaagcgggtgacagccgccgctcgggtgtactgttcgctctctcccgccaggatccgagttcttgttccccgacaactcgtgggagtgcccgctccagcgtggtttctccttctccgggaacggccccagtgagcagaagagctgggtctggattgcatggctctgtctcccagccatggttgactaatttagggacactcatggctctggactcctgcagccagccagacgcctgtctttggatttttgacttggatgagagccctgtagctggaggttgtggttgagaggggagtttagtcacatgatggcagtgcctacagagatctgggtaggaggttctgctgctgtggccccctcggtgatgctgtgctcagaggcccctgagggtgatgtgagatggggagggagctgagggatgtaggtagtcagtgactgctgaaagaagaggaatgttagcatttctgggttaggtggttgcttctgatggcactgagacaggcaaatccccaaattactgatctagacaaaatggtcttagtcagaacgattttgtgactcttctgaatgaagctctcattgcccgtggccaaacgctgagatgaaaatgcagttcagaaccgattttgtggatttcttaagtcgaataccagttgagctcacagctcaagcagatttctttgatgaacatcaaagttgcagattgtgtttccaaagatgactacaacaatcccccccaaacgacag

SEQ ID NO: 61078 - DNA, 785 bp, Homo sapiens
gagggaaaaagatagtttctccaaattatatacaggtaaagataaaactattttatagttagcttatctgagttaataaaaacacttaaatgtataacatatttgcttatgaatccgggtttattcatgtgacaggtggtaagatgatgccatacttaactttgacttcacattcctgttggtcaaagcctctcacaccctttttaaacaaagctggcagtaaaatccaacatattgcgtaactaaccaacgttacatattgctcagaaaactctacactcccaacaggaaattccaggaatgaaaggatttctgtttcattatcagaaaggtgccttgtactagtaaccacaataggtagggtaaattaaaagatttattcctggattgttaatttctctgaaaggacttaagaacaaacttaaaacttttgaggtaggtctgacataatgaattctctttcatctgtgataatacttttaaatgtgttatcagaaactcttcaaaggtgcttagaactttgaaaggctagctgctgtcacttgaaagttagggtgacagctgagacagagcccaaggttttcatttgggtaacttgcctgtcatggatagacctagcagaggcctgttttctgcacttcactgaagtcttattcatcaggagtcaggcaataagaggcacattttcctctccatggtctttggtagactcactcattagaggaggacgtagatatcatctattacaacttccaccataaggcactttgacaacctgctgtcaa

SEQ ID NO: 61079 - DNA, 885 bp, Homo sapiens
ttattacaaatttctgaaatccttcataagcaagtatttgattaaacaaaaatggaaaatgttactaggagatatagtttatacctggctgttgagtacattagtatcagagaaattcatgtaactatatttaaacagaacttcagtttagggtcttttcagaccacaattatataacttgttcaaaatcccactagtttcttcttaacagtcttggtaagagatgaaactgatatacttcagaggccatttccctaggagtactgcttttaaaaatcatgcaaaacaaaagccaaatagtgatgttatattttaacccaggctgcagctatttgtgttgatctgaaagcttacaagtaaatccactgttaggaatgagcactgtaaaagctatcagctatcagcgtgaacccttccatggtttcctttgatcacatgacatcattatgatttccttctccttgcgtaagtgggtaaaggtcaagaaatgcctaggcaaatatgaagagaagttattttggcatagaatctcattttttactaccagctcctaacgtttttctcacaatatgcatacctattagcaggagattggatttttatttataggtccacataaagcttcaaggaaataaccagcattagtacctcctcacctgaaaaaggcttaagtaaacactaattaaaacatttaggatcttagttgtatcaatacttctgtacctgaaagctcttttaaatgtaagggttttctttttattgttttatttacctaggattctaagaaactgagaagtcatagctttcccttaaattatacatcatacatacattgtaagaatatagaaaattaaataaatcaaataattaaatattaagttaaat

SEQ ID NO: 61080 - DNA, 1702 bp, Homo sapiens
ccagcctggttgacagagctagactctgtctcaaaaaaaaaaaaaaaatacatatatatatatatacacacacacacagacacacacacatatacatataattgtttttgaagattgagaggtgtacccaagtccaccagctaacaaggacacacagtgggaactggaacatgagtcaggggtttttccacaaaaaccaagattcattctgcacagctcatcgtgcggggagggcagggaagagtctctttcccactggcattggttgacccattgtaagcaccatcccacaatgctccatacaccaatggccaaagttccaactgagagattttctatcctcttcccaagtccatgtaaacctcttaggcctctgaaaagagatgtcagtgttttcagagctaaaagccttcacggtgagcagactgagaggcttttcttacaggggaggctaatcccatggccacaaagttcctgcctcctagcatctctggagctctcagggagaaaacaaataaatgaacagctgtagagagagggtctagcaagacactggcccccaccagtgcccgtgggaggttggggtttccccaccggggacaggagggggtaggaaaatgtccactgtgctaagccactgagtgcaagttcagacaggacagtgccggcaagtgttagggctggtggcctcagcctctggccaggcgctggccactcggaggtgaatgaactcattccaccccctcaccgctctcagctgcttctgaagagcagggcgaccaaaatgattctgcccccctggggttctcactgccctttcctgccagccctttccaaatgcccttctgaatctgctgagggcacacagggccccactccaacctgttggacaagaagtctgggcccctggttttactctcagatctgctaccacgtggctgtgtgactttggccaagttgcttaacctttttgagcctttatttcctcagtgaagcagagccacaaacacctgcctgctgacctcaagaggctatttattatttgggttcagtgagatgaacagacgtgacaatgctctagcgtgtacagcactcttccacacacgaagagtcaggattgcaaaagctcaccggagtatgcgacgccctgtgctgcccatgggccctgctgatgcagcatcccagtggctgagtgcccatacccaggcctgggtgccgggcctgctgctttattatgctgtggacttggcactgccaggtgtattatctgctctttgtcacacacctgtccctcagaggcctgaaagacgcaggcaccttttggcttgggcatggctatgcctcaggaggtactgggggcacggtgccagcctgtggctggcacctccaatcccaggccttggcacagagaagcctgcatctgccctaagctgcttatcacagcagcaagggagccaggcgccccctcctgctccagtgggaaggaagggcccttgtttatccgcttcctcaacctcctggcctggtgtctactctcagaagaaaatgacctcttttggcgtgaggaacacagtccagaattcttggaacaattagcagaacaagctttggaggagagacttagaaagaatccagggtcaaactctttaacactgatgccttcctatttaccgatgatttagatacaattaaagtaaaggag

SEQ ID NO: 61081 - DNA, 611 bp, Homo sapiens
agctgcaaggactccagcctcccctttgcctcccttccatgcagctctgcccaccgagcacagcctcccaggggagctggtgaataatgcttggccagaagctgctcctgctcaaatccacagtgaagtctatgacaataaatagtgccactatcggctggtgcgtatttacattttcccagcagggagtgatggatggcaattgtgtgctgggaacaacactgccttaggaatttctgttctttttcctgccttgaggggaatgaagggtgagggtgaccaacacaggagaagaatcactggagaggcttggtggcagcaagttcccaagcctctgtgcttgcgtaatttgcatcccacacaactgtgcctgccaagtcctacagagagaaaccagacgcatgccagcaggccaggctggactcagaagggcacaaagggccccatcgtgggcatgtgtgcgaagtattcaggccgaagatcaaaatccttgaagttcactcttttaaaaactccagcacttttactgaactaaagaattaactcagccaggcgcagtggctcatgcctgtaatcccagcacgttgggaggccaaggtgggtaagattgc

SEQ ID NO: 61082 - DNA, 494 bp, Homo sapiens
ctgtaggatcgtgtaagagccctagataagctgaaggagaatcagagaacacctgggctccacttccctgcagcatccaacttagcaccaaaagaatgggatgagtggtgagaggagcctctggagatggctggagtgacgccattgtcctactgccctgagctttgcacgtgacaggtgcacaagttcctgcattcctctagggcagtgtggacactgatcaaatagcagttcacttcagggcaaagagggtgcaaagtacagaggccccggctcaggtcacaaccacagagggtagcacagggtccaggatccgtcaggagacccctcacaccctaactggcccaaagccatgtaaacttctctgtgtataccgatggaatgtcagatttcaataacattcctgtaccaggccagatacggtggcttacacctgtagtcctagcactttgggaggcccagtcaggaggattgcatggaccgaggagtctgag

SEQ ID NO: 61083 - DNA, 1779 bp, Homo sapiens
ctagcctgggcgacagagtgagatcctgtctctaaaaactacaaataaaagaaaaaggtacaaatgaatagcctgcaatttttgtgcttccaggctaaaactctaagatgtaatttatcataaaatgttttgtaaggaaccctggaagtcattttgtccagctcccaatttaatacaaaatggattctatgacactcccttgcctttgacccccttgtattcatggtgaattcacaactttccaaaggctatcccactgatgaactgctctgaatattagttatcttttactatcatctttctgcctatattaaacacaataacctctatctctgactccagagagtcctaagaggtagatatagataaagcacctatctaggcttatgtcactggtgtacttccttaatgtataatgattacattcaaaatactgcaatagtctcccaggggttttaatttccggttaaattcttattcaagagcagcccattaaagctcattaggatcaactcattttgaagagactttacccattagcaccctcttgtggaaagagcacaagttggtaatcagaagatctaaattcagctcccaaatatctctggaccttgttcaactttgttggttagcaatcactcagtgggtgattgtaggaatgaaatgagctatgatggcactctagaagttaataaataccaggtgttactattgttaagtaagggctcacaccaccataatccggtttgtagatctgagttactcatacaacaagtatttactgaatagctattaaactctgtgtaatatatgctatgtgataggtagaaaatgaatgagcccattcctacctcccagtgactttacatttcattgggtgggaggcagtataggacacgtcgacaattacctgtaccctaaattaaaatataagtgccctcaaactataagactcaaactaaatattatgcaagttcaaaggaaaaacatcacaccaggaagatttgtttttggatatgacaagtggggtgctaaataaagcaccctttaggaagaaaatggaattgaagaataggcaagattcatagaacaacttgcaggggatcaggttcacccttcaggcagaagaaggcatatgaaaagaaaaagcagaagaaaaagaaacaggaaaacagtggctctgagaaagtgagtaatacagtttggctggatgtagctgataacatgaaataaggctaaggtggtaggagcctgggaccatccttgagtcaagaccagtttttgaaaaaaggagtaaaaagatcacacctctatgtaaggaaggttattctcaaagttattatgaaaaataaatgaaaagtgcagagactagaaactattttaattaagagaaaataagggcttgaaaagtgcaaaaaaagagtgagaatacagaatgttacagcatttctgccaaactgaaacatatagccaaatgatcactcattgttttaatccccgttttaaacaagttttccagctgagtctgaaggtataataatatactctgcaaaggtggggtaggggttaattcgcaggaatattgtctctactagcctataatttatttgcagacagatagaaatgattatctcattttatctccctttgtgtcataaatagtaaaaagataaatacaaagatgcatatacaactaataggaatacaaatggacacaattttttgtgaaataatttggcagtataatctcagaagttttaaaatgcttcttgatctaga

SEQ ID NO: 61084 - DNA, 505 bp, Homo sapiens
gaaactgttgctctttatgcctcaccactaagaaagtactgtccaccaaaatggacacattctgaagcacacaagcagcatatacagttattacagtatgctactccagacctcctgacctacctgtgtatgttcctgctgtcaggacatcatcagaaaccaaaacaggacctccacctatcttttctgcttgattctgtgtgcctactagcttatttctaaatacgaactcaagccagccacttatactctgaactttacccaggtacttccacctagcctgaaaagcatcagtgagatcagctttattctaaggacttgagctcaattactcaacattccatttggatatcaactggcccttggctgtgacctgttacacataccattttaattctgcccccatttttacagcacccaccttttcttgactcagtaatgacttctctttttctaaaacttcgatacgcattttaagtttcagattgtcttcagcaagactgtt

SEQ ID NO: 61085 - DNA, 2109 bp, Homo sapiens
cgattatacacaaaaatacattctcagctggaacgctataatgtatcatcacaataaggaaaagtaaaaaataattaaatagaaaaacatggccgtgtttcataacatactcaagacagaaaagagcaaaactcaccaagtgtttaaattatgagttatttcaactgttacaaaaatagaaaacagatatacaattctttaaactgggtcagaatacaggaagatgttaagaatgagatcagcccccaaactgagggcaaagtggtgggcgtggatcaaccaaacgaaaataaactcgacttaacgtaggagcagtttcactctactgtactttgagatatccagaatatttaaagagaggagaaccaggactcttcccctggcccccagtggtctttcatcatagaaaatctgttgagaagaggcaagaggaggtgtgtgaagaaaaaagggaggagcagcattcctttgcgacctgtccgcgtctcctgactgatggaagtagggaccaaacggacgttcccagggtcttagaaaagccctcccttccctcgctccagctgttaccttccacttcctccgtgccctccatcagcatatcctttgtaaagtttgatatctggccagtgagggaagccaggctgcccccgacttgacccagagactggcccaatccggagccgaggcccccaagccaggacgacatcgcggcgagtttagagaacgacccggtccgctcggaaaaaagaaaacgtttagcgccgccgggcgatccgaccaaatatccttgaacgcctgccttcgcgagacaggatacgataacacaaagctgggttctcaggcaaggccgactccaggttctgcctagaaacgcagaggcctggcctggaattttaccaggggcccgcctctagtgacacagtcacctacggagggccttctgctcattcccacgaattcccaccgtccagattgggccacttctttctcagctctaatgactttcctcagttccgtgggttactcctgccaactcgacgccggccgccatgacactcgctcggaaagcggcagcggatcatagaaaagcgccgcggtggcgtagacaggccccgcgaagccgccggacgtgtccttggcgcaagggaggctgggatcgcggaggaccgagcgcgggctggattaaccgcagccagtgcctagcgcaaggttaggtgcatgcaggcggccagcttcggccggggaaggaatggcctggataactggggcatcgcggcgctcctcggcctcctgcagctgcgtttcaaagcagagccgacccttggtgggtagtccggggaccctgcggaccctccttgtgttgttgaaacctagtgttttaattgggactacacccagcagtgccgggagacttggcggggacgttccactgcgcaggaagtggcttcaaataacttacacgcgtcactgtgtcgattagctgctccgtgacaggcactatggtaggagctgaggctacaaagatagaacggatgggttgcaaaaaaaaaaaaggaaaaaggaaaaaagaaaggatgggttgcaaattcaggtgtccaagcaggaaacacaccttccttctataggagaaatctcctctggtggctttatagctcacaattgaaaccctaccttctttaacatacgatgagcttttttcatgaagctgccctcacccaagtagttgaaaaacggacaaccgtttttcaaaatgactcgttagaagacagcagggcaacttaatagagaagtgccgtttagtgtcaacgctcctatggtattggcggcactagctatgcaagtgcccacacctccctcagtccttagttacccacactggctgtaacacacagagtcctaccttgcttgcttccttccctaaaggaagaaaggttgtcatgtgactttcaagcaattggtgcaggatacgtggacacacagcatctagccagggagacttccacattttttggtttcaaaaggatatgatagatctgcagttcttttaagcatagcaataagtatactggcatctttcactttgattatattcacaagaggggctatcac

SEQ ID NO: 61086 - DNA, 1688 bp, Homo sapiens
tgtgtgtgtgaattttaaatgtctgggataaatgatcatttataagtatttaataaaacaaaaaccctttgctcctcctattaaataacagccttaccagcaactctttccaaacacgaaactattatgaaacatgataccatgtgccaaagctgtcctggggaaggcttcactcacacacaaatggctggataatagtatgagagaaacgaggagtttctttacatatcacaaacagtatcttcaagtgcatggtcacggaagagttaaagggacagcaggctaggcagactacaacaaaatcatcccagtccactcctaatacctaaaaacaaagctggccgcctgctccggaaagatgggagtaccaaaagaaaccaaacccaaacatcccgtaataaaaactcttgtgacgacttccctgtttaggggcacgccgggtttcctacttcacttcctaaatgtcaggccctacagtgggcgagccaaggtctcctccctcgggaggctcgcggacctagtgcaggggaaagacacgaacaagaccccaaagatctacgtgtagggaagactccaatatagaattgagcagtccggaggaggaaaagttaattctgccaggattagggtaggaggggttgagggaggtgtcccagagatgactctagctagaccctagggagagggaaggattggggaggggtgaaggaatcctccgaaaagcgatggaaagtgacggagaaaggcagaagcaaacccactgggcgccaccccactcccgtgtcccgagacgcccccggccccgcccatactccctcccggctcccagggcgggggccgcgggggaagtaggggcgtaggtgatgctcccctcctcgagccgaggaggcgggaggctgcggcgtcgcccctcgccgggcgagatcggcatgggggcgactcgggccccacccagccctccgagaggcggtgatgccgcgctccacgcccgccaccgcgcggcagacagctccccaccgaacgcggacactcactttctcgtggaagatggactccatgtttatttgtctggagccaacggcccccacgccgaaccaccccctccagctccgccccctgcccctctcctccgcccaccccgcccctccccggcccgccccggtaccccgcccacgtgccgcacgcagaccaatcacccgtgaggatgcgagtgtcgtgaagcgaagagcgagtgaacgccggggacacgtgaccttggtagcgcgtcctcctagcttctgttagcgggccttctgggggatgctacatcgccacctgctgtctggaggatcttctccgcttcccacccatttctatggattcttaggtttctggggggaggtctggaccgctcacctgggttctatgttctttttgttttccactttgactttctactgtgttcatataactatttactttctttctcctcctcctgcactgaaagtttagtaagaaaaaagccatcattacattctcccaaaacccagcacttgtataaaaatgatagctaggccgggcgaggtgcttcacgcttgtaatcccagcactttgggaggccgaggcgggcggatcacctgaggtcgggagtttgagatcagcctgaccaacatggagaaaccccgtctccactaaaaatacaaaattac

SEQ ID NO: 61087 - DNA, 2012 bp, Homo sapiens
cactccagcctgggtgacaagagtgaatctctgtctcaaaaataaaaaagcaaagtaaaagggtaagcacatcatttaggcgcaacggtgtcggctcaagaggatttgcgatttggaagagagcgaggttagcgagaagacagaaggctggaacttggacgaatgtaagctgctcgcggaggggaggcagcgtcttccctgcttcaggccaggcgtgggatccgggccggtcttctctccagtccggttagcgggcggtcactgggtcacatctctacggacgttttcctgttatgacagcctcagaaaaccctttccaaaagctccggcccggaaatcccatcctccacccgaagaaaaccccattttcctttcccgtcaccttcgttcggaagccccggggaagcccagaccacccctccacacatgcacagcaccgagggcttgcctagaaccctccccgccaccgtcgccgtgatcctcgtcgcggcggccccccgggctccccaaacccacctgcagcctcagcgcctacagcgaccccgagaccaagggcaacagggaactcaacccgcgccagtggaagctgcgacctcgggacctgccattcgccgcgcccgcacggagcagaggggtgacgccagcaaatcatactactttttcctcctcagggttgactcctctcattttttttttttttagcttccaaacattaccaataatttctgaataaaatttcgctccagacagacgaggcgtgcaggcgtgaccgccgtcgccttccgacagcaccgtgcccaccccccggagatggtctcgccctggttcctcctcgtctccgccgctagtctccagctccaaaatggcggctgccactgtggggcttctgccggccggtagtccctggcgctgctgacccagcatcggcttttctacgtcttgaacctggattcgcctaggggttgggaagggctgtggacggcgttgggggaggcctgacgaggcaagtgagggcgggagaaaggagcgagcctcgggctggggaaggcggcgtcattggccctccgggagcacggggccccgactccgacccggtctcccccgaggactcgcccccgccgcttcggctgcgactgtcccggtcgttcccggcagaagtggtcagcgagggaaagagaagtgacttctccatgggtttcaagctcccagctgttttgcggcagcccgtacggttccctcccgggatcttcttccctcctttctgcttccctctgcttcccctttcatctcttggcgctggaagagttaaaccgacgccagctttagctccttggcttcgtggctacggcgttcttagcctcccctgctcgggctcttcccgtcgttttgggttgagagaccacgaggttgctaagctctggacaccgcttaggcgtccttttagttcttcgactccagagacctttcggttgtttgtaccacactgtactaaaagggtcttgggccttcgcgccctcccgccatcgccctccagcgcttccactatcactgcgaagttctaattcttttttgacttcgtactattttacgtgctctttagaaaagaagaggtcagattgaaccccggcaagtctggcttcctgtgaccaggcgaacctgagctatcatttatacccatcccctaatttttaattttacaacccctttaacccctttcttttttctttctttttttttttttttaataaagacggggtttcactatgttgcccaggccggtgtcgaactcctgggctcaagagatcctcccattttggcctgtgctgggattccaggcgtgagccaccatgcccggccttgcaaccccagtatgaaactggggctctccctcaactgaccgagaagagccttccccactcagtgagctccagggctaacccaaactcctctgttttcccttggattttgcttagttcaccttagttgtcatcaacatgcacggtaattatttt

SEQ ID NO: 61088 - DNA, 580 bp, Homo sapiens
cctctacaacctagaattgcccaaaatctggagagaccaattcacattagcaaaaagtgaaagtcactttctgaagttaacagtgtgtattaggtctatgttcttattttctgtattcttgatgctctggcatctgaggcctccctgcctggggagaaactgcccttcccagggcccttcagttctcatagatagcaaacagctgcctgctgggagcatgactttcatgtgcaaagcaatcaatccaaagccctactctgaactgcttcctccatctggctcttatactccaggaggcaacattcctctctgccttagtcatcccagggcaaggtacagacaaccagattcagccccagagctccctgaagttattcagttctctttttttaaatttttcatttccataagttttgggggaacaggtggtatttggttacatgagaaagttctttagtggtgatttgtgagattttcgtgcacgcatcacccaagcagtacatactgaacccaatttgtcatcttttatccctcaccccttcccaccctttcccccgagtccccaaagtccactgtatca

SEQ ID NO: 61089 - DNA, 1933 bp, Homo sapiens
attccatcatatatatgtgcacatatctgtgaacatatatgtgcatatatgtacacaccacagtttctttatccactcattgattgatgagcatttgggctggttccacatttttgcaattgcgaattgtactgccataaacatgtgtatgcaagtaactttttcacataatgagttcttttcctctgggtagatacccaggagtgggattgctggattaaatggtagatctacctttagttctttaaggaatctccacactgttttccatagtggttgtcctagttgacattcccaccagcctgtagaagttactcagttctaaggctgcatactcaccctcccttgccccatgaaagccacaataaaggcttttgcccacacttgcctctcactccttgttcctcctcaccagcactggtgcttcctcatgtggccccatgcggcacaccctgcctcctgtttctagtttttgtgagtacaaaaaacctttttttcatgaccatcatttctatacctctgtgtcttaccacacctgattaaaacaaattctggctacatttaaaaacacatttgatgtgggtttggcaaacagtatgcatttgagcatgaacttaggactcaaggacttgaaagcagaaccttcaggatattgctaggactcagaaatctgtgtgtgaacaagccccccaggtaatgtggctgttcagttggttttgagaacaactggtttagtctcagtctctcatttggaggatgaggaggccaaggcccagcctggtgggcaagtctgcttgggagaccaaatcctggggcaggagattgcatgatgagctcagaattaaaccaaggagcgagatactcttggctagcatggattgaaaagctcctccctgctgtttctgtcttcgtaactctattgcttaggattctgtggttacaagtatcaaaactagctagatcttggtttcagcaggaaaggggactttatgagaaagatacagaggtgtttcctggagccagggcagaggtgcggatgagtctcaggacagctggaaccaggaaacatgatcgggcagcccctatctccccatgctcgtctctgtccctgattcatctcctgaccttcagacctgctgcttctgcctctcctctcctgatttcacaattttagccacatgcacgccgaaatcggttccaatttcagcatcctcagggacaggctctgattgactcagtctgattagaactatccttgggctagtcacaggcaggagcacaaatgtgcctgggagaaatgatcccatctcatcaggggagctgggctggttctgccagaggtgtcccgggattcttactgaatcagaactcctgtacccaggcacctctgtaggcagcatcaaaacctgggacacttttcaaggctgcccaagcctctttagcttgatcaagtgcaactgggttctctaacttttccattccagtaatgtttcctggtgatctggtctcttggcataagttcaggaaatatctaacttcatcagcataatatgtggggcttctttgctgctaatgagcttttagatggtgatgatcacattcattatgtgggattttaaaaacatgttatgttcagattatcttttcctgattctgagcgggcacttgtagcctcccatacatttaatatgtgttgagttctgccatgagtcaggggcggggctgggagctctgctctcttccagagccatgcaagaatccagcaggcccctgcctgcgaggggcttccagtctagcttcagaactcatacaagtgactttcttccaagccagacattgagagctttgggctgacagctccatgccacatttgttttgttgttgttgttgttttcttttgagatggagtcttgctttattgcccaggctggag

SEQ ID NO: 61090 - DNA, 910 bp, Homo sapiens
tccttctgttattggtttctaattctgttccattgtggttggagaacaggagattatctcctgttctagggtttgtggttgttactctttattattgttgcttgtttagtgacttttctaaactaattctgtaaaattcatattctttgttgtgtgtggccactgaagtctctgctaggttagcctagaggtcagctaatgattagacagaaaattccctaggttcctggatccaatcgttctcccagtctttgccaagggactctgtatgtgttttggggcatgcctccaacactcaggcgggtagttcacaactctatagtagcctttccttcttatttgcacagagcctcaaagttaggcagagatgaaagcttacagcagtctcgagtctttcctgagcatgtgtagaaccctgggcacagccctgtgcatgctcatggtctgttagattcccagagatatctaggagcttttcaaagcccactgtggatgtctcattccccagcttttccttttatgctttttggttaacctattgtttgtcccagctgtcatctgccacttccagcaacatgatttaataattgcctctaattgtttttgacaaacacctccaagtaaaaagctattcacactgggtaagctcagattctggtaaaataaagacagccttgaaagtggagtcttctaagaaaccaccagacaggtcaaataataacaattctgtgggaatgaacttgggaggtcctccaaccttgttctgccccctcttgtggctgctagcctgctgtttttcaatgtggttgcatgctgctggatttcaaaactactccagacctgacaagaaggaataaaaatagggaaagttaaaactccacagagttcactgttcttactaaggtccaac

SEQ ID NO: 61091 - DNA, 2500 bp, Homo sapiens
tctgtcacctgcatttgctggctggtgtccaccaggaagagcaaagtcgtagagtggggaggagacatgggagtgggttctgacctctctctgtccccaccaatggactctcttccacgactcagtctccactcactgcctgtgaggtctgaacatcctgtcctctgccttgaatgtcagatcatggtaaccctgggcttttgctctccttggccattctgcaggttttaatactgtagatagtgtcctcctgaataaacaaattctctcttctgattctcctctgcttctgctgctttttttttttttttttttttttttttttttttttgagacaggttcttgctgtatcacccaggctggaatgcagtggcacgatcatagctcactgcagccttgacctcccaggctcaagtgatcctcctatctcagcctcttgagtagttgggactacaggcgcataccaccaagcctgactaatttttgtattattttgtagagatggggttttgccgtgttgcccaggctggtctcaaacccctgggctcaagagatctgcctgccttggcctcccaaagtgctaggattacaggagtaagccacggtgcccagcctcctttgcttcatcatttctcatctcctcacctggcttctcctccacctgctccttacgtgaaagtgtttccctgcattccaacctggagcctctttctcttgcccagtggttctccatgctggctgtccactggagtcatctctggacttgaaaacacacagacacagaaacatttgttgacttccgatggcctcactgggtgacctgaggtgacctgtctcatatttctaacatcatcacacaggaatgtcccttctccctctttatcttgcatgactctgtgcctgtcctcctgctactccctctgcttcaaacaacttccccagttctctgtcttgcagaggagagcccatacttccttcaaggccttcccagacccgcaggccagaatgaatcacctgcctctggtttttatgatcttttgtttgtaagcttgcttctattgttatttggtaatcattcatttggaatgttcttgaacaaactcaatctgaaatattctcacctgtggcccccaccaaacatgggtaccaatctggggatgtctaaactcatctctcatactggcctttgaaacctagaagcaacacaaaggttttttttcacacactgattcattcaacaaacatgtactgagggcctactctgtcccaagcatcatgccaagggctggctgcagagatagagggagctaagtgtcccccaattctgggaggaggtgaactcgggggctgcaggagcccagagaaggggcacccaaccatctcagcagtcaaggaagacatggactcaagccaagccttaaagaatgaagggtgtcaagggtgatgaaggggagtcacgcacacagacatacatttaaatcacagcaaacattttgtgatttaaaaggaggcaatgaataactaggaaaaagtatgatatagagattatgaaagaattccaagtagctcaaaccggaaacttcatgggggctacggtgggctgaataacgcgccccagaaatgtccacatcctaatcctcagaagctgtgactatgttttcttacatggcagaagggaatttgcaggtgcgattaagtgaaggatgttgagatggggagataattttggattatatgggtaggttcaaggtcatcacacggtgcttataagaggtggccaggagggtcagagagaggagatgagctgatggaagcagaggtcagaataatgtggggtccatgagccaaggaatgcaggaagcttctagaagctgggaaaggcagaaaatggattctctccaagtctccagaaggaaagcacccctgctgacaccttgattttagcccagggaaacccaattttggatttttgaccttccgagctgtaagattataaatgtgtgatgttttaagccactaaatttatggtgattgttagatcagccataggacatagcacagggcccaggagtgagagcgggaagagagagatgcaggtgagggtatgtctgagagtgggagggccttgaggggcagctagtggggagccactgaaggcggcttcccagagcagcagctgctctggattccagtttctgaagggccacccgattcagggtggaggatggctgggatgagggaatggtaacaagaccagaacaacagccatcagccaggagctcagaaatgaggtgaggccgtttgcggagaggagaggtcgtctcagggcagatggtcagtgtttgcagggtgacttgtaggtgcatgtggaggtgctgtcacccacagaatttgggaactgattattgagagaagggggagagaggaggagagcaaagctcccagccctctgacagggaagcccaggggaggagcaggtttggggcatgggagatgatga

SEQ ID NO: 61092 - DNA, 1094 bp, Homo sapiens
ccttgttgggggtcagaagaagatggaaccctcgcaagatgagctgttttctgatgatctacttttgccaaacaaaatatcccaaacagcaaccattttattggtcaggaattcagagcatgaggacttgggaatgaaaagaggacccaggaagagagcagagggcaagcttggccaaggtgcaccatgggccacaaccaaaaggggctgctcagattcttggaattgtgactgtctcctctatggtcatttatcagcaacagggtcatggcggggctccatctggtgtccacctgaggaattctggcttctcagagcaggtgagcattggggctaggcccatggaagccaggctttaagagacttgtcctgtgtttctcagcagtgatccagggagctgaaggaaacctttcagatcagcctgggagggggctgaaggactgttctaggtgcagtagttatatagaccgcttccctggggtccagggaggcctgagagtggcctgcagacttgttttagaaacaactaaggaataataatggggccctggaggcaggggtcttcttgtccatctcatttgtactcactgtgtttatagatgagcaagatgagcctttgggaagagacttgctcaaggccacccacccagaagccgctggggttgaagttgaacatgggtctgtccgcaaagcccatgttttcaaacagggctttgaaacccttggaaacatgttacagccctgttgagggagacggcggaggagatgactcattcccatccaggaggaaataattcagcctctggaggagaggaaaagtcagtggggggtggttatgacctaacgaagggaacctgtaggaatctgggcagagggggaaggggtgtgagctggagtagtcagggtggcctcctggaggctgtactttttcccccccttaaaaaaaaataacagctttattgaggtataatttgtatactgtacaattcacccacttacagcatacaattcaatggtttttactgtagccagagttgtgcaaccatcactacaatgaattttagaacattttcatcaccccataactcttagca

SEQ ID NO: 61093 - DNA, 2469 bp, Homo sapiens
ctctgggaaaacactgggctcgggaggcatttttgaacacccaggcacttagaagaggcctcacggtcccacctggggttgctgtgggtcttgcatttgtgtcagctgtctggcgttctccatctgcggtacccggcacaggtgaattagatgccaggcttgatggacgagcagtccgccttgttgaggagtgagctccttgtcacgggaagcatccaagaggaggcggcgtgcacatctgtcaggaatgtggaggaggcgccctggctctggtctgaggttgcccttgaacgatttcgaggctccctcgggcaaggctgtggctccgagtgggacgaactccccgccagctctgggcctccccacctgccggcccgcggtcggcgccggcacaggcggagggcgtcttccttcccctgcggccccaagccaagtggaagacttttctctaagtttccctctccgaagccccgcgggcctcccgcgccccagccccagccacagcctgtggaggcggcaccccgaggttgggcgcccgtgcggcgccttggccccagcaccccccgccccgaggcccggccccgggggcgcggccgcccgggcctccgtgtgccccagggggctccgggccgcgagccgctgccgaatggcttttgacaaaaaaacccttgaccaccaaggccagcctcttcctgaaagccccgctcgctccgatacaggaagtagaagggagcgagagccccagagcgcggcggcagcggcggcctggcccttccagagggccagagccagggacatgcgggcgcccgggactccgcgttccgcgcggcccggcgcctgagcgcctccgttccccgtcccggagctgccggcggcatgatccgacacgccggggcgcccgcgcgcggggaccccacggggtaagtccgggcggccgccccctcctccctcgcgatccccacggcccgcgtcctggccgccccactccacttcttgtcccagagagtccttcgggcgcgtgacctcggggttgtcgggctgatacgggacccccaccgtggccgaggccagaacctggttctgcggggcagggggcggccctggtgactccgctggacccgatgttggctaaactttcaaggccaggcatttcactgggaacccagtgcacactttaggctgctggtggacggattacgagggagtgcgtcgctacctgtcagcgccggggctgcccgcgtggacgcggccccctccctggcgtctgccccgcctgaactttgcaaacaaaactcgcggtcccagccccgccagcctgctgcacccgctgctctgcgagtcgcagcgcgcgccctcgggtactagagccccgctgggcgtggggtcggagacccggacccccgcaactttgggtgcccgcggcccaacagctgaccggccctcctggaccgagggtccactgggcccttttcccgccgcccctctgccctggccgtagacggtgaccttcggaccggccctggtcgagcctagtgcttgggtagggtccagggcgcacgggctgcgcgcgggctgtggatgcatgacgccgaatggtttgggaactgacttggagaggagtccccggtggctaagtccccgctccgcctccttgtcgcccccagccccacctcgcgagctcgggcattgctcggggctgggctctgggagaaagtcctctcgccttgcccagctcagagggcgtcctgagaagcttcaggtgttgtagagacgcccggtcggaggcggattcccggggaaagcctatttctgggtacccaggagcgcgtctggggaggccattcccagctttttggtttaaaagtcccgggcctacttctctgatggacaccctgccgctccctggcttggcagtgggacctcatctcccaggccctcagttctctgctctgtgaaacaggagagttgggcccatcttgtgcagtcctgaactgggggacagctggaggtgactggctctcactcagctgggagggactgggagggggccttaagctcatctagatctgaacgtctcccttcccttcttctccctccatcctgccagcccggaaattctggatgctggtttctttctctcgaaagcgacctctgcaaagacaaataccatccggtgggaagaactgggaatccgttggggaagagccccccaaccctcacacccacttgcaagtatctgccacacccaagatggcagggtgaagccggagaggagtttctcagggaggaaggggaggtgaggggccagggcgctggcctcaccggcttctcattttccccagagatgacctagtgtgatccacttcctcttgtctttttttgttcattactgggtcggttatttaaactctctgtatctcagttcacttatcaataaaatgataaataatagtaactaccccttagagt

SEQ ID NO: 61094 - DNA, 956 bp, Homo sapiens
taagccccagatcaacctttttttttctttttttttttttgagatggagtctcgcactgtcacctgggctggagtgcagtggtgtgatctcggctcactgcaacctccacctccccatttcacacgattctcctgcctcagcctcccaagtagctgggattacaggcgcgtgccaccacgcccggctaattttttgtatttttagtagagacggggtttcactatgttggccagactggtcttgaactcctgacctcgtgatccgcccacctcggcctcccaaagtgctgggattacaggcgtgagccaccgcacccagcccagatcaacacttttgaagtcattcaaggacataggcagagtgatgaaatattccagttgtccggcgggcacattcccagctgaggttgaacagggcgacactctgtttcccttcagctcctgtgctgcaaacaagtgtccttgtcgaggtcgattttgtgtcatgttttctcattttcatgctttttttggtggtttcactttttaggatccgaagcgtagtgttcgagggctgcctcgtgttcctaagtgcaagaaggctgtgatgtgccttacagagaaaatatgtgtgttagataagccttattcaggcatgagttagttctgttgctgtgagttcagtgtcaatgaatcaagattatatatttaattcggtgcccttcaacagagacacacataaaacaaggttatgtattgattggttgataaaaatgttgtgaccagacgcttgcaggaacctatctttgtatttcccctaggagcaatgattcagtattcgctcagtgttcatggtgactttacaaaacaaaaccacaatgaatgatgagaatcaactatatcttcctcgtgtagataaatcttcccctaacctctcccctgcactgtgcacacttctaccatcagcagctcatgcc

SEQ ID NO: 61095 - DNA, 2824 bp, Homo sapiens
tgttgccagtttcatatggtactaatatttccttaaccactccattgttgaacactttttcttgaacccttattctatgccgggcttgggcacactgtggtagatgggccagacactggaacacaaagcttgagtttgggggagaccagcatgttacaggcagtattgtttgattgtttctagttttccacaactgcaagtcacgtggcagtgaacatctttgtctgttaagcttcatttgcattttaaaagtatctctttgagatctattctagaagggaaatggcctacactgtgcggtcttagccagaacaagagtgcagagttctctaaatacacctgcacacagcccagctcaatgccacatatgaatgctcttaagggaaactttatttttcaaagtttcaagttgttttaattgttttctgagtaggcgatatagtcacacggttcaaattccaaaggtacaaaagggttcatatcccagctctgccacttgctaattctgtagccctagtgactatgtctcggtttcttcttttctccattacagacaatgctcccctgtacaggggaggacccccttcccaccctgtcccccagcctcccaggccccctcccaggggtctgtccttgcagagatggcctcagctcatcccaatatatgtgacaggtgtgctcagggcctgcccgttgctcttggtgacctgggtcttttgtccttgctgcctccagcttcagtccctccagcttggcccctaaatcctgtcttctccagtaactatctccatgttcagtgaagtttctggggatcttggggtgggggggatgtcagctgctctttcatatgactgttgtaattattattacgttaagcccagagtggggtctgggcccatactaagtgctgaataaatacttactgggcgaataaatacttactgggtgaataaatggtggatactaacatcactgaatgcttgctggactctgggcactatcctgaactcttcatagcaaactcatcaggtagtcatgcttatctttcccattttaaatataggcaaattgaggcaaagagagcctgagtcacttgtgaagccacggacctgggattctaacccaggctgcctggttctcaagcccatgcttaaaccatgaggctgcatagctctggttgatgactgaaggccaaattgcatgcagtaccggggacaggattggtaccgtcacctgtaagcttgggcctggtgggagtggacagacctgcccaggacaggtggtggggtcagcaggacaggcaggctgagtcagtttagtcctggatgacccagataggcaaagtggctaggacctttgaaccagagaagattccagagggagggagggtggaggaactcagtccaggttcctaggatgctgggggtgtacagggtttgcaagagcagagcccaaggagaaggcagagcagctgggactagaggcccaacagagcaaagccatgagccttcaaccacagtggctgagcgggggcctggggtgggtctggcgtggtgggagccaccaccagaagggcctgcggctgaagctggctgcctctgccggcaccaccaggcctccacacgttggggtcagtgtgggcaggtggagcccagtagggacagcggggcacctagctggagtcaggaaggcaagactggtagctggagagtgctggacgcacactaagtgacagaaggcctgcagcgcacacagatgtggaaagtttgaaggcctttgacctgccagaccccttgatgtgggctgtgacgtgtgagctgaggcagtctggcctgctgtcagcgcttccgaggtccggaagacctgcctaaactgacttcccctgctagaggctgtgggcaggggcccatagagcctgtcccctgttcctgggactgacccaccgagggtcgggggtcttaggctgcactctattccccacctcctaatggaaggtcttttggtttccccaagggaggagaaacccagggaactttctcacaagattttccagacacttcttggagccacaagcatctgtgagaaactgccagggccttgtacagttatttagcccctggaaataggctggaggcatttgttgagtgtttgtgctttgtgcatgtgtgagagatcctagttctgaaactgctacttctcttccatccccacgggacctccatggtcagcctggaactgtgtttttgtttctgtatgcaccaaagcctgggccagaggtagaactaggaagcagctgtggctcagcttcacacacgtctaggaagaaggatctggcagacacaaagccatggagaagccagcctggccgcctgccttctcccaggctgttcactggggcagggccagcctggcttggaagagaagccttcaggtggcagctagccaagggtcggttgagtcacagaattgcagaattcataatgctggaaggaaccttagtccttggtccgatccatgctcaggaaatacctagcacagctgctgctgctctcccaggcagagcccctggcagacatcactagcagattcctgcattctttcagtcgagccttcaacataacagtctaggcagctgctgtcagtcaactggggttcacatgggaagttcaacctacttgccatcccagatctgatccaacctactatttgtattaagaggctgctgaacctggagaaggaaagtgagttgcccaaagtcacgtagtaaacaacagaaccagacagtgtcatttcctttatatcatatccattcttgtaatggtta

SEQ ID NO: 61096 - DNA, 544 bp, Homo sapiens
ccagatagtttctccctcctggaaagagagcagatttttcctcctgaccaggataataaaatcatacctctcactttggagaatagtgtctccctccagggcaaaacgcgggcaggagtgctagcagccttctctaaacgattgtttcccaagcttgagatttctgagccgtgacgggtgctcagcatccacccgggtccacctctgtgtaacattcagcggacctgacaggtaggagtcatcaaagcaaacatgaggctcatgcaccctgctgcgccgtgagtcatagagtcctttgcctttgacactggagtctcatatctgccagcacctatgagactgcacaggctgccttgctagcctgcaagtgggtaaaaccccagactcctgacagttcttgacaatgaagaaggaagacagtgaaaaatcatggaaaaattaataagactatgcagtatgcaggggaaccagccgcttcaagatggcttaaacataaagcctgagacgagaagtgggagatgggcctgagtgagcaggctggacc

SEQ ID NO: 61097 - DNA, 878 bp, Homo sapiens
ctgaccccaactgtgccttatgccccatcttccacactcactgcctcctcatcaggctgtgactctcttctgggccttggaggcacttggttgcctctacctttgttaactcagcggggttcttccattaagtcaaatatttactagcactcaaaagagatacaagtggggttcaactcaaacaatgtgaaaatggtgttactgactacttgtattacttcccctaaatccgtgtgacctatactgtattttccccgcataagcccagaaaagtcatatgaggtcatattcgagaggagggtattgagcaagacttctaagaggcgcagagccctccggaatgacaaacagagattgtgacttggctggtttgatagcttgtgctgggagttccgctggtcttcctaatgcctcccgtgatttgccgatagggcaactgtccctactctgtctgcttgtactgcctccagcttggccagctgtcagctaaacaaagacaagtcgaacaaggtctaaatacattggcgtgccccatgtcacagttgctgtaaagggtccgctctccagccagccctgctcacctgccaagtatacatatatgatcacttcccgacacacagctgagcagtgctgaggtgaggcatcaggctggggttttgcagtgtgcctcgctgagcccactgccaaccccagagaaagaatctgacaatgtagtttgttcaaacttacacagcacataactggagagaaggaatgacacctgaggtctgagcaaatccagagccatggtctttccaaggtcctgtgctgcctctggcatttacaaggacggccctgctgcaagaatgggcccaagcccatatcccacatgcttggca

SEQ ID NO: 61098 - DNA, 1499 bp, Homo sapiens
agggttagatgctgcccctgtacacacgtgtatactccagccctttaacactggaactgttcactagagattgtctctcccctttatgaaacaatctctgctcaaaaagcttagtaaggctcgaaaatgtttgctatgcaagtcccagagtaaagaaagctgggctactccattcaccacataccacagggctagtcaactaccctgggcactccttttcatctataaaacaaagcacgcgacacaaagtttcttcttccagcccccagatactataatgcttggcatagaacactccacgtaggtataacctcaaatcaaatagggacgggaaaggaaaccagttaactttcacttccaagattgaagcgggtggtcctgaaactctcaccagctcaaacctcccagaaccagagcttccctgacttctctaaatagatgtctttataagcttgggtatttctgttgtcgtcgttaatagccctttcccacgggtgcaatcctccacattaagaacatcaaaagtctgaactgttcctaggtcgtaaaggctggaaccaagccccagtcccagtaggggcccttggctgcgggatctcagcaaatcccgtctcctcccgcgcctcagtttccccctccagagcactgagcccttccagccacaacacgcgtgagaaacgagaaacctccacccccagccccaccaagcagaggccacagggtttcccttccctcgggattcactgtttcctgaaattccccctcgcacggtgagaaactgattactcagaaagggacgggaaaaatgaaaatcccagccctgaggtcgagagcctgagagagcagacgggaggccctggcctcgggcgtggggactgaacccggttctgtgctggggctcgcggttacctgtggcaggcgaccgtggtggcagtggtggcggcggcggcggtgagtgaccgcggtggtggcgccggcgggaccgtgagaactcgcggcggctcgcagcctcacaccaaacacccacgacgtcggcactgctgtgattgctgcgggcgccgccgctcctcgcttaagggccactgtgccgcggtgactggtggagctatggggcgtggcatctgccaaaaccaatgggaggagaggacgaggccggcgagccaaagggactacaaatcccagtgtgcatgggcaggggcttctgggctgggcgcgggggtggaggggcagtagttgcgcactgaagtgaggtggggaatccgaggtacttgaggtctgggggcgcggtgattccagaagcatctaccgaaagatcataccagctcttggagcaaacctgtccgcacattggagccacttaggaaagcctcaaaaatactgatgcccctgtgaaaataaaattgaaaagctgttggaacccccccaccgaaaaaatattttaagccttgaactgactgtaatgtcagtcacgtatgcttacaacttctattcccacatta

SEQ ID NO: 61099 - DNA, 2121 bp, Homo sapiens
gtgaggcacatgcaatgcttaacacagtattctacacttaataaaaggtttgataaatgttagatgccattattatgattaccacctcctggtgctgctgaaaatttttctcttcaccgtactgggctaaacctcacctgagagcaataaaagcaggagctgtaattacttccaatatttaatttggagacaataaagctttgagtctacgaggaataggctttggagtaatgtggactccttattaggacagatgatcttagacaagttatttaaactgtttgaaccttactttcctcaattcaaagatttgagacttggaactgtgttgtaggcttgtcattagggccaagttagcccaatcctgtacacatagtgggtgctgagtatttgaattagtgaatgtggattttagacttatttcagatagtcaatgaactgtatgcataacataaccacaatactgccttttccatcctttgggtctcagctcaaatatcatcttctcagagagaccttccctgaccacctgatttaaagtacctcccgtgcctccagtcacttttccccgttttcttgtcgttacaactctggtaacgccctgaaattgtcttgtccattcactgttacgtaatatctgtctctgccactagaaagtaagcgccatgcaatccggatcatgttttcttatttccaccttctgccgtggacctctggcattctcgtctgtaaaacttaggggagatggtgaggaaagggagaaacacgaggtctagccggtccacccgggtctcaagccccgcccaactcaggcctcgcgttccttccaggctgggcaccgcctttggtcacccacgtggcccgcagtaaggccccgccctttgtgggtgtggcctttcacggcgtgcgggccgtccaccggcggcgagccacgtcacacgcacgcaggccatgcgccgcgcctgttctcgccgcgggcggaaaaggggcgtggccatgcgcgaggaccccgtagccgccagcgccaccgcctgagtcgcctgcaggtggctgttcgcgtctccctgccgtgcaggcagctcgaaagccactctgttgtggggtcctcgcttcccttccacgtctcccggaagcggtagcagggccccggcgggtcggggaggaggtttactcagcttgggccccctccgggccagccgccgagggggcgcggcccaggacggcggctaggccgtagtgcagcctctccggagtcctcaggtgaggcggaggcgagggcccactggacgagacgggggtgttaacggtcctaggagcgggggcgcagtcccttcagtggagaccctggtctctccgttttctttcgggtcgcgctcatcttcgccctgttaggggctgaggagggtaactggagagactccttgggcttcagccgacgtcgtttactgccctcctctgtcttcctttctcctgacccctgcctggcctggccgttcttcccgcacggaacgagatgggtggggagcagagtgggggtctctgctcgcttacctgagattccccaaactgacagaccccagggctctacggactgggcctgaccgactgacctccagcctccctccctctgtgctgacgcctggccttcgaagcaggccctgccgcagccctttgcagacccatccccatcccacgcactctctgcccctgggcagtgtctggggaattgacgggtgcctctgaagtccttcgtgtctttgagatgtttgcccagggcccatctaagtatttaattaggtaatcgacattaattgcaacattagtagcagttgcatggtatgttttaaagcccaattaattttgaaatgggaggcaagatataaagaattaatgagcgtgttttgattttttattactttttttgtagagacagggtcttgccatgttgcccaggctggtctcaaactcctggcctcaagtggtcctccccgctcggcctcccagtgtgttgggattacaggcgtgagccacagtgcctggcctgtatggtgttctgtatgttacagagcatttcatctccattttcatttgattttttataaactccgaaatacataggca

SEQ ID NO: 61100 - DNA, 868 bp, Homo sapiens
attgaagaaaattcttttgggagccaaacccacggtagttaatcagtcctcttatttcttttagagttaagcaaattgaatgtgtcatcatatgatccgatggtgtttctcatctactgttatggaatctgtctccactggtgtaagggcagactctctgcaaatgtgtggtgtaaacaagggagacatcattgactactattagtcaatagacagttgtagcagggacttcatgttgtctggagggcaacttcacccactcagcatctaacaaagtatttcaaatttgtttctctaagacattttaagattaaaaaaagaaaattttgaaatctgaaagaaaacatgtcagtttggatcggggactatcccagttgatatctttttgttactaggattataaaaatgacaggaggctgtacttcacgtattttctgggttgtgttttttgtgtgtttttccccccacatcctccacaaataaagctgagagactgaactttgatccaagttgaagagttgaaggcattgacctagtagtgaagcaagagcttagaactcttgttttcaattgtttaattccctctgagattacctctacaagtacaccttctttcttgtgaaatgagattaacgtggtaaatgtggctaattcaagtacctactaactgttttaaaatagctataggctgggcgtggtggcttacacctgtaatccgagcactttggaacgctgaggcaggcagagcactcgtgcccaggagtttgagaccagcctaaacaacatagcaaaactttgtctctacaaaaaatacaaaaattagccaggcacagtggtgcatgcctgtagtctcagctacttgggaggc

SEQ ID NO: 61101 - DNA, 872 bp, Homo sapiens
aaaaggcccaaatgtgtcctgttgttgttttcatttattttatttctgccaaagctgaatatttcttcgggtgtgaattgctcttttgtatatttccttttgtgcattgcctggtggtatcctttgtccctgcttctctcctggatttataccagcaccagcactttagtcaccagacatgaccttccacaagcagcccttgacctggagaaagcgaagaccttctgtccccctggatcctcccagtcctgtccccttggatcagccgcttggccaggattttgaaatagtacagttgtctggtctgagcaaggacgccccatctgtccttccaaactccagggagtacagagagttattcctgtttgggttcgacatttcctgcgggatctgacctgctgccaaccccagttttgtttccaagaggccacctgctgagtgtcagcagcggtcagcggcctccaaggttgctattgatcaacgtccgttccagcgggttcctggcatccgaggcctgctctgtgtcccgggagaagggattgtggtgcaatggaaagctcccagggcacactgcgggggccccacagagctcaggatgcagacgggcttcacctgctgaacctggataagcccctgcgtgtagcagagctcgtttcctctctggaaagctggaaaatgccaaggctcacagacactaagacaacaacagaggaagaatcctgccgaggccaccaggacaccatgctgacttgttgctgaccattgctattttgtgtgtaaatttttattaaatcagttatcactcttttgtgcagtcatagaaaagaaaatataagcaaaataaatgtcaatattctgggcttggctcttcc

SEQ ID NO: 61102 - DNA, 2162 bp, Homo sapiens
taccgagttttgttgtttacctcttgtacgctattaaattttcatatatgggttctgattcagtaactaggcagtatgttccttggggacaggagaaggcaggcctcagtaagaaccatctctctggcacatgtgcacgtgtgaagataagttgatggatgggataagtgagccgtaagcactggaaacaaaaggaggagggaagcccagtgttggcacagcctgcaaaggaaggaggaggggcctgcaatctcccgcctggccaccctgtggcgctgtgggtctggaacagccttgaagatggctgtggcaggactggaaagagcctggccggcccatctgtaagttcaagtgctctggactcattcaggccctggactcatccaaagtcaccttccctctgtggttatgcagttaaggggcgggagtcacatgctcttgaattctagacagggaagatgttctgtgcatccgggtgaaccaagttccagcctgacagcagctctggaaacaacccaaatggctttttggccagcgatgacgatggcagccacccagtaacacccacagtcaactcacaggcacgtgggtgggagggccgcacaggcctgagccaggagggggatgccaggaagggcccgggtgagaggccccgggatgcaagcgacagagagacagaggtggtcccaatctgaagggacttagagccagaagagaggggctggatgcaccctcaccaccacagcacaaggtcctgtccacgtggcctggctggagggctccaggcattccatcctagaaagccatgtgccttgcccgcaggcagggcccctccatgcccctctggggtgcctgactgcctaggcccccaccctgccctcctgcagattggcagagcaccagatccctctggctatgctgaggagctgcccttgccctgtgcctccagggtacatccctaacacctccgaactgtccctctcgcttaggatgagtgactcatctctccctgaagttgggggcccctggagggtggggcccctgcaggggctggcactgagcagggctggatttgtaggggatttgggcgcttccgaaaggatggaaacaattggatggcagtgacatcatcgtgtgttaaaggtctatgaacagtcctggatgagataaaactggaatgacatgttgtgttttgtttgtgaagacattaaaagttccagatcctgaagctggcatgccctggggatgcaggacaaacagcctggctcctggaagccacctgaaaatctatgacagccctgcctggctcctaggagcagtggaccctcagcctcgcagccccttgtagctaatgcagcaacctcaagggccttgggcaggccaggcatgtgcagcgatgcatacatgtaggacacagagctacgagcccaggttccaatccaaggtgcacagtctcaggagctccccaggagctagcatctctcatgggcatcgggcgtaaggacacagtggccctctcaggtgccctcgtgggacaagggaggagagaaggcacttcccgtgctgcttaggcactgaggaactcagagctgaaggcactcaaggccaatggcaaaaggcccatggggcctgggtcactgaaaggcagcctggagtgagtcttccccagcaggactgggtgctgcccagccgtccggttcactgaggaaaggaagggtcacatgaggactgtggtcacaggaggagcgggggtgtgagagaaggccaggcccttgccacatggactaagcagtgacttcacagcttcagggcacaggggctagggcaggactgtgtctcctcccttggacccaccatgaggagagggtagggaagtggcatctcctgagtgttggcatgcctcatgctgttgcgagggggcaagggagaactcgggaggtgtgacctgtaaagcccagcctaaggctgagccgctgctccatgctccccaacggctcccatggccttcggaatcaggtccagactccttgccagccttgaagtcctccatggccaagggcctgcctatgcctccctcctcccaagctctgggcaaaatgagccttgctcggtttctcaatcaagctccgccacagggtgcaggctcagtgccccaggcagtg

SEQ ID NO: 61103 - DNA, 3384 bp, Homo sapiens
cgagaagcaccagcaatgagggccccacacactaatacagggaactcaagaacagacctgtgcagggccggaagtgagggcggccagaaggcacccagtcagggaattcctgagtgtgttgagtgcaacagtctctcaagagaagcctcaaagagaggaggggactctatagttaactggatggaaaaggctaaattctgcagaacttcactgattctatggcatgtttttcatattttccatctctgaaattgagatgtgtctcataattgatatttcacaacttacttaggatttttttcttttttatagaatatgaagtatcagtgcatcttacaatcggtaatgaaattcaacactgcccccagactaaagattcatattaacacattactaaggctctgagaagtcctgcagcaaagaaacatgtaatcctgattctccaacatatctgacacttttctcttttccttattttgcctttccctttgttcacacgtgagattatgctgacactccacaaggtgccacctggtgccctgtggatgtctgcaaagctgcaaggggatcctgtcacttctagggcaactggggtggttgggacacagttcttataattctgtatgatgactgttcggtaaataccacagtaacaatggcaacacccatccacggatgctacaagagaagggcaaacatatgagagacagtctgcaaagaatcctcttagaaggttcttgccaactacaaaggaaaaaatagaaatttagagtggaaaagcctggtggactttaaccaaataactgctgctgagcagacagaagacatcgttgtcctcatgcacctcctgatatgacgcactagggagggactggcactgctgggtggtgttcctgctgaaaatgtatgaccttgacccagtcacgaaaacaccagataaacctgaattgagagacactccacaaaataaacagtcaaggttccaaagtgtcaaggtcaaaacctgaggctccatcccagatggcaggagaccacagagagcgacaaccagattggatcctggactaaaaaatgggtattagtgggacaactggggaaattcgaattcatttaggtctttcaattattgaatagttatcaatgtgaacttcctggtttagataattatggtcagataggatgttaacactggaggaagctgtgcaaagggtatatgggaactctgtgtactatctttgcaactctgtcaaaatttcttaaaaataaaaattacactaaacaaacctgtgcaatgtgaactttattataataaatctacaatacatcatctagtagccaataaagagatttttaaaagcccgcttgtgttacatgattggtcaccctgaagacactcttgtttggggaaataaacccaggtacacatttgcaaacacggggctgggcgtttgggcagaatggacagaggggagcaaatgcctggcagggtctggtctcatgggggtcactgcaagcctaccatcagggcgccaggggctgctgcctttagcactaaatgcaagttgagaaacacaggactcacagggtcacagcacacagggtgtggtctgaaactcacaatgcactgtctgccaggagagctcccatctattgaggaatccttacaacaacctatgaggaaggtgccaccaacattacctccctccccattttacagataggaaagctggggctcaatgcagttaaataacctgcctaaatgcacacagctgggtgtttaggagaggatctgaacccaggcagtctgactttagattcactatggcgctgcttctgaaaagacccctgcagagatgtgggtcccatggagacagcactggactgagagtcggaaaggtgctgagtggtcctgggtcagccatgcaaccactctgggcctctattctcattgttgaggatgtggagaagagcagtttttgtagggcttccagaactcaagatctctttcagctggaaaaacactaagtgagctataaattcacactaaagtgtaaatggctgctgttggataccttctgaccaatctgaccaacaaggaggttttgagtacccatgtaccctgcttatatcccaggggagccaggagactcagtgtgagtagggggaagaaagcctgggagtggagtctggagggagttagtcaacacagccaggggaaaggaattttgggtgagagccagagtcccaaagacaaacagtctgttcaccaactggcctaggatcagcagcagtgccctagaaaagtgatcggagccagctgatgtcattgggagagtacctcctagaggaggggtgcctgtgggttgagaggggacagaggttttcagaaagctctgcaggaaggcctggggcaggcccacctggaccaagtggggtatctcgtccagaagccactgagctggagggcgctggaggggttggtgggctgtgggtggaggggccttcttgttttgctggggagcgggtccctgccatggtcttaaaggctcagcaaggttaagctctgagtgaacagacaggaacattcttccctagatgaaggtgcatctctcctgcagggtgccagccagtcgccatgagagctcagtccactcctttgagtctctcctgggagcctccagaccagtgccctgggcaggagggacagagggcagcaaatgcctggcagggtctgttctcatgggggtcactgcaagcctaccatcaggatgccaggggctgctgccctgtccacagtgcccacagctgtggaaatgaggagcttggcagagaatccagcatctgtttcatctctgccagtgcccttaggaggcctggacctgacaacctctccaggaaaagctgatccaggctcccgggccactgtcctccaggcacataccccagtcctggtgggacaaaggggtgaggctgctggagggagagtggggaagctctcactactctccagggacccctgctgcagctaggccagggaagaggagatggcacagaaagggctgcgagtaggcctgtgggcctgatgtggagctggctttggctgtgggggtgcaggaaaggggacggggcagtgtgaatgtgggggcgtgctccctgaggccctgtcctgccctgaacatccctggcctctgctgcctcaactgagagcccggccagcaggactgatgcttccgagattcccaggtcctgggggctgacagggtcttgtcttagaatgtgaatgtctggatggctgcacaggtggcccctggctccagaggacaggagcagaacccacagaagggtcagccaagggcagggagatgggagggattctgagaatca

SEQ ID NO: 61104 - DNA, 1129 bp, Homo sapiens
agcctgagtcagacagacctggctggatgctggcccagccacctgaatgctgcgtgacgtggcatgtctgctaacctctcagagcctctgggattcatctgtaaaatgggaaggcttatcatgcccacttctaagagtaccaaaagggagaatacaaggagaaggcctaacccaaaggcaggaacacaacacatagccaataaatggtggtctcagactcccatgcagatggtctgcctctggagctgtgagccaaatggtacccactggtcccaccggtcaccatcacaggaaattatgcccaaggccaagtcaccatccaggtcagggttcaaggcagccaggttaggcctcaatcatggtctgtagggcagggagcaggggctgcctccttgaccccaggataaatcctcacaaagccggagggcccaggccaagcacttttccttaaaattaaacaagagctctcagcagggcacacttggactaagcagtgaactaggaggttactgttaacatgaatctctccacaaagtctttctcacataaacaccttgagaatgtggccttgagttctctggctctgcctgcccaaggggtggggaggcgtcagggtgagccctcagggacaggagcctgcagctggcaggggaggcgccgcagtgaagagggaggcccctgccctccagaacagagtggacccatgaggtccagcagccacattacatctccacgtgtttgattaaaggccttcagtttctgtttgtgtcctccgcgcagttacgtaactccacttgcttgcctgccactgagctgtctacacacactcctgctctccagccactgtgttaccgggacacttcaatgtcacccatgggttcaacacagcaaaacaaaaccctcagagcccccttccgcaagagcaccctgaggcttttgtttcctcactgctggtcacaggagaatgaaaggacctccccagaatgactgcaccatggaattcaaatgcttcctgccccaaagtgcttaaaaagacaagacccctctgtctccacacctcaggccgtggccactttgtgaccacaaaggtggctgcctgccacggatgtggtgccacacgtgtccctac

SEQ ID NO: 61105 - DNA, 1472 bp, Homo sapiens
aggaaaactagggttccaaggggttatgtaaatgactaacatcgcacagccagatcagaacttagatctaagtggatactgcttctgctaatctataaaaagccttagcaaagctgtggtcctcaggaatctagaaattgccgctttgagcgaccagccacttgcacttcacactgaaatctgggctcatcgggagaagcgaaggcgcgtagggctgcctgcaatctgttccatactgctctcctgctatgccagggaaggtgtttatttttgcaagtgcctgaggttgggaagatcaggccccaagagagccagagcctctggccaacagtcagcgtcacctgaccccaagacaggagcacctgccaaaagccagggcagcctgacccccgcttcctgacccgccacatgtctccctcccggcacgcggccaccaccacctgcaaggccagtgcctcggaggcagcggcgccagcccggcacctggctgacccccaatctggccttagcagaggccagagaaggccacaagccccacccctgctctcatccccacccccaagtgggtttccctccaggattcaaggctgactgttttaaaaatgttacgaaagacatcataatgacaactacaaatggtcactggcagtgggcaccacgctcaaagcttgcgtgcatttctttcattgtatttaacaaccactatgagaagtgattttacgaatgagaaaagtggaggacggagacttttaaaacctgcctagggtctcacagcaggaaggcggtgaagtggggacacaaactcagatctaaggctgcgcttctcactccattccccgctgcctgcccctgcaaccccgctccccacgcctgctctgtgccctaggcagctgtcctctcaggccacaatcacctggctgccttgtcctctggccaagtcgggccaactggaggcacagcagaagatgggcaagaaggagagagggagggaatgtatttgcagcatcctcacgcccccaccccctgccatatttctggcagcagtcacagcccccatggagcagggcagcccctctctcaacactaccgcctcccctatggctccaggtacatttttggtcccctagtcccctcaggcctaggggtggtgacagctctcagggcttgttagcaccggggaactttgtcctgtgctggctctcgggcctgcccacaccctgtgatggtcccttactaaactcctctccgttgcacccccggaacgcagcagctcttgtctgctggtgtctttaactcctctttcttactgtttgccaggaaagatgttaagggatttcccctatatagaaaaaaaaaatatcctttagacctcacaataagaaactactaaggaatgctgttccctccccatggtgacaggcctgtgtacaaaacaacataaaataaaaccaaaaccaggctagctgagaagc

SEQ ID NO: 61106 - DNA, 2819 bp, Homo sapiens
cattcattcaacaaatagagaccaggcactcgctgtggacttcatgctgcaccagggcagcagggatggcctcaagggcagacatggttggcagttgggccagtgaggcaaaataaaatggaggctcttccagaatgacccaaaagagtgcagtgagcacacaaaggcaggcacaggtattcacgctgggcagtcaaaagccgactcaaaggagatggcaggtaagctgagccttgaaggacagtggaatgcctccctcatctcccatgggtgtgtatatctgcacatgtacaccagagagccccaaatcaccagtgcagactgatgtgctatggaaattctgcactgagaagccaaggggaatgggaggtcaacaaatggccaaagaggccatgctgcctaggaaacaggacgggagggagggagggagggggctcaggccgcagaaacctgtctggctgctgtgacactggtgagtgggaggcagtggtctaccaggcactgcatgaggcccagaatgggaacaaccatggctgtccagggcctggtgcccgacagcaccgtgaacagctgcctcaccctcctgggtaccaggaggtggcagaggcaggtttcaacccacccaggtcggtctggaccagagcctcctgcttcagttactgggcctgtcacctcccaccagaaaccagctgggcccagggcctagccaggagaccagagaggtccaaggcctgggctaagggtggcaggcccaggtggatgtatgtggtgccaagtggctgcctcttcccagcctgactccggcacgtgatgactaatttgaattgttctaattcctgaggagcatcctcagagtttggaaacaggtgggaggagcactcgccaagcccaaggccaccctttccaagaaagggctacgaaagcaatggtggcgtcagtgagacctgcccctccccaggagcccaaggtcccaggagcccaaggtcggtaacttcaagagctgcggggagcagaggccacaaccggagggacactgtccccgtcctactgggaagggccgctcctatagcaaccagccctgccccaggaggtccacatggtgcagtggactgcaatgtctaaagggcatccggttgaggccacaaggtcatgctctgtgacagcgtgagaagaactgcaaacatctcactgaggtttaagataaaccaaagatgctgagagaacaaatgtgacaggctcctcagtattcacggctgctttcccgcacgtcagacacagccaacaatgacaaacacgtgacctcctccgagaggctggtgggagcacgtgccccatttgacccccacggctcttgctgtttgctggtggcagcctctccacaccccctaacccccagccactctccccggcgttctgtggcccacacccctcatgactcaccaggctcagcaccccaggggccgggtgagggctctcccccaggaacactgcccctattctctgggctctgggatcgttaccaacaacccgcaccgcattctctcccactcatctcaataccgcaggggaggatgcagcccccagaacttggaaatgccaagaaaaatccccccagagcagagcagagaagggctgagagatgctgacagctgccaaaaagggacctacctgctgtcaaggggtggaagccccaaacctcagtgcttgtgactgtcagagagctgggaaagccacggaacacacagagcctcccggctcggcgacaatgccctggctgttcccccggcccccaccccctaacaatgctccttttttcttgggcactgaccctcacttatcagggctctgtcctcagaagagcctgcaggcccaggcagctggaccagggaggccctggaaggctgttcccctgctccctgggtggctcctgctctgagccaggccagtcccaatccctggggcctacacaggaagccccggaaccacagcaattctccctgccaaccctctgaccccgggacaatggcatctccatgccccttgcatggtcaacagggcagtgttgataggaaaagaggagaccagcatttctcagcctaggacgtcagatcctgcctgcatttcaccatgggtgtgtgtgggtgtgtgtctgcctttctttcaaacagatggtcaaggtcaaactcactgaaaattcaaaatttggtaagagttattaaaggtatttcaaggaatgtgacggttgggtttcactgctggaataaacagcagccactggctgaaggcgcaggtaagcttcaggatgtagccccaggccccagccacctagatgcaccttacatgctcacctgagcagccacctgcaaggctggctcccacttcacaacgggagtccaaggccaggcccaggactcaagaactcctactggcgagcccggggctgagattcaaactcagcttcctgacaaggtgtggtccggatgttaaagacaaggaagacagaagagtgccacctggggctctaggaacccttaacatgacccagctgcctcctgcagtggagatggtgagactcaggcagaataaagataccagctgtgtctataaagtaatacagcttttcaaaaaaactgtcttttttctctgatcaaattaatgtccattgtaagagatgtttatatctccagttatttactcagggatcgaaaaattttaacttaatctcagagatagcctgtaacatttgtattacataacgtactcctccaagtttttaatatttatctttgctaaaactgaaattatactacacaaacatc

SEQ ID NO: 61107 - DNA, 3782 bp, Homo sapiens
catatggaagagaatcctcagatgtaaactcagagggggttcagatgctaggaactcccaaaacacagcaaatctatcctgcagccccctgttaaccatatgttcctggtagcaaggaccctatctcacccagcctgtgtcccccgcggtgtctaatcctaagggccacctactaaatgacaacagcagtgaccgcctaccacacagctgccatgtgcaggtgtcatgctgggtcctcacagacttcctctcacccagtcctcacaacacccactgcaggaggtacaaatcaagttattttataagttgaggaaattaaccttctagagaacaaatgactcaagtgccctgaatctcacagtaacaaatccaagattctgacacaggtacagcaaactggaaacacgttttctctactccgccaccctgctgttctagtaaacgttcattcagtgaatgatagccatatgtgaacagaaagtggctaagaacaaaaacagtccctctctccccagccaagcagcttcgaccctaatccctgagtgggccttgatgctgggggttttggaacatgcctggcacatgtttgggtcaccaaaaccctcctaacatgcagccatttgccaaaaggatttgtttgaggctgcgatctctctagttttgagggtgctgatcggatacccctaacagcgacagggctgggaactgggacaaggcagagctggacttaacacggctttgaagcaaagatccaaaactcaggccagtgccccacctgcatgtcctgatgggcctgacagggcactggggcttgtggggtggctgcagcgctcagagggagaaactggtgggcaaagaaagggagaagggcctcggacaaggagaaggaaattaaagtttcaatcatggctggctgcggtggctcacacctgtaatcccagcactttgggaggccaaggtgggcagatcacttgaggtcaggagttcaagaccaacctgagcaacatggtgaaaccccatctctactaaaaactcaagaattacccaggcatggtggcgtgcacctgcaatcgcagctactcgggaggctgaggcaagagaatagcttgaacccaggaggcggaggttgtagtgagccaagatcgcaccactgcaccccagcctggtgacagagcgagactgtctcaaaaaaaaaagtttcaatcttaactctacaaattgacttgaagtccaaactctttctcatccagctactgccagctccccaccgaggcccacactttggggaaaacccttagaaacttcttgtcattggttaaaaaaatattgacccaggattggccacgtgggccacaggtggtttcacagcacacacagaaccagaagctggggctcagagaagcaaaataacttgcccaagatcacacagctaaggagatcggattgaaatccaccccagtttatgtgcacagacagaaggggagaaaagagatgtggggcaggtggatttctgagggcaggaaataccagtgggaaagccgaagacagcacagtagagactgcaaaagcccagtgctctgtggagtcactgcagaaagcaccgaacacatccaaggctcaacccatcaggcactctttcctttggggctacttccaacaggaaattccaagtgtccctgtcaagcaggggaaatgccatcctgggtccaaggcagcagggcagcctccctgccccgcccagccccacctacatgaagaacaaagtgcaccaggcaggaatgtgcactcaggccgtagccagcctcagcctggctcattcttatctgtggcttgattaaaacaagcttggattacaccacaatctttaagccccaaggctgggggtggtgtcaccaggaatctgttccaagcgcacgtcatgcccaggccaccgttctccttcccctcattggtggcaggctggcatcctgcaggaggcccttcccagaccacagccccacccttcctctcctgccgcccacctgaaggccccaatacacatcttcctacagttctggcttcaactctgttcctgagacctttactgccccaagtccactaccctgagttctgggcaaatgaaaaatcttttccccttcaccagatttctcaaatccaaccattctggaacccggcttgtggatggctaggctctagcctccctcctcttctgtcccatcaccctgggaagacagagccagagggtactgaggaattcaggtgggaggggttgggggggaggtgaggagggggtcctaggagcaaatggagggtcacaaactgaagcgcccatggggcaaatgtaaaccatgaggctggtggtgtgggacaacagagaatggtggggcctaaggggcaaccagcttaaacactggcaacaaattcaaaggaaagaatgtaaaattcctgtgtgggccaaacagattgcatgcaggcccaggtatatctgagtcacccacgtgtaatctggtccaaccccctccgcagagataggaaagctgaaatccagacacaaggaagggaccatgaataagtttgtgctggcgattactgagaaagtctagcataaaaattaaaccgaagcctaggccgaacactggcatccctctgcttggctgtgaagctggtgaggatgctgcactcggcctggcagcagatggaaactctggaactcgagggccacggatgagccacagggccccccaggtaaaggactgacagccagccatgcaagcccctgggactgacccagatgcagaactgaccaatgtggcgacaaccatcacccaaccctgtggggctgtagatctcagaggaggtgggacagtggcccagcggacagcaacacggcagagagggaagaagggtgtggcctctgtctatggcctggccagaagggccaccgcaagcaccaaggctagcaaaggaggaagaggaagaagcaagaaaaacccgacaccgtgacggactagcgtgggccgcaagtcagggttgtggttctttaggatatatcttaacagggtaagggccttaaatgccctttccccaccaacctgacagggtttagcaccaggactcctggccagggcaggccccagggctctaggatctgtcagatcaggaagaaaggggcatttaaggtctccctcctgtaagatctaccttaaagaaccagatccctgactttgcagcccagtgccatgctgcttttgagcctgaaatggaagtctgtgccttagttccaagtcaccaggcactggttccttgcccttgcaggcacagggcatcaagatcaaaccaaacctccaagcctcacctctcacaaataagcagaggccagttacccctctgggcaagacctcaggcccctgtccctgccagtcagcagctctgcctcccgcagcgcttgagggctggtccatgcagccggccaggaaaccacagaggccaggtcagagtggccttttaattcaactcccctggtgaccctgaagagcactgccgcagactgagaggctggaagtaggctatgctgcccctgccccataacaaagactctacagcaaatcaccaggatgggggaagattagcgcaaagtgggtggagagtctccctgaaacgtactgacagcacttaaaaaccaattagatggcacgtgcctgtagtcccagctactcaggaggaggaggtgagaggaggatcactggagcccaggagttcaaggctgaagtgcgctatgattg

SEQ ID NO: 61108 - DNA, 2413 bp, Homo sapiens
gtgctgcctggcccagaacagatactcaagggacatacaaatgccacctgaacttctgcactcacctgcgcatgagctcgggactcctctcagctgtcccctcccatgcctccctcccacagcgcctttccaaagtccaaggacccatccttatccggtcctagccccaactgccagtcaggcctcaggtagaaactgaaggtgcccagcggtccctaccactccccgggcagagagtacaggctcttggaagaagtccagactcaagtctcagccttgtgaagccagctgactggagtggcaatgactccacagaccttcctgagcgctggctggggtctgagcacccagcagacgggaggagcagccggggcacccagtgaggtcacggctagggaggtgaatcaggcagcctgatgaggctggggcaggtgaggtgtttaggccacaggagagctccagtgaaactgaacatcacccggtctggggaaaggagggagggcttcacagaggaggtgtctcaagagttgcctcttccaagatgtccagagttccccagatagagaaggctggggtgactgtgtgagtagagactggtgtgtgcaaagcaggagagtggcctgggtgcagcagggttgagaggcaaagcccactcctggccaagcagagggaactgtcggggaaggagtcagaaagatcacagggaggacggtggcaaacaccaagaaccgccaggccaaggcctctggggtcacccaagggcagtgtggcatgtgagggcttctgcagcttacccatgctgagaaggtgcctgaaagcttggtgaactgcagactgactcagcaggtctgggggcaagggagtctgcatttttcatgggcgccccatcagtgcagctgccactggttcccagaccacactgggagcagcaagggcttagggaagcagaattaggagacctcagcagtgcacccccaagggaagagggaccaagaggggtgcagtgatgttgaagaggaaccagggtcttaagcagctcagtccacccacggctgggtctcagtgcagcagccacagctctacttcacaccaccagcccattccagaaccttctataccacctcagagcagtgcccctcctccagagcctggtgttgccatggcaacagtccacaaacagggggagcccaggcttcagtgccataaacaactctgacagattcaacaaataaagatgtactatagcaatttgtggggaatttatgagaaattaaaaattcaacttggacaataaacaacccatttcagaatttgccccacttaaagttaaataaaccccatgcaagcatttttcaagcatgatgtttcaaggctaaaaacaggccctgctgggaatgcttcctgagcctccaaaactgggtgctgctgggagagcacatcacataactgctcacatcacagggcacttttacagcttagaaagcgcctggctcaccctctgggtgctcccaaatgccacccgggagaccataggccgaggatgagtaatgctgtcaggattatgagcctcacaggcgacttgcccagagcacagtgactccccagggtcacaaggctggtcaaggtcagaggcagcgtgcaaacccatcacccagactccaaatccaccacgcatacacaggcagccatgtgtgcatttgctatacacagaaacactgcacccaggcgaggtccaacgtggagagctagctgtgttctctcgaaatctgtcctgctgaaacagcacccaaagagcctgcttcaagcagatcgacaaattctcccacatgcacactcactcacacattcactcactcacacacacttgctcactcctactcacttgctgcccagggggcgagaggcctcagatccctggattctgcagtatgaacagggcaacctcaccaagctgacttcaagatgaaaggctaagaaaggaaacagacgtgcgagtacacctgggagattttctagccccgttttctgaagaatcagggatttacagaaggtgagagtgaaacgggacccatgagatcctatcagctgtcagacagagaaagaagcagagcccggccgaggccatgcagggaggagaggcagaaccagcagggaccccagtctcctgcggccccagcctgcagcacaggcagccgtggcttcatgctctcccatgggggccacacgactcagggctcacccaccaggcaccctcctggtcattctcaccatgcttggtggcgctaggcaccttgatggagagaaaaaggatcatgacccacgattctggcatcaccacatgctgtctctcaaggggctacctactgacaggtgggagaaacccatcagctcggcgagagccctccccagctcc

SEQ ID NO: 61109 - DNA, 1296 bp, Homo sapiens
agacagaagacacggcacccggcccaaagcagggccattttcaaatacctttagactttttcattagggaattcatagacaattcatcacccgtcgtcagtacagaagccctgcgcccccagattctgaatgtggaaaacatgataatgtcctttgcactgtctctcagccactaaagtctcattggccctcacaccaaacaaaacaacctcacggggctccctggtcactggctcaacagttgcagcattttgcagccagtatagaaatgtggccaccagggggcactgccctgaaagtaataaataagaaacggaaaaactctttggtgttttcttttccttcttaggcttaagtgataaaatatctaaagcttccctagtgaaaacacaaagtgggcttcctcgggttctagaatggccctgatgacttctgccttctttgaagccaatattttggccaaaggaaggcaactagactttgaagacaacaactctttcagagaaagtaatgctctactccccagaacgttgatagcatagcttgctctgaacctcccacccctttaaaggaagaatgtctacaaggtcaagccaatctgcaggtccagcacgaggacctagttgtgagtctcggcgaagaatattttgcgagagcctcctaattaccaagcaaaacaagccaacccaatgacaagcctcaagcttgagttgcagacacaagatgacataaatacagacagcagtacaaagggtgcgaggtattcgctgggatttcccaagtcttacatgactgcagggggagctccggtgcctcacatcagaactggacttcgagaacatgccaaagcagctgctccaaatttctttagtgtcttagaatgcccttcccacaagtgagtgtatccgcggtacaacgttcaagtacccttttgtaatgttccaagggtcctaagactcattttcaaagctctggcttcgagctcctcctgatttcttcatgaattgctggggccactctgcatgccctattgatcatgaagagcctgtcttctagggaaaccggcctgggagaaggcagccaaccccatccccagaccaagggataaagaaccaggcactatcctgtacaagctgtgcccctctggctgcaggaagagcgcctgcggggcttgcacggggcaaaggagcagcaggcccttgggaaaggcatgaggcacacagaggtgctgccaggctcacctgcgcatgccagctcagaccagccacgggcccccaggagcaccaggggttacgg

SEQ ID NO: 61110 - DNA, 2901 bp, Homo sapiens
caagatgtgtggggcccccacagggacaaaaatgcaagtagagcccattttcaaaaatcagtctaacaagctgcatcacaaaaggtttccacctggagtttgcaaaaggctttcagagctagattctcttaggcttgcattgagaaaagggcttaactgcttctcagaggcaaagctacagttgtggagcaagggaaggcctacctgacccaagactcagtagttctgtaatttattaagaacgtgatctgttaaacaccggagactccgccaaggagcaccagcatggtgggagcaggggcacacagcccagatggcagaaggccactccacaccacgggcatttacccagcactttctacgcaccagccactccctagctgcgggaccccaagctaggtaccccgctcctctgccgatcggtccccgttctcagacaggtggcccagaatcaccaccctggccaatttgcagggctgctgcgaggctctaatgagacagcaaatcaccacatacatgccaagaattgctactcgcttcaactgggcttaacctcatgatatgcaatgacagcctcaagagccgagcacacgcggggcacatagtaggtggtccacaaacgtgggtgccctttcttcatgaaagggaaggggacgaaggaagaaaaacactccggtccaaaagtaccctcaagcccttaccccacagcgtggatgccccgatttcccaggtccctccgcaaccctcagtagaactcccaccgcgccctgggctgctgggggcctccccagccgggtcacagtgcacctgaacgccccggtccgtgccacctcgcccgcaccggccaccgcttccctggaacgcggccggcggccgccaccgccacctggctgctcggactcagtctccccgcgcgccgcttcttcccgtttggctccgatctcccaaaacaactaatgaggctgcaccgggctcgggccgggggtcaccgggctcgggccgggggtccccgggcgccggcgccgcgtccctccttacctgcacagctcggcgaaggcctggaaattcagcttcttgattttcttctcgctcagccagtagccaactctcttccctttcagaaaggtctgcatcttcctcctcgggcggggagcctgggtccggaggaaatcgcccacaggccgagtctggcggccggcgcgcgccgcgagcgagtgggcacctcctcccggcggcggggacgcggaacggggatcggagctggggcgcgcagtcctgccgcgcggagcggagcggggcggggcgcggcgggcggccgggaggagggagcggcgctcagcgcggaaggccactggctgggccaagctgccaccgcccacgcccccgccgcctgcgggctcgcccgcccgcccaccggctcgcgagcgccgcgccgcccggcctgccggctgaggctggggcacggctgagcctgagtctgagtcggagctggggccagggcccgcaggaggggaagccgggcctccgcagacaccgcccccgccctgcccgccctcccgccgcgcgggcccgagccacacgccctcaggcggcggcagaagcgcggcctccgagcccttcctccctcctcctcccgcccgggtcctcgccctctgatgttcccagccgggccgtaacccctgggcgcgcttggaccccggcggggcgcacgcggccactcggcccggccagagatcctcacccgccgccgccgccgccacttcctcctcggcctggtcctcgcgcgctgcccgccgagaagggcggcggcgagcgcccgcgcactcgccgcccctgcccgccgccgccccgcgctggcccggccgccccgcttgagcccgcggcggcgaggaagcggcggggcggccgccagggggcagcgccgcccgccgcctcttaaaggcgccgcgccggccctcgcggctacccggcgcctgtttgtgtccccgggtgtggggtgcggggcgcggggcttcctgggggcggccgtggcccggcggtcttacttcgggaagggagccgcggtgtgggcgtgtgttccgcctggcctttgggggcgaccgagccgctgagtttcggaaacgtctctgtacccccagcagggttcagcacccccaaggcaatccattgcaactgcgcccggaaggagaccttccaggaattcgccccttccctcgaggaagcggaccctggcccaggatggggccccccgggggggtgggtgaacacccaggggccctcctaggcgtaggacgtgaccaccagttctcactctaggtccccttcactgaggggggaaggggcggggactggaggcgacagcgacaacagcggccgtccccggagaccccttcctcaggggtgcgggtcagcgtcggcgccggggagtcactaaaccccgcctaccctgccctgccctatggggcagccagggagctttcctgcctcaatggtctctgggtttgggaaggagaaatggacttctctccccaggcccaggcaggaaaaatggattcccgtggagggaaggctcagaaaagtttgagaggagacactgaagctggccttggaaatcaaggagattttgatggagcagggaagggggatgagcttgaattgaggctgggagacaagaaaaagccaagttgccagcgggtgaccaagacttcccttgatcacacttgagtcaggctcctccgagacctctttctgaccaggccccgaccttgggctctgtccttggccttcttagtccagttttagccagaatcctgctgtcaagaatatctccacgcttggtatgtgatcaccctggccggcctacattaagaaactccgtctcaaaaaaaaaagaaagacaag

SEQ ID NO: 61111 - DNA, 659 bp, Homo sapiens
ctcctgacctcaggtgctccgcctgcctcggcctcccaaagtgctgagattacaggcgtgagccaccgtgcccggccaggtagctatttttttttttttaactgtaaagaatattgaactttgggagcctgaggtaggaggatcacttgaggccaagttcaagaccagtccgagcaacatagcaagacctgtctcaaaataataataataataatagctaccgtgcatgcatttataagccttcgacattgtgcaggcagcatcacatacagtcctcataacagccccatctgtcggccagttatttcctaccacttcccagctgagaaaactgaagggctgagagggtaaggcactcttccaaggtcacagtcagtgaatgttgaggtcagagctgaaagcagggccagctgaaaccacagcccatgggttcaacaacctacagccagaccaaaccctactcatcacccttttgtttttttggtgtgtctttgtttgttttttgatatgggggcttgggtggggaagaggagagagaagcaaccacccatttttatactgcccttgagctaagaatggttttaatatctttaagtagttaggggaaaaaaaatcaaaagggcctggcgtggtggctcacacctataatcccagcactt

SEQ ID NO: 61112 - DNA, 1093 bp, Homo sapiens
cctattttttaaaaatagtcactttttatgggggattacagtttaactgggccttctgtattttatctggcaacactacccatgaagagcactgtccaactttgaagccacctcaatgtgaatgtgacttttatctgcacctgtagtctgtttctcctcttctcctgggagcgggactactcatgttgattgggtgccaagggtaccaacccgatgccatattaggaaagccgggcatgacctccaggagctggtttgtttgttttgttgggtaaagattttgcctgcttacattagtgggtaaaggtttgttttcttttgagagagccagaaatatccaggcaggcctggccccagcagggttggtggaatagatcacagcagcttcctccatgtcgtgcctaggaaagcccgcaaaggatttttaaggtctagtgggaagaggagggaaaggcatcttggtcttttgtgtgtgtgtatgtggagggggcataggttatatgcaaatagcatcttcatgttggaaagcctggcttgaagcttctggacaactttcctgacatgcctctactcaccccagcactctctccaccatggccccccattctgtatccatacccctggcttacagaaagttcttcctccctttgtgcctagccttcgattccctcagggtggcatcagatctttttatcttctaacctaagacggaggccgccctgaggagtgttaacattgccctccatccctgtctctggctgttgttcaggagtgccgggtcatgtcaggacacgtggaaaaccggcgaactttcctcccttggaaggtccttctcacccacccacccgctggtcctctctcttcaggccggaacagtcccctgtccctccagtggaagcccctcccccatgtggatgttgtcctcagggccttctccaggacatcctgggcatgcctggccccctggctggctcagagcagagctgaattccctcctgaggaggtatacagcagtccatgcagccttgggtccagtttgtctttttggctggttcttccttttttttttttttttttgagacagagtcttgct

SEQ ID NO: 61113 - DNA, 613 bp, Homo sapiens
tatagatgcataaatacggcagggtctctgccctgaagaaggttataaaccaatgggaagacagacatgtacactaaacattaactacagggtgataagtgctataataaaagtttgtccaaagtagggaggttgtgcagagataagataacaaatgtaaaaggatttcgaaaagaaaaatgtgttatgtaagtcccctagaattatgcttatgcaattcaattgatttctactttcaatttaatcgagaacacagctacttcactttcagaattacgctgttttataaggtagtgctggcctgtaatctggcaatgggtaaattatccagggtctcatgcttttatttcgtcatttgtgtttggcgagtggatagataaataaccttgcagtttcccagagaatcaggaaacatttgacagtttgcccttgcagcctgtgttgcaattttcgtttttgtttttgtttttccctgaaacagagtctcacgctgtcgcccaggctggggtgcagtggcacaatcttggctcactacaacctccgcctcctgggttcaagcgattctcatgtctcagcctcccaaatagctgggattacaagcatgcaccatcat

SEQ ID NO: 61114 - DNA, 2268 bp, Homo sapiens
gggtctaaggagccattttcatgtccaagagctctgctcaactcacccactgtcatgccctctcccgctaaaaattcatttaatctgcttaaaaatgtattatctgggtcagggggcttaaagatcactctccagatacccccttttcccggtatctccttagggaccagggcgtgactagtctccgcagtaagccctactaaggctactttcctgttctcatccctcctgaacatccttccaagcagtctgtactcccccaagggagctaaaccagcctgcagagcctcctcgatttctgccacactgcagctctgggagatgccggcaatcaatagcgctttccgagggttcatgtccatccccctgcaccagtcttctaaaagcctcaaagtcatggtgcccgaaataatagacttaagttctaaatatgccagaccacaggcgaccaccgaaattcaaagtaatcctccgcggtaccccagagaaatcttgtcaacgtgccgaggtccagcagcctgcaagacagagcagacaggttagctaaaggtgccaacgtccagggcaagcgtgcaggccccaagccccgcgcgccctgcccccagcggcgacgccagggcagccgcactgcggcgcgcgcccctcacccctcccagccctggtgcctggcggatgtcgggcctgcagggccgcgtcgggcccgcttccactcaccgtgatctagtgctcgtgcccgcgtccgtgcgccggcggccaaggtgcctggccgggccccgacgaggcgcgggagggcaggctcccctaggctctgacggacactcgggggccacagcgaccgatgccggtactccaggtgcctgtggtactgtctgcaacgagaagtgatggggcgatgacagtcgcgagcgggcaccagggggcaaggctgaggagcgctgagtcgccagacccagagagccacccacctggagggacgtgccgccacccgcgccgccggagctccggctccagcccggattccacctgttttggtctcgctcggggaagctgcgcggcgggcgggggcgatctgacgtcatgaggggcgggcctcgggggcggggcgcgcgcgcttccggcccgagccggaagctccgactgcggcggcatccgggacggcgggcgggctggccaccacgggacaggaaggtgagatccgggacctcagctttgcaagcaggctccgccggcgaccgctgacgggcgctgggctcgcggcgctgcaaggcggcgaggcccgggcctggcgccgcctgcgcagccttggtcgcggcgtgccggcgctgcagcgcggcagggggcggggccggccgcccggaggcccaagtggcggggacgcctccctgccgggtcaggttctcagagcgggtctccggcggcggcgacgggggccgggccgcgcgtgacccgccgcagtcacgccgttcttaatcactagtagctggtgctccaggctggcggcgctcacctttctcctagccgggtgacccaggggatttattttatgttggctttctctgaaatgccaaagccacccgattattcagagctgagtgactctttaacgcttgccgtgggaacaggaagattttcgggaccattgtaagtgcttaggagttactgtcttaacttgggggcttgacttgtagcaccccgcgttcacgtctgaagcagtactgttatgccagaaagtgtttcacctgtcaaagtgaaatgtgctgtgagaaactagtttaattccagtttctggagggcgggtattatggacctgtttaagtaggatgcagtgatttattctgagggattcccgttaaaaagcagaactcagtatatactgaaatcaatggttttttgtttttttgtgtgtgttgttttacttgattgtaagtattacacaaaacaacctgtaagttttacatttcttaataggtgtttaatttaattattttaaatcttaagtgtgttagtgggatattttagaattctttttttttttttttaattagacagagtctcgctctgtcgcccaggctggagtgcagtggcgtgatctcggctctctgcaagctctgcctcctgggttcacgccattctcctgcctcagcctcccgagtagctgggactacaggtgcccgccaccacgcccggctattttttttgtatttttagtagagacgggatttcaccatgttagccaggatggtctctatcacctgacctcgtgatcca

SEQ ID NO: 61115 - DNA, 1572 bp, Homo sapiens
taggcattcgacacgtttttttgtgaaataaacgaaatagcgatgagttgtggaaacgcttgagtagaagcagcccaaataaatatagtgataaatgccaacaatttttattttttaaattattttaaaaataataatagaaacggggtctcgatatgttgccctggctgttctggaactcctgacctcaagtgatcctcctgcctcgccctcccaaagtgctgggattacaggcgtgagccccacttcgcctagcccgccaaaaatttttagatgcaattcttctttcctcgaggctcactttgtccaagtctgccactctacacgggctccccaagccaatttcccctgggcgcccgccccgtcctccggtcactgcagcaccgtctcagagctcaccgtccaagtcctcgtctggagccgccgccacccggtgctgcacttccccctgtaccagagggtcgaataattccgttaccatgtccttcatctgggccacgccagacaacaggccctggaaagggtcgccgtcacccggcgcctcacaggacacccgcagcttctgcggcttcccttcctgcccgacgtactctcccagcagctccatggtgaccgctaagcttccagaacacgacaccgggaagcgccacccggaggcggaaatcagcccgcgtccggcgcaggcgggagaagggagaggagtgacatccgtttgtcggaagtcgctcctcccccttccttcgctttttttccttgtcattggttcctggcactcgggccccacctcctccggctacgcccctcacggccgcttttcccgcctccgccggggccgagccgctgttcggctgacagttgaggatggccggagccgagggcgccgctgggcggcagtcggagctggagcccgtggtatcgttggtcgacgtccttgaggaggacgaggagctggagaatgaggcgtgcgctgtcctgggcggcagcgactccgagaagtgctcctactctcaggtgggcgcgcggcccgggcctcctctcccccggctcccgccgaacctccccttcccggcccggctgtccctattcccgccttgccgcagtcgtctccccagtggtggtccggggccgccgttagtctgccgcttcctcaccccaagctcacccttcccttttaaccccaacctcctgggcccccttcagcctgtgtccagcaggggcccccctctcccctgtctccaactctgtccggcccgccaggaagggccctggagcagctgctctgtccgtcctctccagcctcttcttggtgcaccactgcttttcacgaaaccaccccgcgacctctcagatccagacatctttgtccctgattttcccatcctaagattatttatttatttatttattagggaccgaatgggagagtcaggttaaagagattttcaaatccatagggcatttgcggtgagctccttgacagctagttcctctgcaatttagttggacaagtgctagctagtactttttctttctttctttttttggcaaaatgaagcaagtacccatgtctat

SEQ ID NO: 61116 - DNA, 2292 bp, Homo sapiens
atgtctactttctcattacagtaagatgttttcgcagagttaacagtgctctggtgtagataaccaagactgcttctgtaaattaggcctactccagagtacttattatctgtgctggtatgtgaagacgtgcaattgtagttcacaggagaaacaacactcctcagagtttcttgaaaaacggtgagaaagttctcaccctcggggtaaagctagcaaacactgtgcaaataaggtactgaaatatgcacactttttgccattcaagtagtccaacaagcacagcctcctcttctttatcaaacactcggtattgtctccctcccaacctgtcaaagctcaattccaggtttatcccgcaatagtaacttacccggacaatctaacttcccctgggagtagcagtcctcaggcctgctcccttcccagaccccgccggccactctcacgcccacccctggcggtcgcaaccccgcacccgggtaaacacgcgcccccgtctcgggagcggtttctcagcgtcctgggagcgacgggtcccgcccctcggcgcccggagcccaaagccggccgggctgccgtcgcgactccctcgggccgctctccccgccccgagcgccacacctcgcgcccctgccccagggacggcggcgcgctccagcccgcccctcggagcgcacagagaccggccagtccggcgccgccgcgcctcagccccagacggacgactggcccctccccgcccggcgccccagcgcctcccgcggcggcttggccccagccccggcgcccccacgcctaagaacagccccttcctctcccggacgccccgcgccacaccggacacagcctcggctccacagcctcagagacaccaagggacactcaccccggaggctcctcccgccgctgctgctgccgctgggaccgctgccgtcgcctccgccgccgccgccaccagcaccgccgtccgcaccggcgccagcacccccggccatcctcctcccaccgccgccgccgccgccctctcctctcctgtcagtggctcaggctccgggactgctccaggttcccctcgccgccattttgactcctagacggagcaggaggggctcggttcggcgtggccctggggcgcctgcgcggcgctgcggagccggccggagcccccgccctcccctgccgtcgtcccgctcagggtcacgtggcccgacgtcgccgcgcgagtcgggccgcgtgggggggcggtgcgttcgctggatccatgggagcggagtgcgcgcgcattatttttgctcgtcggctgggagccgggcgtcgggtcgctgggagtttgcctcttgtggcagcatcctgcttagtccagcgaattgtgacacattattaaatgtatcagaatataagaactgtgtcactactacgtcaccagatggccatttccacgaattcatgtttccgttcggcggccggcgtccctcgggtggtcgcatgcaatgagtgcatctttctcgagaacaactcttccgcggaaagtcattgctgacagtcctggcattccggtggctgcttcttggcagtgagcacttgtctatcgtaagcacttgtctgcatggtacttttacaggcaccaccttgctacttgtgtagtaggttaaaaaataatctttaagacactgaaaagttttccttaacaagatacccctgtaaacaaaggacaaaattgatgaaaacacacagtcgccacgtgggagagccaagtcgctcttccctagatgccccttgtttgggggtttgcaataatttcagcgatgcaataacaaaaatactgtatttatggggcactgtcgttttccagagagatccatggtttcatttgaacgccaaagccaccctttgtggtagtcaggataggtgtttttattgctgttttacaaccaaggagacaggctcagaaatactaacaagtaggcaagccaagatcagaacccaggcattctgaacccagtgaggaggcaccgttacacctccttttcctctgatagacattagcaactctgggaatttatttgaaagtattgtatttgcattttcaatctctacccattgtttaacaagttttgtgtcacacagttttttgttgttgttgttctgaaaccacctctaagcttcaaaggataagagcaatttggaattttgtgatgtgtttttaaccatctcttgaccctccattattttatgcttttcatattcagttggagacaatatcattgttgttttcctctggacttcctt

SEQ ID NO: 61117 - DNA, 2656 bp, Homo sapiens
cagaggttcagactaccactgtccgcccagctcctgatgccaccctgtcctctgaaggcctggcctcttcctgccttttcgtcctctctccagctctccgacctccacactgactgtccctgtgactttggacaagccccatccccgctctgtgcctcagtttccttatttgcaaaatggagaagtgggaccaggaccagactggggatgtccacactgtttctgtagctgtggagagattcagtgtccaacagatcccagagccaaggcccctcctcagccctgacagctgctgggttcagtgtcctttgcattagtgcctggtcctgagaaggagagacagccggcaggtggaggcagcctggggccaggctcacctcagctgtctccagccctgtcgtcttgatgaggccctgggcttccacctcccaggatccttgggtcacggccaccctcatacttagtgcatgtgtggcctccagttacctgccattgttagaatgtttttagcaggataataaagcactgggaaaaagcccactgcaccatctaaacgaggacctgtctctgcatagtaatggcagcagcaatggtggccgggatgttgaggttgatggaggtggagggagctggtgatgatgacagtttctaacaactgtgcagggcaaatgttcacaaagtcatgccgagcctctcctcatttccattctcctgccaccattgatggaagcagcgggtgtgctgttcccattttgcagatgaggaaacagacagactgagttccattcaacaaagagttcccagctctggctcagtcccaggcccactctgggtggtgatgcagctcattaaaatttatctttttgtggatcctgaggatatttggaagtcagcagagagggagacaaggccacacacagccacagagtcacagaggacgggctgagatcggggcagaagggctcattctgggagcactgagatccgagtgcatccactggctttggggctggcaactgggcaaggcgaccgctcagagttactgagtcgtgagtctcagggctggctggggagccagggcccctggctgggtttcgtgctctcgccaatcaaggctggaggccccatttcccctcgggccccaagcaggggaattcccaacagagcaaacctcctgggctgagtcatcacaggcgagaggagcctggcctcggcaggatgtgggtgtaggtcatgccctggaagagccccaggtagggcctctgtcctttgtgtgtcactgggcaggttctggggtggagaatgtgtcaccgtcacctgaccctggagtccagcttgtcatgaattcaggcacggtcagcctcagtgagagcagagaatgggctggcaggacagtgctcctagcctctcggtgagtcaatggatggctgctctgtctgagttagtaagaagcccaggtcagccccagggaggcagtgattgggctgggcctggctgaatgcagggggcaggtaggcaccttaatagaggagggagctaacaaaatcgattccgccccacgcccgccaacatgtcaccagtccaccccacacccgccactgtgccatgagtctaccccacgcccaccccatgccacgagtccaccccacgcccaccactgtgccgtgagacacatgtgactcattgagcacttgttataacaggcacattgcaccaagcatctcatttaattccccagtccacttggtgaaggagatgtaattggcttcctttgcaaatgagagaactgaggctcaaagaggcttgcttcctctagtctgcttgatgaactcctattcatcctgcaaagcctacttccttgactaagtgaattgaccttttccagggtccctctgtaactgaggaagctgtgctctccctgctgtgtcatcaggtagttctgggccttcaccctcattagactgtgatcttagggagagcaggacccagccctgattcacaacctggcatatcataagtgcagagtaagtgtgggtggcttgatttgaattgtttgaagctgtgcacacaacagcctcagccagttcctgcttcatgttttcctcctttgtcttctcagaaatgtatcttaaatgaaatgcagaggtttaaagattaggaagacccagcctcctggactcactctggctggtccattcatggaaaccttgggctctgcacttcatgggttcatggaccccacttctccatggaacaggaagctaggtctgtccctttggggtcccttaggggaccaaagcttggcaaatgatcctcatttgatcctcatcaaattctgtgccttacgttgaggtgagacagaagcaaattgggaaatggtttttaacagaattctgttttctttgggatactgatctttcatttctaagatccagaagactcagtggactccattttggtcacaatataataatgatcaattgcattgctagagctttttattggtttcaaaggtatttatttgtttaaaaacatttattaggtagctacaatgatccaggctctaagctgggcactggagataaataaataaataaataaataaataaataaataaacagtatcagctcagctctctgtcccctaggaggtcaca

SEQ ID NO: 61118 - DNA, 968 bp, Homo sapiens
caaacgaggacctgtctttctgggttgagctaactcctctgctagttaaaagctttcctgtgtctttaaaagggggaggcatcctatcaaatggaccctaacgcataggctgaaggcacgtgaagtcccacccactttctatgacgtcccgcgtcccggcttctgattgcccgcctgagacgtcaatcgcagggcgtgtgtcttgctgggacacagtggaggtctaacctttggtttgcggagcggtcgggtgtattctccgccgcccccacgccctcgaggtccccgccaccgaaccagcggcggagcccgcccgcgcctcccgcggcattcccgcaccggatcgctcctcgctggggcgggacctggcctggcggctctggtcactatggtcagtgatcgtgggggatcgcgaagggggagcgggcagggggcgcggtgggcggggtcgctgccggagcgggtgcacccgcgggacgggggtcggacgcgaggctcagcccccagctcgcccccgccgctttccgaccccctgaaatacggagtccggacggatactgagggccaagtcgcgcccccctgtaccccgtggatgtgcagctgaggaggtccagctcggccccgagcccccgcccccagcgtgtccgccccaggtggcccggggcgccgcctcgacggcgctgggtgggcgccctcgacggaagcagggacagggaggctgcagcactacgggtcgcctcctctttgttaagtagccccccagtcagcagtccacggccccacccacccgacggctcggccgtcaaagacctcctggcccctgccccaaccccaagggaggatctaggggttgcacggggcaccaggtcgtctgctccgtgggcgactagaccgtctccatctttggagtcaggacccacctagagaggatgcctcaagttgtgaggcgcatgagttaggggtcgggg

SEQ ID NO: 61119 - DNA, 562 bp, Homo sapiens
aaaaattagctagctgtggtggcatgtgcctgtaatcccagctactcaagaggctgaggcaggagaatcgcttcaacccgggaggcggaggtttcagtgagctgagattgcgccactgcactccagcctgggcaacaagagtgaaactccgtctcaaaaaaaaagtcatgaaaacagaggcaggacatggtaatggtgtatagagagctttgtgtgcctcgttcccagcagcagctaagtggttgtgcaaagttcaactcagcgcactggccctcgctgtgcatgtctgtcacatgacagggctgtctcatggttcctcctcctctaaggtgccttctagctctggcatcctgaaatcctctttattaccctaaaccctcttcctctgaaaagattgccctgaaattcttctgttgaagagcatatttagtaacatcaaaagtaatctcttgtccacttgctatatttttctaaatgccataggcattttttacagtaaagaccattgaaacccagtatatttatgctggttctcctttctttcagattactctctttatct

SEQ ID NO: 61120 - DNA, 918 bp, Homo sapiens
aaatttttttatttatttaaaaataattgaggacatgacgtgtcttgaagattaatttaaaaagttattcattcagcaaacattacttgagggcttatgatgtttggggttcattgttaggtgctaaagatatgaagaaaaatgaaagaagaataatgaagataaaactaaccctggggacctttagctgcacttgtctgccaaaatctgagtcacaggattcagaagccatagccatggaattcgtattgcagccattttccttgtactccaataggtggattaatttattgggcagacatttcagtgcccactctgtgctttcttttcctctcctctatatttacagaccccaaccctgtcatgtgtctagattctagttctgtgttgatgaccgaatttatatctccggcctggacctcaccctagactccagatccacctgtcgtcttgacatctcaacttggatgtctaatagatatttctgatccaagtgtttaagactgaacttctgcacttaccccagacctgttcctccccctttcagtaaatggcaaatccgtctttccagttgctaaggccaaaaactttgtgatcacctttgacacctctctcacccacatccaatcgattagcagatcctgcacttcctaatagatccagaatccagccacttctcaccacttccactaccaccaccgcagtccaggtagcagcatctctacctggattgctagtaactttctaaccactctcccttgcttccatccttaccccctagtgtcttttctcaacacaggagcttatgtgatcctttaaaaacagaagtcaaaatcaggttgctcctctactcagaaccatccagtggcttcctgcctctctcaggaaagcccaagtcttttctggggactgggcccc

SEQ ID NO: 61121 - DNA, 6490 bp, Homo sapiens
ggaaacttatagctcactggaggagacattaaatcacggtgcattcaatgaaattgtgctgagcgtttgccagtacagaaaggtagagtttgtatagggtgtgggcaagagttgtacctggttttcatgtttctgagccatgtctccaccaagtctgtggtcaggtagtcttcaagggcgaggtggtcacccattttctccatgaggaccaccagcatggtggcatttccttggtagggcagtttgaggacatgacaacgaaaattcttgtcaaaggtggaggcaaacttgcctgcaccgtacatcatgggcaccttaatggtcttgtacttgtccaggtggaaagtgtcgacttcggtgaagacagggtcaaatggggtcaaccatttccctgaacaagtaagagaagaactcattgcagaaattccctctttgaaaagcattgttcttgctcaaataatagagagggagccttctatctcacttctctcacttctcgtcttctcgttccaactaggaaaggcgttccctaattgggttggcttttccacagctcaggcaggcaaaataaatttccccaaaattttccccgtcctctagcccagctagcaaaatgcagctccactcgcaggccctattgggaatcgcacacgaaagcagggaaatgtttcctaacaatccctggctcctctcattgtcctggacctgaacggaattcacagtcgttccctcatagttggctccagcttagagaaaagcctttgcctggcacctctgactgccactttgtctcattcacaccaggcacaagcacatgcagagtccaaggtggcaggagtgacacttctcacccacccactgtttagtgtggttctgagagaaggccccacaatgcagaggctactagcaggcaggtacattactctctacataaacgtctgccctgggggtgtggcctggctggttgtaaagtggcttcccctgccggggctttgtaagtctggtgccagctctgcgaaagtggcatccaacccacgtccagtgccccattagggaggcagggctggacagaacctaggatcagggggtcaggaggcccttgtttgggttttgcctctgccacttactgtgtgaccttgatcaagctaacgtctctgagctggtttcatctttagaaaggagacaactcctgctctacctgctgattggcagtttggaagaacaagtaaacaatagatactcagtgtctgctatgtgccaagcccatctgggcactttacattcattgtctcatttagcctctaacactgtagtaggtggagtgtccctattttctataataggaatctaagggcagagagttggtcaaaaagtaaaaatgaaggagcaatgatgcaatcctaaatcccccagataatcccccagccccctgttttttggaaagaccctatgcttctaagtgtcagaggggagctatgtagagtgctctgaaaataataaggactacaagcacataggataccagggaagggcctcaaatgacagcgtctggcactgttcaatatgtgtatcaatctgtttttgaaacgtgaaaacacattcatagaaaatcacgtagcgttaatcatatgctggcctaacgaaaggaaagggagagacaatcgtagggccctgtggccttgggagagcagaacattatcaaagtacctttgaacaagatgtaatccacaagaattaatttggtttcaggattaatctcatcaaacagtttgggaattttcccccgagtctctttgttaatgtaatgattcatgagccttttggcctgtgaggcattgcgaaaattcataggcacgcactctgtatcaaaatacctcttggataaattgaagaaagtctctttgacatcaaaatccttgtggatgaaggcaaaactcccctgtgtgaggcccagttccaggttgcgggagagggtctctctgagtcccttaaagagggaaggcaggagcccgggcttggtgggcttcagggcctgcaagtggagccctctcttgatctgggtttcagtcggccctgtggcccccagcatcaagcctgtcatggccaaggacatgccaaatggagagaagaccatgttgccatcgtgcctcatggagatctttcgcagcaggctgaatccgaagtttgaagtctccttggcaagctgctgcctgctggccatcagccaggctttctcttcctcactggccttctcctcgctggcctcctgctcatcttcctcttcctccttgggagcctgcactaccctgctggtctggttctgaggggctggggtctctggcgactgaggactgggggccaagccgggtaccagccacacctgtgccaggaggacggagagcaggagacttggcaccaccttcatgtgatcggctgcggaggccaaggagtgcctcccttcagctgcaagacttcctgtggagaggagaggatagagatggttttaatgcctcctaaaatgtctttgtggatagtaaaagcttcttcagggaccctgcctccttcctgtggctcaagtaggttagccctgccccagggagacctagagcaagtgtgggtgacatttgctcacccaaagaggggacattatttcacagagcaaaacctcctccagttcccattccctgccaggccggcaggcagctctcagtcctgaccccgttttcattcatcccgtctcctccctgagggccagggcaagagagtccactctgggagcaggaggcagcacagaaggtgggggtccaagcaggtggaatcaggggtcctcacacacctttccttgatctgcttcattcactgccctgaccatctggtcgtcaggctgcccatccagatgggtggccggccttgcccagtgccctgtttggctggggattggagtgcctgcatgcccgttaggcaaggaagggggaaagtattggagctttcctggattttttatcaaaattctctttgcactgcacctctgctacacagttccttggaggtcttccttccttccttccttcctatagctgcagctcccgggtagcaggaggccccgcaattcatacaacccacttctgggctccctccactgtggcttcatagagccctcagccacctgggctgcatgccggttctcactgtcctaggctgcagtgtgggagctacacttcttcaccgttagctgtccccttctctgtcgccttttaggctccctccacatccttggacacagagcctggctcctgaatacttccatgttttccatccaaatacatggcttgggactggcctgggccacctggctgtgtccaaactcagttctggtgttcagccacactgcaggcctgatcccagaggctggctgggcagaacccctgggacacctgccctccctcatcctctctctgggcccactgccctgggagggtctgggtggggtaggccacccagcccagtgagcgcagggtggatgctgccggcctcacagtagttcccatcagcagagacccttattcttgaccaaggtcacctgcggcaaaatgtattgacaggcggtgctgccaggcctcttcctgatgcaggggctgagtccttatctatgcctgggacaaaaccgcctccagcgccagggcccagcatgttgccccttgctcgggctgaatggcaccccggaattcagggcctcactctgcagtctgaacggcactaccctctcccctgtagaagcagtgaaatacttccactgtgtttcccaaaggacactgttgaggaagctctttttgactctaaatggcaagcctgcattcaacaggtcacccaagtattgtaaacgttgggtaaatagctctttcagtgtaaacgcagcccagtttcacgcttttattgttatggactgaatgtgtcccctgagaattaataagttgaagcccgaaccaccattgtgatggcaatagagttggggcgcttgggaggtgattaggtttagatgaggtcgtgagggcaaggcccctgtgatagcactagtgctgtcataagaagagagcagagtccccctccgcacctcctctccatgggaggacacggtgcgaaggtggccatctgcaagccaagaagacagccctaccagaatccggccacgctggcaccctgactcggactttcagcctccaaaactgtgaaaaatcaatggctgttggagccacccagcctgtggtgttttgttagaggagcctgagctaaaacgattacgtggcatcatttagtgctactttctacattaagaccacacagaatactcctgaattcaaggttacttctccctgtacaatggtcaggaaattagcccagcacgccaactagatgtcaccacctccaaatgctgagtcttaccttcctgttcttggagcttgtcctgcagtctgcagtggtagcccagtaattcctgggtgctcctggacatatatcgcctaaggtctttgtaaagtctttgctcatctacccaaccctttggagtctaggccaggagctcagggggtgctcctggactaggacaccatccagcatggtgaggacgcaccttcctagacagaacctgggcagtaaggaatcaccagctcacctgccacttctcagccctgggacagcacacatccctgcctcccctcagccctgggaaggggagacctgcttactccggcagtgagtggtggtgggtgaaatatcaagcctttcaagcctctttcccttggcctccttcctgcagaggagccccttgtgtctataattcgcctcttaccccactccagctcccaatctgtatgtacagtccctgtggagtgtaggatggaggtctttgcactgctcagccacacagccctcacgttggagcccgcccagggatgataccatccttcccggtccctccctgattagactcattgaaggtctcctgtaacccactgcctcttaccagtgtgtggccttgggtcctggaaaagtccttcatttagagcagaaaccaaagcttcagctttgcagcccagaaccttcagcaaatatttgctattccaaagtatgatcccctgtgggacggttactgattaacatcctgcttgtgatggtggagtttctggaaaaccaaagaccaagtgggaggcttcccatactccccagctcctcctataacccggaatatgacccaaatcccatcacgagagcttctgccttgcaactcaaggcttcgccccagtaagattcagctctgtctgggtggggtgtggggaatttgtcttgagctgttctaggtgctgaacacctcgagaaagaaggcactgggggatcccatggatgcttcctgagtccccagcctggtactggacactatgaggatgtgggttggggggcacagcagaaatgttcaggacctgttctctcagcccccaaggaactggtcaatccagtgggggaggcagacaggtaaatcactacttagagtacatagctcctttcaaggtaaatttcctgcttcacaatgttgctggacttgagactgaatcctcgggcactcagagttgaggctggtggagaccgtttatggcaaaacttttcagacttctcagactctcttttttaatatatataagtaaatattttgttatgtgccccttactactaccattgaagtgaaacgtatagctaatataatctacccacaaaattaaaaaaaagataatgctgtaatgataatatggaggcataataaaagagaataatgtgtccctgaatatggcagtgctgtggcctaagggcctgggcaggtgcagtgaggctgtccaatgtggagcccacgggaggtcgcttgtgtgctgctcactgctggccggtgaacaagaaaaccaatggtactaccagggatagagcttttgaaatggtaaataatgcttggtaaagtttcaaacaaaataaaatatagatctttccctgatttacacggtcattgtcttcacagaaaatgcagtgtgtagtaaaaccttggataaatattatatttttatatgaaataaagcagccccaggactgacagtctaggctcagataatcccacgtgaacttgaggtggacatgtgagtcctggggaacccggcggcctcttcatcatgggagactgccctgcgtgttctggtatgtctggcattgctaaccctcaatccttaaatgctagtagtactccccccaaacgtttgtgaaaggcagaagtgtcccaacaagtttccagagtgttccttttgggcagtacctgctctgttaataggcagttctttaagaggtgaaagtgagggtgtagaggggccaggctggactcacaccacgcacaggagtcagcctttgcctgcccatccaggtcgagctctgcagctgcgggcttgtggattcccaaaaa

SEQ ID NO: 61122 - DNA, 2012 bp, Homo sapiens
agacggggtttcaccatattggccaggctggtctcaaactcctgacctcgtggtcctcctgccttggcctcccaaagtactggaattacaggtgtgagccaccgtgcctggccagggcacagggtttcagaaatggatccttataaaggaaggcagcggagtatattgggaagattgtgaaggcttcagccaggccattgcctcctgccctggtgtgaatctgaggtcctctgctcccggttcctagctgctgggatgtaagttaacctcaccgagccagcctttcttcctctgttaagtggccagaactcagactctgtcctatgaatatctctgcagcaccgaggaaccaggaagggggtggacgattttgctcctaaggctgtgagccctggaccccagggtgtggctcagaagtccccctccttcagggaggacattattcctgtacagctcccaacaagggagctgcccactctttgacctttagccctccagttagatgggaaagtgagaaaactcaatgcatagcactgtagcctgagctcttttaccagcagcatgaccctgaacaagctacctaacctctcttagcctcagtttactaatctgtaaaatggggtgccccaggctgagctgttaggacttctgagaggatgaactgaggtggtgcctgtggagttgagtatctcgcccggtaggaaggaagtgctaaaggaatggcatttgttgcataattttagagccagattgaacctcagaagtaagtaaccctgtccccaggctttgattttataaaggaagatattcaggccccaccatgaaggcctttcctgctagagttaaagcagaatagaccaggctgtctgacttccagttgttatgaactttagcttctcacactccttggccaaaaacgattgggaaagctctgacgggaaggcctctggtgatccagataaactcataggcgatgcagaacccttcctggaactcccctcaggcaggaggcacaacttctgaaagccactcttcagggcgacatcgaggggcttctaaagcaaatttgtccagagacctacagggttaaacgtctgaaaaacaagcgttagggcagtcctatgagaccaaaagcagactccaggaaacagtgagagaactgcaagagtttactttgtgtggatcagatgaagggggtgtttgggtaggtgggtagtaaaggaaaccagactatgttaccccttgatatggtctgtctgtgtccccacccaaatcttatcttgaattgtagctcccataattcccacgtgttgttggggggtacccagtgggagatcattgaatcatagaggtggtttcccccatactgttcttgtggtagtgagtaagtctcacgagatctgatggttttataaggggatttttaaggggaaattcctttcgcttggctctcattctccctcttgcctgctgccatgtaagacctgccttgattgtgaggcctctccaaccatgtggaacggtgagtccattaaacctctttttctttataaattacccagtcttgggtatgtctttattagcagtgtgaaaataaactaacatacctctaaatatgcctttctgatataaaaattatttttgaactgaaggtaattaagaaacagcaaatggagaaatagttttctctatctttccccctttcttcctaaagacagataaaaattcatctttactggaaatgactctagactcttatcaacccagagatggcatcagaggaatatgcaaacaagccttattcctttagtttcctcccatatatttaccttccatgatttcctgcccttggaagcataaaaccacttcccttgtcccgatccatgattttcctgctaatttattgctctttactaaaggtaagtggagttctaaggcaccattttgagttacttttcatgcaggtttctcctgtgtgaagtgcatggcccatgttgtaagctgatttttct

SEQ ID NO: 61123 - DNA, 839 bp, Homo sapiens
gacatttaccacttttcctgtttctttttgccaggggccactcacagctctgccatgacaacttggttttcacagttcccctctgtgtggtctggtgggatgggtaggtgcctggcctgtggccctcctgtgtcgacagcttcctgtgtgatcttggggatgtcatgttttcttgctgagcctccatttacctcatggtgagacaaggggctttgactcaacctggggttctcagccagggacctagaggctcattcatgaacgaactcagtgccacttcctagtattatatttatattgtgaattttggagggggaagaaaaggtgggttcccatgacatttacctttgatgacttcagctgggcgtcctgggtgatgcgtgagaaatttgcctggttggtgaacaagtctgcaatgcccatttcctccagcacatctccgaggtcatagactccagagatggtgacctttggaatgtacaggtccacctggctgctcggggtaagcagacagagttagacattccagggctgggcctggcagaggggagagcagcacctcttctcctggccagactcttatttcctcatgcgctccctccagctcctgccctccagcctgacttgctctttgtgggtaggagaagggacagagcaggaggcaggatctgtctctgcctccatgacacaggcagctttcccacggggcctctgaattgcacattcttttcttctctgcaattccttcgagctgattccacctgggatgcagctggaccatggagcatttaagacaatagtccataatgaagcctttttagtcccaggagaacccctgc

SEQ ID NO: 61124 - DNA, 3024 bp, Homo sapiens
tgtacaatgaggcatttcatctccatcaatgtctggtcctgcattcaggtgttccaagtttctctgattttgtaacctaaagctgtgatctcctatccacttagccccactgtggtcctgaggacactgtgaaacctcgtacagaatgacaccaggccagcacccgttccaccaacacccattccaccacatgtgctcaggcatctctcaggctcaggagggccctccctgcacctgggtttactgtgccttttccccaggttgtgttgcctgaacctctgtgcaaccactgctgagcttgttccatgcaccaagcattaaacaagggcactggaatctcccaaagagacaaagataccctgcacaagagtgcacagtctcgtgggggagatggtctatggaatttgtgggagcacacagaagagtttctgggcaaatgttcccagcctccctggccctcccatagtcaggtgttaggaaggctgcctttgcctggtcagcctctcagcctcaccatcctgcgaagagggcggcctctcctgggagttcccagccttgtgctggagagcaggaaagacccagaggcaggtagagaagaaggactcgtagagatgctaaggcagtccaggcagtaaggaggtgcgggatgggaggggaggtgggcacagtctgatgggaggtcctgagagagagctggggaggaggggaagggggcatgaggggtcctggctggggatcacatctcctctgatctgatgatcttgtcgagagacacatgttcagtagagatactggcttagtttgcttattttggctgttttacctgcattcctttgaatatgattgcttaactgaaactcaaccacctgggtgctaaacaacatgttatggcaagatgattgcccaaacaaggcatgggcaaactgttgagcatgcatatgagggcaaagtctttcctgggtgactctggggaggcttcacagaggaggtgacttttgagctaagatttgaagtgagggaagatgttttaggcagtcagataagttgcaagagggctcatgagacagaagaggcctgggctttgtggcaggcagaataacagccctccaaaatgtccacattctaatccccagaacttgagaatatgttagctttcatgtccagggggaattaaagttgtagagggaatcataattgctaatcggctggccttgagatgggcagcctattctggatcacccaggtgggccattatccagtgtaatcctgagggttcttgtaagtcaaagaggaaggcaggaaagtcagaatcagagagatgtgatgagggaagcagaggtgggaatttgcaattactggctttgaaaataagagaggcccacaggccatgtggcttctagaagctggaaaaagcctggaagtgcattcccccctagagcttccaggtttttatgaacaggaagattgaaaaactgaagcaggacctggtcagagcagtgtgtgcaggatggctttgggggcatctgggagttcccaaggggctgggtggggttctgtctagttctaggccatttttccagtccctggcccagtgcttgacagtcagcatttgtggagcatgaagcagccagactgttcatggttacaggtgtgggcctcaaaccaacctgccagaatgtaggcacattgttcaacccttctgggtgtcattttgatcttttgtaaaataatataattccacctacccagcaggattgtggtgaagatggagattcccagatgtgtatgtgctttacagaatcaaagactttgcccaagagtgtgccctggattttagcggctgttattcctggccatagtggatgggccttcagatggggatgggtgggaatacctttgaagaagatatagttgaccaggacgaggatggctgggctatccagccctgaaaacaagtcgacaattttcccctgtgtcttattcttgacatagctgttgatctgtctgctggctgttgcccagtcctggaaattcatagccaagacctctgactcatagtagtgcttgatgtctgctgagaatgactccagcaactccaggctgccatcaagaaacaaggcattgcccatggtcatttctaagctggtgtctgactttgcaaagagttggtgcaggtgctggaaaccctggtggatctcagtctcagacctctcagtgaggttgaaacccaggccctggagaagctgggcccgtgtgtggccacaggtgcccagggacagcatagctaaggccatggagatgctcacaggggagatgaaaatgttctttttgggactcaaggccactaggtgcttatacaggctgaaggcaaagtcaacgttggctgaagccaggccccggtgatggttactcatgttcacataagcagcgttaggatccatggcctggacggtccagaggccgctggtgggcagccagagaagacaggtgtacaggaggagtggcattgtccagtatagccaggccctgccaaatcagaaaagcttgttagatgctgtggcagtctctgagtcaatggggcgtagtgcaagaggaggcaggcaaaagaccccattcaagccccagttccttcctccacactggctgtgtgacctggagcacatcacagagggcgctggacttcagtttcctcatctggagatatgaataacagccgttatgatttatccagtgcctgacaggtacccaacactgatctaggtagtctggctatattcagtcatctaaccattaccaaaacactcctaaagcaagtattattaacatgattttaggcaggcagaaataggtgctcagaaaggttaaaacccacccaaaggatatgttcaaaatgctggaagaaaagcaaaacacaattaaagcattcccagaaaaacaaaagctgagtaagcttttttccacaatacctaccctgcaagaaatgagaggcattttatttcggattgaaatgaaaggacactggac

SEQ ID NO: 61125 - DNA, 1104 bp, Homo sapiens
actaataggattatatgccatacccaatttggatttatttctgtaatgcaaggatgtttcaacatacaaaaattgatcagtgtaatacatcatattaacaaaataaaagaaaaaatcacatgatcatcttaattggtgcagaaaaaagtatttgacataattcaacacaccctcgcatgataaaaacacacagcagattgagacagtcaagtgtaaagaggtgcctggagaacattcagttggcctgcacactgggagaatggggtggagctgtgggaagtttgtgccctttgcagcggggaggagcttggcctctctctcctgatccgatgtggtaatctggggattcagtcagtcagatgagggcctgttaacaggactctctcttgctttgctgagttgttttccttttcacccaataaattccattttattcacacctcaaagtgtctgtgagcctaatctttcatggccatgtgacaaggaccccgtgtttagctggactaagtagaaagtcctacaacaaaattagtaatagaagaaaactacctcaacataatcaagactacgtatttataaaaccttttatactcaatagtgaaagactgaaagcttttccccgaagatcaggaacaaaacaaggatgcttgttctcactacttttacctaatatagcactggaatttctagccagagcaattgggcaaggaaagaaaaggtatccatatttgaaaagaagaagtaaaattgtctgtgttcacagatgacatgatcttatatgttcaaaaccctaaaaattctatagaactcataaacacatttagcaaagttgcaagatataaaatcaaaacactaacatcaattgcatttcccaccactaacaaagaaaacaatttgaaaaggaaattgagaaaacaattccatttacaatagtatgataaagaataaaatagggattaatcagggaggtaagagacatacactgaaaagtacaaaacagtgctgaaggcaattaaagaggacataaataaatggaaagacatcctgcattcatggattggaagaaattgctaagatgataatactatccaatgcagtctatag

SEQ ID NO: 61126 - DNA, 3851 bp, Homo sapiens
cgttaggtattatattttcccacaatacaaatttaaggaaaaaattaaatataaatgatttaaaaagagttccataagagcaattaaaaaaaatccacccaaggttggaatcagtcggtggacactgcctgcctgcaaggttagtggtttcaggccctgtgctgtgtggagctacctgtatcacaataaatacaggatgcttacaggagaagcaggtcttactgcaccacccactgttgaaccagccattctgggtgaggggctgggaaccctcatttaaaccagtgctccaggaggttgtgttgtgttaaattaaattaaagatgggctaaagctgcctcctcatgtagcaaactgtaacctagcttaatatgtaaacaaactgcacctaacttgagagtatatgtttgtaacaagtaaccaagtctcagccaatcatagcagctgaactttcagtcaatcacagcctgccaactgctcagacatgttcaaacaaggcaaacacagagctgtaacctatcagcctatgtgtgtatgtcacttccttcttctgcctgtaaatactgcctacgttgctgggtggcactctctgaacctttactggtttagggtgctgtgtgattcatgaattgtttctttgctcaaataaactctgctacgtttaatttgtctaaagttttcttttaacaggtgcgctccgagcgtgggaaccactgttctgctctggaattccctagaggccccttccctggtgtgttccaaaagcagaatctcaagaatgacaggtgggaactcccccgcaaaacccttagttctcctgagtctcccaaaaccctccttgcgtgtctcccttatctcaccagggtggaaaacaacccctgttggctgctctagcccctagttctctgctttagataatagaggcaggtgtgacctgctccccactccccgcacccaaatgatgggctttattgaattctccatcgggtttctgacttggatttctgggtcctcgcgacaattcttttgtcgcgaaacccagaaaagatcctgggtttcgtggcagatcaagctggattggggccctagcactgccatgtatgaattaggtgatgtgggacaggctacttaaactctgcctcagtttccacagtataaaatagagctgataataacacctctagccttacccatttttctggtgtttgtctattctccagtgcctctgcacagcctcctcatctctctcaggactcagcagtagcccctacctcgtctccctgcctcctgttcaactccctccagcccttttacccatctgcagctgcatctttttaaattctcaaaaattcaagctgatcggttctgctttgaagttttcagggactccccattgcccaccacagggctgattctcactaatgtagcccagggggtctttgtgacccagtccctggtgacagttctgcctccagcctcaaatctggccctttggggtctcagccacagcaacactgggtgccaggggttcttccagcacacatcagccttttctcccactgtggggcagggcagggcatgtcacatcactatagggcaggttacagcaagacaggtcactgcagttccccagggcaggtcattttgatttttccatgtttgctgagcccagctctggactgggagcagggaacaaagatggatctgcctcagtcctgcctatgtggctccagtctgtaggtccctcatctccctgcctcatctggctcactccatcttgtcctttgagactcaggtcccaggtcaccgcctccaggaagccttgtatctgtgcttctctatggccttgccccatgacaggcagtgaaatctttgcttagctttggtcactgccatacctatctgggatctcctctcaggcacaggccctgtgcggtatgatgccaatggtaggatgggctcccctgccagctctggggagattgcatgtctcaccttctcctgcgttaattctctaagatgagggtgaaaactccatccaccccacaatattgttgtgaataccagacgtggctgttatcagtgcttggcttatgtgacctcacttaatgggtcatcctggggcccattttacagatgagaaaactgagatccagggagacagagtaactccccctgagctggaattctaagcctagatgtctgacatcggagcttgtgccatgccattctgcctatctctacagagagcaaaatgatgagtaaagcagctcttaagagtacccagccatggtcaggtgtggtggctcatgcctgtaatcccagcacttttggaagctgaggtgggcagatcatctgaggtcaggagttcgagactagccttgctaacatggcgaaacccatttctactaaaaatacaaaaacattagctgggtgtgatggtgtgtgcctgtaattccagctactcgggaggctgaggctggagaatagcttgaacccaggaggcagaggttgcagtgagccgagatcgcaccattgcactccagcttgggcaacaagagtgaaattccatcttaaaaaacaaacaaacaaacaaacaaaaaagtacccagccatataaaaatgcagagtatcaatattattcatgcatttcatgtcaagtatgccctctttgttcctcatctctgaagagactcacttagtaaatattcactgtgttctctgttttcacaaatgccctatgagccaggcacagttcttgaccttctgtagtgaaacctcatgacatgtggtacagtgcagacagttctgttctctgtgcattatctctgccccaggtcactgagtgaggagccatggtggagacaggtctgcgtgactcagaagaatacccctgcactgggccagctgagccctcccaggccctgacccgcggccagcatccttcatcggtggtgccgactggagcagatgcattgtagcttgcaggctgcgactctgtggctgttgtggctgttgtggctatctggctgggcttaggagcatcaatcatggcagtggacgagaatggttcttagctacagccctctgtgtcagccccctgcatggcaggaacccaggggacatcggaacccctgtggatgactcacagactccggggtctggaaaatcctaaccagattgcctcataacactgctggctgccctaatgttcaatgtgccctttaaaaaaacaaagcatctcaacaaaccaaacaagcgagctgcagccatggctttgctctggaggctgggcagggggagggacagagggttctcaggtgttactcacagtctgcggtgggctcaggctgtttctgctggcttggtcctgctgtcctggaccctagcatgtgtacagtaagcctgcggtggatgctgcctgttaaattttgtttgccagcttcctgggtggttaatggttagaggggccagtggccttcaccgcttggtagtcctctcccccgagtcattaaccaatgggaggctttgtcaggatagctgagtaaacacagaaatgctgcaaattaactttgctctgcgttcaattctatgaagtctttttttaataccaaaatgtggctggagttgcatcaatgtggttgccctgtgtcagttggcagagatgtcttaggtgcccttaattagcaccaaggtgcagatacttgtaaaaagaaaaataggtgtttagctccaattggggatgacttgggcaaggtcctgccttccagtggtcttagtctggtgggagagacagacatggaataatatctgccaagcgcttcctctggattatctcacgaaatcttcac

SEQ ID NO: 61127 - DNA, 1377 bp, Homo sapiens
ccaggaggctgggttgttctcttaaaggcagggctgcacctgccccagacatccttgcctggttcccaggtcaaatgctgctgcatctgggtctcatttgagaatgacttgctggtctctcaggggtcacccccagtactggagggagcatcttgctgaagccctccatgaagggccacccctctgcaatcgcaccatctgtaaatggtcacccctctgaaatcacaccatccatgaacggccatgcctctgaactcaaaccatccaggaatggctgctcctctgaaatcacaccatctgtgaatggccacccctctgaaatcacacaacccgtgaatggccacccctctgaaatcacactgaccatgaatggctacctctccaaaattacagctgtgctgctctgggttcaacttgcccaattctgctgagcacagaagctgagccaggagggttgctcagggcatcttgcccaattctgctgagcacagaagctgagccaggagggttgctcaggacatctgaacttcccaagccctctctaggatcgtgtctgtaggagggaagggcccaggccttgcttggcaagggacaggccatgtgaagccagagactacggtgaccacaacctctagaatgagtcttggctggactttccaagccccacctggctgtttatctgaggaatcatgagctgtattggcaaacagggatgccacccagtactagtggccagtgtgggggtggcagggtaggctgtgggtgctccaagggcctctgagttctctcccaaatcatggacttctgagctggacctggctgtcgctggacctggagcctggcttttggttgtggtggcccaagggaactgcctggatccctctcctgccaatctgcacttcaggggccacctgtactatccacagcctttgagccattcgtggaccaagcaggaccccaaacccctcttggcctcatcctctcagacaggcaggaacatagcctagatgtgccattcatttggccttagttcctttgggctacatgttcactgatgagttgcctacattgtctggatccccattctgctcctcttctcctccccacctgccagcccctgccctactctggtctccccgcagcatgtaagcactgagcccagtgcccggagtctggtgcagggagtagctggcattttattgaaccctcactgggtgccagctcttggagtgtggtgtagactgatctactcgatcctcaaaggaaccctgtgggttacgattgggatcacccagggtagtttagctagcgagaacatgggctctgggttaaaatccagacatctaagcataggctctggttcaaatccaggtgtct

SEQ ID NO: 61128 - DNA, 618 bp, Homo sapiens
attgtaattaataaaccaatattgatacattatcattatctaaagtctatactttattaatatttcaatgtgaatctttcttaccaaatgtccttttttattctgggatcacatccaggataccacggaacacgtagtcatcatgtttccttaggcttctcttggctgtgacagtttctttccgtggttttgatgacctcgccagttttgaggcctactggtcaaatattttgtaaactgccctctagtgaaacttgtctgatgtttttcatgactatattggggttatgggtttttcagaggaagaccacagatataaagtgccattttgatcacatcacatcaagagtacatactatcaacatgacttatcactgtcgatgttgaccttgatcacctgtttgtcgtgtttatccaatttcttcaccataaagttactcttttatacactgcccttcttggaaggagtcactatgtgtagcccacacttaaggtgaaaggaattaagctctacctccttgaggctatttacatagtgtatttgaaattattctgcattgcagatttatctcttctttccaatttattaatttattcaataatttatttataatagta

SEQ ID NO: 61129 - DNA, 3271 bp, Homo sapiens
tagatagcattattgggtcagtatattcccatattttctgtctctcctttcacctctacatttagggagttagtttaggccactgtcgcaatagttgaggagaaacttaatagtagcttggacaagagggtagcagtggacatggtgagaagtagttggattttagatatattttagaggtagggctgatggtatttgctgacagtgtttgctgacagatgcaatgtgtggtgtaagaaaaaaatgacaggtcaaggatgactccaaaggtatgaacccaagcaattggaaggatgacattactgttacctattaactaaaatgagaagactgaaagtggagccagtttggctgtagggatcaggagctcagttgtaaatatgttatgtttgagatggctatcagatggccagtatgcagttggatgtatgagtctggagttcagaggtgacatttgtgctagagatacaaatttaggagcatcaggttttagatggcttttaagatccatgagaccagatgagatcacctagggactgagtgtagatggaaaagaaaaatggctcaaggactgagtcctgggacattcaaaagttaaagagttggggaggtgaggcagagccaggataggacgctgagaagcagcagccagctgggcacaggagagcacaagatgaccaggagagtgtgtgtgtcctggaagccaagcgatgagaatatttctagagccacagtgataaattctgtccactgatgctaaacaatcaggaaaaatgcagactaacaactgttggaggaattagcaattgatcatgggtgactagccaagagtagttgggtgcaatggtggtgggattggtggggatggagaaggagcttgagtggagcatctttgagagaaggaaaggagatgattttgtgggatgaccacctcgtcctggtttgtctgggaactttcctggttttagcatgaaagtttgcatcctatgacttctggtttgaaaactgaaagatcccatgtcctggaaccctttcatttccaggcaaactggagtggctagtcacctcaatttgaagacaggggaataaatatgtttttcaagaaatggtgtgttaactggaggagcaaatgatatctatctatcatctacctacctacctactatctatctatctatttgaatatggaggcaaaaacgcgtgtttgcatcctgatagaaaaagcccagtagatagggaagatttatgagttaggagtaagagggaagggtagctggtgcaatgtcttcattattgtattttatttgagtgagataaaatacaatggcagcatcagtggatgggtggccctagcgaggagcatggccagtcatccattgtggcaggagggatggcagaggcatggctagagcggcaggtgagtgggcagatgattgcctaaattttgccagtgaaaaaggaagtgatgtcatcagctcagagtaatttggggatgagggtgtgggaggtgagggtatgagaatgaaggcataaagtatttatttagggcagtgggaatatggaatggttcagggagtagagaatgcttgctctccaggatccaagctctcttgaggttagtgatcatggatttaaaacggggctagcctgcatagtgtggttttctctggctacattcaacagctcgagtgttggcacggaacaggaagagagttggaggacttgtcaagcagccctgataaagcaagaggaggacaaaggagcagaggctgtgactgattatgacattgaagctgggcaagaaggaagtgaggacccaagagaagagagagaaatgaaaaccagtagaatcaatggatttgcatcccagtgggactagaggattgttggagttgggtgccaaaaggaatgagctagaaagaaaggaggtggtggttggtctgagagtagaatacttgagatggtgggggttaactgttgtaacaacagtgtctatggaatgactgtaagagcagtcaaagtcctgtcaacttgcagctgttttctggcaccagctcaaagtgaggctacacccttctccctcttgcacatgagtcagactctgtcactactgggctgcttgcccactcagcttaaaaccgtctggcacacctcccagcaagaacatggattctatttgaagaacaggaaaatatgtcacactgatgaacatttgcccacacacccagggtggctgcatgatggcagcatgttgtatacacctgtgtgatgagttcttgtagggtggacacatcacctccatctctatgtcctttcagccctagaactgtgcctggcacacagttgctactcaatggatgcttactcaaatgacttatataggattgactgctaaatggagactgttatgaagatgtcagtctctgctctgcagtctcctctgatgcaggcgattccctcatggagagaattttacaggtggagttcagggagcctttgttcttgcttccctgaatcctttgcaggaacacagctgaggcatgtaaatggccttcaaatgcagcataataccaagtggctctcttttcaaagagactcagagacaatccctgcatgctttccttctcagacacttgtggaggagacctaaaaccccattcgacccatcggataccagcgggcagcaatgacaggatggtcctgccccctccatgtcacaaacatgttcccaggacactctccacagagtccccaagtcctgccagggggacagccagtccatcatcaccagaacacccacccctgccacacacacacagttcatttgctgctttatgaagccgatctttcaaaggagaacagttctgctacaatccaggtggcaagggtctgagaaaactggaagccagggaaaagtccagaagccagcagaggataggaagctggtgaaagtccatgagagtgacttaggtctaagatcctcattgcatgaaggcagtgaatgagtttggctggtgatctgtgtaaccgtggaccttggtttgcggatctgtgaaatgggaaaatcactcacaggtgctttgtgcagaccagaggatggagccataagttgcgagctgtgttgatgagctccagccatggttttcctttttcttcaggaggcccgagcattgcccagcactgggagggttaggggtgggggcaaggaggcatgagcttttgtcacctaatggtgactttgctttgggattcattactttccccaagaagg

SEQ ID NO: 61130 - DNA, 897 bp, Homo sapiens
catgttcaatgtatacacgcattgaaacagcacgttggacaccttaaacatacacagcttttatttgtgaattctacttcgagaaagctggaaacagataaaaatgaaaagcacaaattagaaaacaaagacaaaccatctgtgggcacaatttctgtatggcagcctgattgtgacttgtgtccacagcctgggggatgactcaccattgagaatttatcttcccagctttagtttcccaactgccttggccataagaaagcgtgccttcttccctcttcccaccatgactcacctagtagcttcctggtggcaggatgctggagcctcctagcagctccagcgtggataaaccaagcaaagtggggtgtggaggggaaagctggagactgtcagccctctccatgggaagggtgcttgaggagtgtgagaaagtcccatcaggatgagctcaaccctcagatcaaggcagcccattgcatgtccgtcaggccttcagtggggaatgaaaactcaggactgagcaaagtgcacagtccccaccttctagaatcccacagtccacacacagtctagaataggagtgactctgccccccagggaacatctggcgatgactggggacatttttggtcatcactactgtgggggtgtgtgtgctgctggcatccaatagggagaacatccaggggtgccgctaaacatcctacaatgcacgggaaagcccctgcaccacgcaggaccgtccagcccgtgatgtgcctgcagtgcacgggaaagcccctgcaccacgcaggaccgtccagcccgtgatgtgcctgcagtgcacgggaaagcccctgcaccacgcaggaccgtccagcccgtgatgtgcctgcagtgcacgggaaagcccct

SEQ ID NO: 61131 - DNA, 1392 bp, Homo sapiens
aaaaacaaaaaaacaaagaaacaacttcatctcaaaacaaaaacaaaaagtgttcactgaacttacatggaagtcacacatagcatgatgtgtagccagcccaggactggcatgtggtggcacagagtataggataaataagtgaatgaatgattcatgcagcatgagatggttgaatgaatgaataattgatggactgaatctacttcttcataagcctagtttatgtgaacaatgactagcaatcaaaaaagtgtccagacaccaagcacagggaatgcccactaggaagatatatactcttcttagaagcagctttgatggcacaattactgaaatgattcagatgacagttattctgaaacccttgcgctgacaattcatgttgctcttgttagatttctgctcccattcagtcccccaccagattctgggaggaactttcccagcatgtaatgatagaggttaaaggtgtatatgtatgtgactctcagtgggatcaccatccaaggccaagggagaagccttgaagatccagccaacaaaatgagcaaaatcatgtttatcaggtcagtgactcttggagttgctggtgcttccccaggctggagattgagttaatattaacaggcccaaggcgatgtgggcttgtgcaatcataggcccggccacctcccccgcagtggacagtcctgtacattcaccccacctcctgcaccccagttataatgctcaggaaggagagaggtgggctgggactctgaacagcagcatatgttttctctctgaaccaagaatgtcgaactccagggggccgcatcagcatccttttagtggatgccaccgagtcctgggggcgtctgaaggcaccacgtcactgtctctgggcgcaagggcatgttgttgcagagagggcaacagatgtgcatgacaggaaagtaagctccgggatctccttacaactgatcttgtctcccaacagattcccttcgccgccgccagagtgagccaccgaaatgcaaatctgcccttgccactaccccatttaagagcctcttcaccccagcagcattttgcagcgtgtcccatggaacagtagagatgatttgtgaataaataggctccatggtctaataagtttgggaaaccgcatcctctttctcccacgtgcagaaatattttcatatcctaaattgtaatattttaaaggatctgggaagtcctgcagtaaagatttatccagttcttcaaacccatttgaccaagaaaactttactcccctaacgcaaactaaccccagagagaaatgtctcgggggaccgtcttcctttaggacagctccctgccttctctgtccaggacggaacctccctgagctcccactcgcccacc

SEQ ID NO: 61132 - DNA, 617 bp, Homo sapiens
ttctgccagaatgtgtggtggtgctgctgtccctgccctgggcactggatattgggaagggacagtgtccacactggagtgggaagtccccagggacgagatctttacctcctcacccctgggtactgtcctcctcatggagcatggatggtcctgcctgaactcagtggtggcctctgcagtagctgtgacccagggatgtgaggtccaccctccccagccctctggccagtcctgttgggcctcagtcctgacatggctcaaaggtctgggcagcttctgactcagcccctgaactggaaatcaccttatgtcaaaggctctctggatattttcaaggtggctgtaggtcaatttttcttccaactgccacatcttctttggatcgggcaggatgaagaaggcagtggcgttccccacatagtgctgtgccagcacccagctggataactccctgtcccggtggatgtcaaatctacccaggtggtttatcataggcactctgatgatggtcttatcatccacatggaagccctctaccataatgcgctcagccttgaatttatctttccacttgcctggaagaaaaggaaggtgggcatcagccaggtgtggga

SEQ ID NO: 61133 - DNA, 2441 bp, Homo sapiens
ctcgtgtgtgacagacaattcttcaaagtaaaacgatggtgtctaaggtgaccgccctcagcgctgccacctccttccctgccctgggctctccagaaagccaacttgtctttgactctgcccctgttctcctaccaaatgccagttaaataagaggagtcctgtgggtcgcccaaggctgcgggctgtgtcaacatctggtggatgagcttctgctcaccaccttcagctcaatgcctgctccacactgggcacagggtgtttttctcatgaagtgtgctaggcgtgagctgtgggccaccagcaacccttctggtttaaggaggaattacctctgcagaagtttagcgtgaccctcgaaggggagagtgtggtgaggtggtatggttcagaggaacaagtagcccatcaagccagctttgccacttatgagctgtgtgacattgtgggagaccagtagcctctctgagcctcagtttcctcagatttggagtttaagagcacagcagatatactcacacatcgcagtgctgctacagtgagtaaatgagaaacagccaggggaggtacttcatagggatgtctgattcacagaaagctcataagtgcaagaaatgtagttctatttattctctgttctaatgggtataaacattttgttatctaacttgaacatcataccaactcaaaggcaggtcttactagcaatgactggggctcagagaggtttggcgacttcacgaaggtcacacagctgtcagggggaaaagtcagaacttggatccaggtcttcagactctcaggtctggtgtcatcctagggggcttggtgatggccatatctttaatgtatttgtggagagtgaaaggctgtcagtgagtaagcttaagagaacaggagacttgtgtgggaaacagtcggtatccattgattagactgaatcatgtagaattgctaatttcaccattttgaactatcgaaatcactatttggtatgactcaacctcatcctttaagtacacattcatgacagtgagtggttagacagtgattcctagattagtttgggatggggcagtgccttccataggacaaggccattcctggtagagacggagggagcaggctgtccttcagctaggggcccaggggacttcctggctgctgtgtcctttagcagggccttggaggatggaaggactctcctggcccttaccacaggggctattcaggaacagcctcctgccgtggcactggagctgcggtggccctctgaagactgcagggacagcaacaggcacaaagaagtcaggctgcatgtggccccagtcgggactcagaggaggaaagggaggggttgcgggggtcaatgggtgatgtgcttcctctcccatagctgaggagtccttgcaatggccttcctgagccatcagcaggcctatggccatgtgactagggaggagaagggatatagggtaatggtcttctggggcctgctgggcctggtcaagtctgaggaggagatagagaaaacaaagcagagaccctcctcttcatctggggagaagggacctgattctaaacggagatatgtgaggctttctggggcagcgatggaaggacaaggacagaataggtgtccttgttgccccatggagaatgggcttcaggaagaatctgcctcagtcattttccagaagtgcctgagaggtgcagggcccgagtctggttaggtgacagcgggtcaagaggaggacattgtcctctctcttgtgttgctgcagatgccacaaaactgggccacggcacgatcaggcagttctggggcccccaggagggcagccttggggtgggcacagccagccctggcaggatgagcaactctgggtgggggggagtgggggatgagcagggggacatgaagatgcttggtggagcctggggtcatggctggtatctggttcctcccctgtgattccttcttggggactccaagacaggacaaggaagactggagccctccagaaacagatgggcccaggtccgtaagctgaggattcagtcccccctggattcaagcccagcatgtgcctacccagccagatgctccatgaacacagttcagggggcccgaagacagcactgttacctggagcccacatacagcctcagcaggcaaagggagactcagagaaaacatgggagggatttacagtcacatgcaggcagggaccagctcaacccttctttaatgtcatccagggagggggccagggatggaggggaggggttgaggagcgagaggcagttatttttgggtgggattcaccacttttcccatgaagaggggagacttggtattttgttcaatcattaagaagacaaagggtttgttgaacttgacctcgggggggatagacatgggtatggcctctaaaaac

SEQ ID NO: 61134 - DNA, 1976 bp, Homo sapiens
gcacagcattcctcttgttcttctgggacccaccacagtgcaagtgttttcttttctgattatttctgccacttactcctgtgtcctccacccacactaagatgggaactcggctttggtttgttctacttttagctcttctacattgagtcaaagaatgttaacatcgaatgaatcacaaaagcttgaaatgccacctcctctgatattctaggtgtcctggaagcctgtctcatcttgccctgtagtgttgggtcacctggcccccagcctgtaacatccccagggccctacacccagagaaacacggggctggtggcagtgcccagtgacaaccgtttagtggataagagaagagtgaccacaccaggctgagtgctcctctctggttttccatggggagacaatgccaccctgagcagggtctggtgtgagcgggcagcttggctctgggctctctgatccgttaccctctcagcctctttgttctttctcaacccctggagcagagacctcaggaggtgctggcatggaacagagaaattccagcctcgattcctattatgaacccgacaccttttgtattttcatcttggttttacagtgtacaaaacgaactagatcagcagggcatgggcataatcacgaatgcacacacatacactaatgtgtggctcatgtttaagtatcacttactacaggacacccaatctaacagcaccgataaagtgacagagaaacgcaagccttctgcgaacatggcctggctgttccaattccgaaccttgcttttctgggccttgccacacaggctcttcccccgtccccccagggacattctacccttgaactccacactccactgctgcctttgccaggaagcccatctgttcctttttggttctgccagaacgtgtggtggtgctgctgtccctgccctgggcactggatattgggaagggacagtgtccacactggagtgggaagtccccagggacgagacctttacctcctcacccctgggtactgtcctcctcatggagcatggatggcgctgcctgaactcagtggtggcctcattctggaagccaagtttatacagagtagcagtgacccagggatgtggggttcaccctcctcagccctctggccagtcctgatgggcctcagtcccaacatggctaagaggtgtgggcagcttcttggtcaccctcaggttggggaatcaccttctgtcttcattttccaggaacttggtgatgatatcgtgggtgagttcattttccaggtgctgtagtttcccctcatcaggcaggaagaagatggcggtggcattgcccaggtatttcatcagcagcacccagctggacagcttcttacagtgctggatgttaaacatgcctaaacgcttcatcataggcaccttcacggtggtcacctggtccacgtggaagtcctcttcctcggtgtccttgacttcaaagggtctctcccatttgcctggagagaggggaaggtgggcatcaccaggggtgagtgaaggtttggaagagtgtagcagaataaagaaaccatgagtcccctccctgagaagccctgagcccccttgacgacacacatccctcgaggctcagcttcatcatctgtaaaaggtgctgaaactgaccatccaagctgccgaaaaagattgtgtggggataattcaaaactagaggaagatgcagaatttctacatcgtggcgatgtcaggctaagagatgccatcgtggctgtgcatttttattggaatcatatgtttatttgagggtgtcttggatattacaaataaaatgttggagcatcaggcatatttggtaccttctgtctaaggctccctgccccttgttaattggcagctcagttattcatccagggcaaacattctgcttactattcctgagagctttcctcatcctctagattggcaggggaaatgc

SEQ ID NO: 61135 - DNA, 8663 bp, Homo sapiens
tcatctccctggtcctcattttgcctcatacataaagtgatgtttatgtatgagaatttagtgaaataagtctcaacaccaaaccttacatcaaaaggatctgagagggcaactcttttgagggaggggttggcaggtgttgcaaattcaaaggcttcaggtgataggccagtgaggaatacatgtttcatacccggggctgagacaatagggagtggtggggcctgtggctgaaccagcgagagcaggctctgccgagcaatggtcaaagtcaacgtcatccacagcaacacagaacctgccctgccccacagtgatccttctactccagatatgcccaggcttcggaccaccagcctgcagccccctaggtagaacctgccgtcttcacagatgggaaaactgaggtcctagctgaggagaatatgcccggcagccacattgttaactactagtcacaaaaccaaaaccatcatcttaacaaaatacaaagaaaaaggtgtccttgaatttgggaaatgaaaaactggagaaaaaaagctggaaataacaaatattgagattcttcaacccccttggacttttaaaagtttccttccaataaagcaacaaatgaagtgcaaagctggtttctctccaccacctttctcctggccctcgtgcctctaagtaatccaaatggaacagaccacacattacataatacatgtttgtatttttcttcagctagctagtgttgttagaactaaagacggtgctaaaattagtgctgtatatttccatctccctttaatttctctttcacttcccaactgaactttgtgcagtccttcatggcttatggaaattcccccatcattacagggctcagtggtcaggagggagttgggcctctgcagggtggggacactaaatatgctgagtggcctcagggccagaggttgtggcttctagccctggcagggccatcactatccacttggcctttagcaagaatcctctggtcctggggcctcactctccccagttgtgcaaagtggggctgggagaagacttcactggggccctctgtacactaacataggtttttgggttttttttgagacagagtctcgctttatctgccagggtggagtgcagtggcgtgatctcggctcactgaaacctccacctcccgggttcaagaaattcttctgtctcagcttcccaaatagctgggattacaggcgtgtgccaccacgcctggctaatttttgtatttttagtagagctgaggtttcaccgtgttggccaggcaggtcttgaactcctgacctcttgatccgcctgccttggcctcccaaagtgctggggttacaggcgagagcccctgcacccagccaggattcttggttagaatggcatctgggttcaatgtagcaaaacagatggagaattcccatggctaggcatgagacaggtgccctcctagacaggggaattctgggctcaaaggaggtggagaggctggtgcagggagggtggcgagggggtgacagctgggaggagcacattcccccacacccatccatctttcctggtgtcacatcacctactctggtttcctcctttcacagtgaagagtttgaagcccagagagggtcagggccttgttgaggctatacagcaagtcagtgacaaagctggaacaagtcttggctttcccagcactcagatcatgaactgagacagctgtgtcctcagatctcagatgatgaatgtcagaattgggctgtgacattggtctcaagcatcatgttgggttcattatgcctcccaagctgttccttataacatcaggactccaaaacctgctctctcctggcccttctatcagaggcagcaccctgcactcctaaaagctagtgcctgggagggcgactggagaggagaaagtcgccatctggccaagtaccccatggtgtacggacactgaggccaagctttaaaccaaaagaatgaaggcttcatggtgacatttctgggatcggggcaggtgggagcactctttgcggggccagggacagggaagcgagccactccctgcctaatctcacaccatttctacccgggagcataaaataagggaccaagagcaacccggcagggtgcagggaagagaatctcgcctatggtcaaacaacctgttgaactgggcaataaataaacccaagtgtgaccaggccctgtcacttactggcagggggcctggggtaaatgacttcacttctttgagcactagcttcatagctgtacaatggagaaaagaatcctttggacagggatgaggaataactgacgtaatgcatgagtgggcaccaggtgaggaagccctccctgtacctgcacacaggttgagctcctgcccgagagatggtagatttcttcccggagagcctgctgcactccccaggaccatttcagcaggaaggggctcctgctcagcagtgaacagcatctgagtttggcaaattttccattaaattatccaactgtttactgcctgccagctgcctaaccctatgctaagcaaacatcagcctcagcgtcaccatcattgccacacttactaacacctggtgttttacaggcaccgtatcatctaatctgtcctcaaagcttaccctataaggtgcaaattattagccctattttatagatagaaaaattgagccccaaagagcattaaataactcactaaaaatcacagagctacttgcttacaaaactgagatgtaatcctaaatgttttgtctgggattaaacagatttcactccaaaacctgacattgaatcatctctgtgtacaaagctgaagccagaagtcttgaatcagaaaacttcagaggcagcctggctaaatgaagaggggagcatcagtctgtggctaaaattaaaggctctgaggccagattgctccacgtcaacttgctattagctgtgtgaccttggacaagttacttaacctctctgaacctcagtttcctggagatgagaaaggtggactttgtcatagagctattgtgaaattaaatacacataaaatgccaagaagtgcctgctgcgcagcaagttctcgagaataccagttcttgctgctattgctgcaggtcttttagaggcgttctataggaaactggccaccttggccttggtcatctttttgacctgtctccaaaactcagtgcaggaaaaattaaatccttccaacacttcagagatcaaggtcgggtggggtgaggggaggggacagaagtcaaaggttatcatgttttgcccaagagaacagagaggttgagcaactgtctgaagtcaccgagcatcagagaggcctcaagtccagcccaggtttcctgttccccatccagcgcctgagacccaagagaaacagtgacactagggccaggttcaagagtttggggactggagccaggtgcctgagcccgaattatggatggtgtgtgatttggggccagttattcacctctctgtccccatcttcctcatctgtaaaatgggaatcacactagtaactgccttggagggttatgaggcttaatcacgcactgagcttagccgtggcctggtgcagagcgattattcaggaatgccagcttgagccctgggtgacagtgcccctcacagcttcctgtcctccactgggacaggagggcccagaggtccacggtgcatggggaggcccattttgatgtaaggctgaggcctggcacaggtctgttcctggtcatatctggaggggatggagaatgtgagccggcgttcctccccacccctctctggaccttaacctcctcatctatagaaggggagaaagatgcatgcccaagcagtaggagaggtggtgaggcttataggagacaacagacaggagcccccgacagacagaggagctgtgcaaacagaaagaaatggctgcgctttgttgctgttgctgtatcttggctggtgtcccccatcctggggtgccaggactgcagacctagacaccctcatccacttctgcttacaggaaccagtgtatccaccaggaggtaccgaggggggaccgggcaggactgggaaacaggacacaaccctcatggctgctgttattatgaaaataggagctcagctgcagcctctccatctgccctgcacctcagcaggcggatacccactccacaacccccctcctgccccagacctgctgcctgcctgggccatggggagctcagaagcctctccagaacctctcgcagtgaaaggcatacttacgattcactgtcccaggtcagtggtggtgcctgaagctgaggagacagggccctgtcctcgtccgtatttaagcagtggatccagaggggcaacgggggaggctgctggtgaatattaaccaaggtcaccccagttatcggaggagcaaacaggggctaagtccactggctgggatctgagtcgcccgcctacgctgcccggacgctttgcctgggcagtgtacagcttccactgcacttaccgaaaggagtcattgtacctggctcagaaaccacagcgtcctgtgtccaaggtggagggggtggcgtgagtcagacagtctctgggagagtaccacttagctggccctctgctctcactgcagaatccttagtggctgttccactggtagcaagatctaccatttactgagtcaccccaaaatgcctgatgctgaagacttactgccgccctgggagatcagagtgggttagagcccatttgacagatgaggaaacaggctcagagcggagagaccgctcatccaaagttacccagtcagccttagacacaaacaccctcttgatggtcccgatggaaaaatggagcatgactgaggcagacacaaccgtcaggctggcatggggggccgtgagacagggtagaggtggggaagcacatctgtaaagaagagctgtgctgcctcaggcaggccgcttcacctctctgaaccaggaactgtttcacctgcatcccaaagagttggaagtttcattcccaagcatgcttgtgaagtgcctcgggtgaagtgcctggcacacagtaggctctttatgtgggtctgcacagccctctgcttagtctgccccccaggctgctcagagcaggaggaggttcaattttgaccagcctcaggcctgtttctgtttttgctcctggaaaaccagtgtgatccgtatacagcttggagtttctttggatacatggcccccactctggggttgttggaggcctttggagactgctgggggtggaggggaggggaggtacagggttgaggctagtggggccccacttgattgcaatccctttaaaagcctaaatcagattgcatcgcccgctgtgcaacccgcaaacctgcttgggagctggcgtacgtgccgtagatacttgcagagtgaatggatgagtgcatttttgccccttctgtcattcaccagtcccatttatgcctccaccttggggctctaccaggcgagtgacccacaggatcctccagcacacacattcagaccagggaacccacttactggctgtgaggcctcaggtgagttgtttaaccgctccgagcctcaatttccctatctgtaaaatggggatggtgacggtatgtaccttgttgagctgctgtgaggattaaaatgcaacagttcaaggaaagctcagagacgggtactgggtgtgcccagaaagcccctcctgatgctgccctccctcccccgtgtcaggggctggtgtcactggggtggggtgggccacacttgaagagctttcctccaggcagtctctcattcagttaccctgtgaagggagtaggtaccaccctcctttcaggcagcgggaaactgagctcagactcccctccccttctctctgagctcccttccctgcagctccatcccctggcttcagggcccctgtccttcccctgagctggctgaatggatattccgctgctctacatccactcacagctccagcactgggctgtggttgaggtcgcctgccctcggtagctcctgggcatttcttcccctctctgggcctttgttttcccatctgcacaatgacccccactctaagccctgctgtccctcccacctgtggaactgagtgagcagcagcagcaatgtcccacctttcctgctctcctcaagctctcctcaagctctgtctcttctggcaggcacaggagagtggcctgaaggctggcaggaggttgccgcccctccaacctggaattcctggcagcagcagcggctaggccttcctcggaggcccgaccccctcctccttcttggttcagctcaggactctgagggttgctgcgtggaggcagtgcatgccctgggcacagtgcccagttcctgcccacccaggaagtagacttcgggtggaggcagtaggctggggaggggcggggagcttggacaggaaggagccttgctcattgcccggcagacacaagactgggccctcataaactcagacagcccggcatgtcacctgttgtacctgccctttcagctctgtgacccgggacaagtcaccctctccctttgagttgccgcaagaggtacagtcacactgcccagaggattactagaaatgacaggcctcgccctcctggcacagacctggcaccaataactggcaggtttctggggccagctgcagagggaagaggactgagccacctatgaaatgcccagtgggcagccccacagttgggcaggtctgtgtgcactggggaggtgtgtgtcataggacctggctgggtgcagaagggattgcagtggggagctggggcttttggaggaggaatgaagaaagcatgggtgggagcaggtgaggcaagtaaggggctcagaatttggggtcctgctcttttggcagggctctaggctcagcccccgccctgctctggacatccatcctgggaggaagggctaggataatctggaaaaacgcaccaggacaaaatcccgggggttgtggtgggaggggtgggagtactcagtggccattcacaaggatactgtgcccccaggaaccccaggacatgagggggaaagtcttgtccacctggttacttccacaattgtctattgcagcatctgggctgatccccccagaggaaatgcatcatgggaagatcctgtgagctggtcatgagtaaggggcatctgggggaggccctgccccaccacagggccctgcctggagatgggagcctcgtggtatgggctggatagggatgtgagagtcgagatttggggtctgcagcaaggaatcgggtaagggggtgaggtgtgccagtggccctgggccaagtaaatcaagactgagtggctggtcaggagaacaacagtggacttcatgggagctgaactcattggcaaagtgcccccggagagtgctggccaccccacaaacacacacaccccatgcacaccctcactatgcaccctccttcccaggcaccagcttccttctttgagagtcagtgcaggtcactggttaaggcgtgggttcgggatctaatatctggggccaagccttagctccatcgctctttttgtgagctcttagacaagccacttaacctctctgtgcctcggtttcctcatctgtgagataggaagactctaagaagagtcacttccatcaggactgtgaagatcgaatgagataataacatttaagcacttcgggcagcctctggcatgtgatgggccccaagtcaatgctaaccaccaaaggccatgacctttggggatgtgtcctggctctgaaaaaccatatagatgggtctcaggggtctaagtgggggaacaactgctgcgtttggccccagatttggggagcagcacctgttgttgagggacacctcctcagattcaaacttccattttttccagaaaaggctgtcaatcccctctttaggggccgtgctcattttggctttccgaaggtgaagggccaggtgccttcagcatctttctgagcacctgtgacatgcagaggatgtggggtgactgcagctaggtggacttggatccgggggaggccctcagttctctgagccttggtttcctcatctataaaatagggataaaagtttctttcccacatagctcttctgaggcttagatgaggcgatgctggtggggtgtttaacacagagctctgttagcataatggacacttgtgtctgtcttcttataactcatttaatgaatgaatgaagtttgcaccattttttcacctcctccagtcacctttcaaattagccaacttgcaaaaccccagcagacacactttccttctgtgtgtaatctcctgagccacttcctgtgtgttggggaggggaggggggatttctgcattttctggaactatgtggcctactcacagcttcttctttttttttttttttttgagacagagtctcactcagtcacccaggctggagtacagtggcgcaatcttggcttactgcaaactccacctctcgaattctggaattacgagcgattctcgtgcctcagcctccagagtagctggcattacaggcatgtgctaccaat

SEQ ID NO: 61136 - DNA, 3560 bp, Homo sapiens
gccaggctggtctcaaactcctggcctcaagttatctgcccgcctcggcctcccaaagtgctggaattacaggtgtgagccactgtgcctggcctttactctttatccttactcagacagagaaaaataaggcaaagctatacattataaggggcaacatagttaaaagaaggaataaaaatgcatctatagcttcatccccttcttgttaaaattactaaaactcatgttttattgcagctaaccttttctgaactttattttaactttactcttttgaggttatgggccttgatggtcattacggattggaagcttttaagagactcaatgtgtcctattgaactataattatgatttgattttagatggtcaacttgtcgcattttggtcaataggaacccttttaagttatctctttatccctttgacaatctctgctgatgtttcagcaacacacacttgctttctggcaaggccaccatgttcatgttccaggtctgtcttcattttctcttgccccaagacatggcactggggtatcttccctgggagagaaagcaagcacgcagtgacagaggccttctgggaaccacaggcagggctgagcgtgcaagactcacccttgcgtggggactatgggagacccagcaggacttgagggcttattattcagaaatacatgccctgcgtgggtggcttagataacagagagcaatagggctcttaatttgcccaactccgaccttggcttcaaattgttcgatttaccctgttgactccttcatgttgattttgagcatttctatttgcttggttttaacaggcctcttgcttccgaaattttataatataaatctccaaatactccagcggtggtgtgccaccccctgaatcgcggctgagactccttgcacatgtggcctctgccaggccctgtcttaaacacttcacatgcatcacctcactctatcctgtgcagtgagtaccactgttactgccttagaacagatgaggaaactgaggcagagtgttaccctgatgctgaaacaggtacctccctctctcccttcctctctttctccctgcttgctgcttccccaacacttcctacacatccctttgtaacattagcataataggtaacagtgagcacgtggctcatgccagagccattccaagcattggttacagattaactcctcgtcctcacatcaagcctatgaagtcgatatttctgttatcccattttacagatgaggaaactgaggttcatagacgtcgagcacctagccctgggtcacagagctggcaagtggtggagggcagattctaaccaggctgtgaggcgcatgaccccaaagctcggtggcatcaccaggctgcaagtaaccggagggcagggactgtgttttttccatctctgtggctttgtactgagcacagaataggtgatcaaaggttgcttcatgaactgagttaatcaagggtcatggaaatggagcatttctttaatcagatggctgaggtgtcttgccagggtgaaagtgtgaaaacctcgcatatgctaaaaatttgtgtgaggcgtgcaacttcttaggtaaaacaaaacaaaacaaacccagttgctttactattcaagctggagtctaacactgaggagggagaggttagcaggctgccaaagcctcccagccaggacctagaacccagtgccaagcctgggcttccaccaccacccaagctgcttttccacccgcctcctctgtctgccccatgagaaaagggaaacagtccgtgggaggacaacagagcaaggactgagctgtcatgatgaaatccaccgatgaggaaggaggttgcatcatgcccctgccgtccctctttccattctccttgtggcccctcctgagctcatcagcagaatcccagccaaagcaacccatttgctgattggttaccagatgccaaggcctctgtcagaaatttgtgctcacaaacgttcatttccccagcagctctgcaaggaaggttttattatacctactttgcacgttaggattgaagagaatatataagatgacactataaagcctctcttgaatcctccagcctctccgcatctcccctgtgccaccatcccttccctgtctttatcgatttactttttatggacgtgttatttgcatgtagtaaaactgtaactcctaaatacacagctcaatacatttttacatgtgtgtgcatctgtgtaaccgccattctgagcaagacagagcaaattctcccatccacaaagtcctctttctatcaatgcctcccgaaggtaacttctgttctgacttctgtctccatagactggtttttccccttctagaagagcatgtaaatgggataatacactacctatgtttttgtgtctgtcttctttagttcaacatcatgtttctgagattgatctatgttgtcaccaatatcagcagtgcgcttatgcttcttgctgagtcctattccatcatcattgtgtgggcggaccacaattagcccatttattgacggatgtctgggtggcttccactttggtctgttatgggtgaagcttctaagagcattcatgtagaagtctttgtattttcatttcttttgggtggaatggctatttgtagagtatgataaactgtattaaaaaaaaacccttttctctccactccttgctttttttttctcttccctccttcccctttccttgctgtcttggaaggattccaggaattaagtggaaaagaagttggacatagttcaaatcccagatctgccattaaccaccaagaacccagagccagcgacttcatctcttttatctgtggaatggagatgatagtcctgacatggtggggctgcagtgaggattacagaaagtgcctggttgaataaatagtatttccttactctttcacccttgggactgtgtgcctgttgttctgatggcagacaaatagaaatttaattcagtgaaatgactgggaacaaaaaacaacgttgtttcaggaatttagtgaaaaatcaatgatttccattctacttaaactggttctcaggacctggtgtttggctctccccctcagagagcattgggcaagaagggcaaacacaagctgggtcaacatcagccctcctagcaaacaatgaggacgtgtgtgttctggacttctctgccctcttccctctacctctgttctccagcggggctacgtgggaagcagatagggaagactctgtgaagcgacttaggctcaggtactggaagctgtgtggatgggattcagggagctgaggacacacttggagaagtgccctgctctcttgggatggagccctcaggtttaccagggagggcaggacaaggcacttagggtgctgaagacaaacagtttgcacacatgtgcatacacacactaacatccccacataagacttttgggggtctccttccttattttaagggctctggaaaaaatgatggccctgacaccacctgaaatagtgtagactatggcaag

SEQ ID NO: 61137 - DNA, 944 bp, Homo sapiens
ggaatcctaaattttaaagggagatcgagaccatcctggctaacatggtgaaaccctgtctctactaaaaaatacaaaaaattagccaggcatggtggcaggcacctgtagtcccaactactcgggaggctgaggcaggacaatggtgtgaacttgggaggcggagctcgcagtgagcggagattgcgccactgcactccagcctgggtgacagagcaagattccatctcaataataataataaaaaaaagaataaagggagagcagatttaaggaatagccaataccccaggactgagtcagagcacccagggaagagcctcaaaaccccactacctcagagagtgcagagagtgcagtaatgactctctgaatgacagagaagtcagtgtgcttctgtgttggtagaaatttctgaaaatttactctccagaatttgccaacaaaggttactggggaaagccttgatggggaggtatctcactggaggtggtctgttatgaaaccatgcaaggtgggtgccagaggaaacagtggcccctgtgcactgcaggatgggggtaccaggatggggatatcaggaaacaacctggacttctggagctggggctgagcaagctgctggagtctgcctgggagcacactggaatgaggaagcaaaatccttttctcctgcaatgtctctctggttcgtttacttgtaaagctgtatgttctgccagctggcaaatgaaaagctttttaaaggacacagatctgttttctcagagcaagcaatgaagggtaatttggagctgagagacaataaattgatagcctgcataaatggcaactccattcttctagtggctcatgatgaaaatcctgggtcatcctttatttctctctttctttttcatcccacacctgattggtcaaagtcctatagactctaccttcaaaat

SEQ ID NO: 61138 - DNA, 582 bp, Homo sapiens
ataaaaggagattgaaaacctgaagtctctcctttaagactcagagggagtacatggttgcatttcttcttcagggacttacttctcccatccttaccatcaaagccaggaacacacacacacacacacacacacacacacacacacacacacacacacacagagacagagagagagagagagaagggagtgaggcagtttctgcccctgccctcattttgggcacaggcaaagtacttacagagcaaaggcactgagcaggggcccaggtcttcagcactgcatcacctctacccacaggaaaatggtgtttgaagatgacagcaacctggtcaatatttgtcaggtcaattctgggaactggtatgaagacaatgcacagcaaacaggaagggctcttttttttcaaagtatctgccctgactgcctgtcccacaaacaaatggtggattgtgacttaagcccaggctcgctttgagaatattctgatgctggcagcaggtggtggtgtggttgtggctgttgcctgtgtctgtggttgtatgatccaggctgtattctttttttttctaacttttttat

SEQ ID NO: 61139 - DNA, 740 bp, Homo sapiens
tgattgagccttggaagtggcatccctgccagcgaatccagctccactggggtcaaatgcaccctcagaacagaaagagggatgtggtttgttatttcttgtgcattagcaatgtgccatcagttaacaggccatttcccacctaggatttagtgggattttccactttccctagaaagagaataccgtctgtggctttatttgtaatcatcatcaggaaggtcctattgaaggagacagtgaagtaagaggggccatccttcgatcggactatgaacttggtggtggtagctgctgtggcctcagtgccctcttcactgacatccagcacagccttgtgggttgcctgccaagggaaaaacaaacatcagtggccctagtggagacacttttacttaactgagtaaactaaactgagtgcttttgccctggaatggtgatgtctaccttgaaaggattcaaggttcaaatgcctggcattgggtttactcaatacattgcagtgggtgttgactatggcccattggtccttacaccgggattgagatggttacaaacacagagcaggaagaccggagtgagtctcagttctgccacttatggttgcaaaattattaagatgctgcgtgcttcaggttcccgatctataaaaggtaataataactgcatatgccccgtaaggttattgtgtaaattaagagagatcatacaaagcaagtgcttgtggacttgccagcagt

SEQ ID NO: 61140 - DNA, 1628 bp, Homo sapiens
taagctagcaacattggttcctcagctgtgaccgacgtctcacagtcatggaagatgttagcattaggtgaagctgttgaagggtgcatggaaactcagtggactctcttcacatcttttctgtgaagctacaattattccaaaatttaaaaagaagaaagtaaagccaatcagtcaaggacataaatcaagaaaacattccaaccttggccgaggtctccagggatcagggagatgactgctctgttcacaaggtaaacaatctcagtggtttctgcccacgatgtggaatcactcagtgtcaaagtcctccctcttccagctctcttttgatcattctgagttcccccaggagtgagtctcagcttgatgccagcccatctttaccaccatctcagacttgctgactttcctttctaacaagggtgagtaaaccacaggctgggagcctgcaatctgtgacagtcttggttgaatttaatcactgaattagttttgttgtgtgcatttttactttctacttgtggcaagttgtgctagtttctatgtatgactgcaatattaatttttctatttaagcaaattttcttttcctaacatgaattgatttaaggataggccttgagcaaataacgtacaaaagagaggggaatttagtcctaatcatgaaaatggtttgggagtaaataaaatttgagaaactgagcgctaatggagagctggtttcccaaagagaaagggcaccttggctttgcacccctgtgggaacacctgagcactgatgtggtgactcagtggggtaggatacgtgttcctggctggttctgaaggggagactagaaaatggggaggaagcagaccatgtgacctcagctctgcttgaacaaggttcctgtctctcctgtccatcctggcttctccatccctggaacacagcctggcacacagaagattcccagtaagtatttattgactaaacaaatgcaagggagaatgactatacataaaactttcgagccagttctatcatttccaatatgaacatcaaagtattgcccaaaatagaagggtcttctgggggcatccagggcaacctcatcattgcacaaatgggcagtggaagcccaacaggaagaaggtatttgctccagccacacagtcagtgtctgggaaaagcagggccaagaactaggacttcccttctgtgatcattcttgccaacacaccagtctgtcacttctgttatgcgcccacatgaatgacctcagcccaggcaggcagtgctgcaggcagagtgggggcagacagcaaaccagactcctggcacccagcctatgctggaagaggtagaaagtcccctgctcggaggctgcacagaggttttctgtatcgtgtaggtcaaactggaccacaccaaggcagcctgtctctcctgggcctctgacactgggcaccctcattcttggttagggtgaatccttcctttatgcatcaagtccacctttgctgtagggaaaagaaagagagatcagactgttgctgtgtctatgtagaaagggaagacataagaaactccattttgacctgtaccctgaacaattgctttgccctgagatgctgttaatctg

SEQ ID NO: 61141 - DNA, 1231 bp, Homo sapiens
aaatgatgtcggcaaagggctcggccgggattcccagcctttttcccacgtctgtgtccctgtgcggggtctcaaccttctccctcacccccaccctctcgaaaaggggctgcgcaccctgggctcctgggctcagccctcaccaccgtccacttgccctgcccctcccccatcacccgcaggcagccttctccaccagcctttggggactcttgccttcctgccccaaaccagaagatggggcacttgctgcatgtggctaaccctgaggccacgagaaagccacgtcacctctctgagcctcagtttccatgtctgttatagggacgcccactctggctgctctgagagcacctgtgaccagaacacaaaggacaccatgagctgcaaactgctaaacacgcccgggaaatgataagtagtgccagtcgaggctcctcagtgccaagccagccagtatcctctcctctccaaacaccgaaagccctgggaattccctggaggagaggaaggaaccagatgcctgaaatgagcttgccccaggccgggaagctgtgcgcggccctgcgagcacctggtgccctctagtggccacaggcggccctgcagggccacattttctggggagggcgcagagaccccactcactcttcaattgaacttgctaacaggtttaaactgcaggatctgcctttgacaacaagataaggaggggacaggggagggagggtgccaggatgttctttttgtgccagaaatggacaaagctggcggctactaatagacttcgtccttctaatgctgcccgaggggctggactggccccgtccctgtttccccatccgcctggattcctggctgagcccagagctcccacgtggacactctggggcggatcattggccaaggactcacagagttgggaccgactttgttaaagcactgaactagcttccttggagccccaaagggaggggcgggaccttcacttcagaaataagaagacagactcagagagggtttgtggctttcccaaagatacctcattccaggatttgaaccccagtctctcactcgagaccccaggtacttgctgtggcccataccttccccaaattatccaccaacagccagtcaacctggggcagggctgtgggggagaaacatttgtttactaaatcacagagtccctctgcccgctggaggggagaggagaatgccaccaagtggg

SEQ ID NO: 61142 - DNA, 1002 bp, Homo sapiens
gcactgccaccacctccccgcccccccacccccgccccaagggacacagcccacaccctggcctggtggggtctcagcaccctcccacctcagcatgcctgtgtcacagcagtctccaccgggcctcctgccctggctccctgagtgcgaacatctggcctttctcccccaaacagccaacaccagccccattccgggcctttccatctgtcatcacgggctttaaactgacccaaatttgtcagttgggttagatgcctgagtaggctaattttttaattccatcaattaaaatagctgagcaactggttatttcccaatcaattgataggttgctctcctgagttgagcaattgtttgttggcttttagtttggaatgtgtgtgtgtgtgtgtgtgtgtgtgtgtatctgtgtgtgtttggctgtgactcaaaataaataaagagataaaactaaaacaaaaccaagaaaaaaaaaagaacaagatagaaaccgaaccccatggggtacacatgggacacatgaagctatagtcagtatttcaattctctgatcatcctgctcccatgttccctattaatttggaaaaataatttcctcctcttatgactagataaaatagtgcctcactgacccggaagtcattcatcctaaagacagatccaaaccagatgggaagcgtccgcacaggtagcataggcggcttaagtctacacgagaaggggtttccctgtgggagggcactgcttccacctcccacaccgtcccgatcagccaactgaagcaacagtgagctgtgacagcagactcaacaataataatatttctaattttacaaagcgcttcccccgttatcaccacagtttgaagaaatgatacctaaacagggataacacacacaggctacagaaggtctactcagtgcacagtggtttggaaccacagttttctttagagagaactccccctgcccccaggcaggtcactcctctcctgatagt

SEQ ID NO: 61143 - DNA, 2751 bp, Homo sapiens
agggctcagaacatttaagagtgctgcccccctgcccttaatatcagttttctgattagtgattattgcttctcatttgacacgtgaaaaactgaggttcagagaggtggagtgacttgcccaaagtcacaaatctcagcagtgagggagcttgtctgacgccaaagcccagcctctgtccagaacataccaggggcaggcgccagaaactaaagggcagtgactgtgtgctcatggcagggacaagctgtccatcccctgggctgcagccaagcatacgctaacccctggaatctgtggcatcagccccaaactcactgaagaagcaagactaaaaaagcaaaaccccagactgtagaccattgtaaggggaataatgtattttcacattcatcagagcaaaaatccatggccatctttcactcattgacttactcagtcaacatccatggagcatgtcccctgcaccacattctgctctagcgcgtggtacagcagtaagcaaagcagcagctgctattccggtggcaggaaaagtctgtccaagtggagaagcagcagatgctgggaaggaatatgggcttcatgttcagtggccacggagcagaccctgactctggaatctgagctaacaatgtctccgggcttacattttctcatgtgtaaaatgggccaagcttagtatacctagagtgtataggcaagggaaagagagagatgagtgagggaaagcgagaatccactgagacagtagctctcactttgcctgacctgctagcttcctctcttgtcctggtgttgacccattttggacctcaggccagctggctccagggctgtgcttgtgcctgctctgccatccccatgtctacatcgctcagggctcccagcccactgtgctgctcagtggtgtatatttcacttaccttaaggcccaacgacttggaaacacatccagaaagtctgctagaggatgcctgaatggtcaaggtcatctcagtcagggcacccagggccacattgctccctgcagtccttccccacatagcttgagaaatggctgccccaggagggtgcaagggtgcaagggtgcaggggttcactgattactggggagagaacaagttcaattccatggttaaagaagaaaaatgcaaattgaatacctggcccaaggaggttcctggtcccaccccatgccacccttgccctgggatgtactctccttatggtctgacctatgagatctcagtggactctatcctcagaaatcacagagtccaggattgcaaactggaggccctgctgtgaggccctgcccacaggtgggtcttgcctggcctgtagagagctggctctctcacttccacacatccccaccattccccaccgtggcaccatggagtcttccttacctgatctaggaaggcggcgctggagcttgctgccccctgtctgatccagcccctcatgttgtaggagggaggtgggcgactgaagctcagagagggagtaaatgagctcaacttcacacagctagtgaggggctggttggagaccagattttccaagtggttccccgggccctcggggagcagcaagggccaggcgaacctccatgcactgcacaaacatgaagaagtgaaccctcttggggttccccaggtgggaagtggggtgtcttcttgggagggggtgaaccaacttctggtgagttttccttgttgaggcaatgctgcacccgtagcctgtttgttaataattacctggtcgggagagagtgggtggtactgagaaggcctggtttgaccagtcctcctgggcttgataagacagagctgagacagccacccagggggtccactccaggacagactgtgccgtgagtaaccccctgagacaatggagacgagagactctagagggagggtgaccaactgttccactttgcccaagactgataattcttctgggatatattttcagtgctaaaaccaggaaagtcccaggcaagctgggacactttgtcactcttgctagaggtgagaaatactcaggctagaaaggccccgacttagggtccatgggcactggtgggtgactatgcccggagacccagaaaagcctcccccagggacacacagctggtacagggcggcactgactgagggccaaggtcttctggctgccaatccaggtgatcttggggagctcatgccggaggggaggtgtgtctgtgagtgatgcggtcctatgtatgtttctaaatgatccctccaactgctgagtggagaacagagagcagaaagactaggaagctttctgcaagggtctaggtcaggggtcaacaaaccacagcttgtaggtcaaatccggcccaccgcccatgagctaagaatgcaagatgtaaaatataaatataaaatataagtgataagtataaaagataaatatataaagctatgaaaaatcaatagaagaacaacattttgtgacacaggaaaataatatgaaattcacatttcagtgtccgtaagtgaagtttcactgaaacacagccacgcctcttcatgcatgtccggtctgtggctgtttccagctgccacagcagagttgggtagtggcagcagagactgtgtggtctgcaaaaccacagatattactatctggcgctttgcagaaaaagttttctgagccctggttgaggatcatagcaaaagagggggcgagaggctgaagaacctacaggag

SEQ ID NO: 61144 - DNA, 701 bp, Homo sapiens
gacgtggatgaggctggcaccgaggctgcagcagccaccagcttcgcgatcaaattcttctctgcccagaccaatcgccacatcctgcgattcaaccggcccttccttgtggtgatcttttccaccagcacccagagtgtcctctttctgggcaaggtcgtcgaccccacgaaaccatagccctcccagggctgctcatctgttccaagcaggaggatgtggcaggggagggctgggagtgagtagctctgtgtttagagttggggacaaggatgacaccgaaggtccaggagtccaggacagcaggtgctggccggtggggagcggggaggggcactgagatgggcagggcctggacattccacaccctggtgctgtgcagcctctggcagagcatccgacctcttggagcaagtttctgcctctggaaagggggcgggcccttttcacaacaggctggttgtaccgagtaaacaacacgatgccatgaagaccctggttcagtgtctcgcacgtggtagacactcagtaaatgcgtcctctgcctggccctcctgggtttgccccagactcccctggcagacctggtcccagacacaaggtatgagagctccaagtcccgttccagtaggttatccaggtttatggaaaggggactgggtgtgggcagtcagctgcctcaggcagggctggtaccttgc

SEQ ID NO: 61145 - DNA, 1565 bp, Homo sapiens
ggaatagaacctggaaaaagagagggtttgctagagctgtccctttccctgtctctggaatgccaacaatagggaggctctttggtcttgtctctcaggagtgcccatgccattccaggaaaatgatggcccagctggtggtgtaaggcttggggggcagcgagtgggcatcgtggtgaaagcctcgggatcagggagctgcgtctgcaggcaggcctgctggccggaaacctgccaggaaaggaaggggctgtcccggggcggggccagggaggggtggagacagggccggctgtggtcagtgacaaatgctggctgcaatccagccagccctctgccctttctgagcccgagggactgccacctccactgtgtgcacactcagctacgggacacagtaagtaccgatgccgcaaagggaggtccccagggcttgagggcatgtgaggcgaggagaggatggactctagagttttggggtttggggtctgcaaagctctgaaggagtctcatctctgcagtttcaggtatccaaggcagcagaggtgagtgggtcccccgagctctgtgaccttatgctccacactaactctggcagagcctccgtttcctcataggtaagatggaaataattacaccctctggatggtgtgactgaagattaaatacagcgggtgctctcactcagcacatctggccatgtctgcagacacatttggttgccacaactggaaggggggtgggggttagtgacatctagaggccagcgatgctgctgatgatcccacaatgcccaggacaagatcacaaagcatcatcctgttcaaaaggtcaacaggatcaaggttgagagaccctgaaataaggccatggggacaaaatgtcggctggataggaggtgctcagtaagtggcagcttctgttgttttctgtgcctggagtcttgggcctttagaaatcaggaacaatgatccaatattatcggcttccgtgagataagggcatcttgcctggaggctgccacccaggccggtcatggcagctgctcatgaaggacagtaacaatttggcagtttgttaaatgaacaaaatgtagaaataaagtaagcagaatttttagtttttctgaaggtagggcttttggccagatatgcagcaataaaagagcaaactgcttccttgggccagtgtccttgctcatagatcaggaaaccgaagcatgaagaatacaggcggcagatgcctgaaggtaacggacgtgttcatggtgctgacggtgatgataagtgacagatgtagactcatctccaaacttgtcaggttatagacattaaatatgtgcaactttatgaatagcagtcatgtctcaatcaagtggttttaataaagaaataataggaagccagagctgagagacagggagggagttgttcaaggtcacctggcaagtgagctccggggcggggagagctcagctctgggtggccagcctggctttttccactgctcagtgtccagcttgcagtctaatgtctctgaattacagagaaggagactggtcagtt

SEQ ID NO: 61146 - DNA, 561 bp, Homo sapiens
aaaaatgtcaatgacaaatgcatatataaaggcacatgtgtaattgaaagagctttgagagaaagagtcaagggactgttccagagaatagccatggaaggggaaaaggtccagtgtgataaggtattgcaaagaagtgacatttaagcaaaagcctgcagcctatgcagaagttggcctcagtgagaaaggttgggggagggttccagtagagagggaaggtatgcaaaggcccagagttaggacagaacttgctgtgtttgagaaactgggaaaagaagagtgagcctgggggtatcacgtgatccagggcagagcaggtccaggccaggtgcagccaggtcacagcagccctagtgggttagagcacaaatcaaagtttagcatttatctgaaacacaggagttggccatgagtttcttaggcgaggaagcgctgtgaccatatttatgattgaaggagattcttttatatgctgtatatagaaagcctttcagggcaaagaaaggaagctactggggtagccctgggggagatgaagggagcttccactgggggcag

SEQ ID NO: 61147 - DNA, 1867 bp, Homo sapiens
taagtggtgcagccagaatttggcggggggagtgcgaccaagaaccctacactcagtcctgtgctctgtgctgtggaggagagatgaccaggagcagaaacttcattcagggacatctcaggcaccagctcccccatgagccagctaagttccctccctcccttcaccaagcaccatgtgtttcctcatgtgccgaatgaagaggattagatactcaagaatggaatgagtgggtgagtgagtccttcgctgcacccaagtctgattttctgtgcgcctgctcaccccaccctgcatgttctaagcatgcttccataaggctgtgccccaccctctgattctagagtctggactgtatcagaggtgagtgcctactagaggtaacaaggtcaggaccccaaaccttgtccatcccccaaagtactgagcccccaccatgcaccagcccatgccagatgctttgcacttgtgatatcacccatcccttgacaacccagcaagttctattattgttcccattttacaggcaataacataagtgctttcccagggtcccacgctggtgacagtgagggcccagggtctgagagcccagatcgcacatgtgcgggctggtggcaggggagatggcagcaaccagactcagacatttctctgcagttgtgctgtgggctcagggtggctctttatgaaggggccccttcatggggtcatgcactcctgtgtgttttcccttgcatcatgccttgcctgtcttggcaaatatttctctggagtttacccagccagtccaaggtcacagggaagccctgtctgtgtctcacacagaaggtcaacgtccagcactgtccaaactttactcagcaaacagtcacaaagcagctcctgtgtggggggtcaggggtgggctcactgtggtctctgctgcatgtcacacattgaagcactgtgctgggggtcatcacaggctgtttaactcaattgtcacatgagcctgggtgcacaaaatggtagagcagctcagagagagatggacagacagcatgaacctctgaggagtcaggttttcttggatgaagggacactaagatggctttggagcgtgagaaggacttcacctagcaaatgtgggaaaggagtgagacctccaggcagagggactggctggagacgagcgtgatgtggtgagccatggagtgtatgggtccccacagaacttcagtctgggcctgcacagggcatgtggaggagacaaggaggagggaggtggccgtgccggcggttcagtgacagagatcctaaatgggaggccaatcctaaatgggatgatctctttcatcccaatttcagggtagtttggtcatccacgccacattccaagtgtcccctgggccctttctctccctcacccccctgtctgcacatgagtagatgcctccatgcagccctcccaggacgctcacctctatccacagatgcttctccaaaacccaccaggccctcccatggaacgagctcacctacagggtaaaatcaggtcacggtcacatatagcctgactactcccctcaggaccctcattcacagccactgtattaatttgctggggctgccaaaacaaagtgtcctcatctgggaggctgcagtagatttgctgaaattgatttgctagcgttgctgaaattgattcaagcttgattctggagcttgaatcgaagatcaaggcaagtgcagggctggtttccctgaggcctctccccttggtttgcaggtggctctcctctccctatgtcttcacatggtcctcctctgcatgtgcctgagttctaacttcctctcctctcctcatctccaccagtcttataga

SEQ ID NO: 61148 - DNA, 5632 bp, Homo sapiens
tacatgtaccatggtggtttgctgcaccccctttttttaagaaaatgtttcaaaaagaaaaacagccaagtaggggagggcacacgagtggggttgggaattgcaaaggcagaagcaggagaccagttaaggaagaaaacggggcactaagagagacaatcaggaggacctgctgcagccagggccctgaggggctccctgaggtggtgccattgaagcggagttctgagggacaatcaggtgtagacactgtgagtctcagaagtgggaaaaggggagtgctgtgcacaaaattgagagacggtgcctgtggcagcagctgaggagggaaagagaaggtggggtgggaggcccatcccttccttggccacaaggacactgagtagggtgctgagatgggagtaacagtaataataacaggcagcacttggaggctgcgtcccgtgtgtctggcactcgcctaagccctttgtgcacattggctgagttaatgcagaggtgaactgagaggcacctggggtaggggctgggggacaggaagcaggtgacatctccagtcctctccagcgtccttagagcaggtctacagtactgatccttctctgccacccttctccaagaccaccttggtgggagtaaggggctctaaggtgacaacacacacaggagccacagacacaagacacaagacacttttgactcccaggagaacctagtatgggcatccacacacccttcctgatggtgactttttatgtagacatgcagagtgcagttaaccagctgttcctgcacacatctggattgctactcacacatctgtgcacacacacacacagcctcctggagcactgtggcttctgggtggctaacacagctaccacctctggttgtgctgagctgagcacccattgcctgctggggtggggagagggcaggcactttccctgcgcgaccccgtttaaccctctctgccccactgatgtggtccctgttgtccccgatgcacagaggaagaacctgtgtcaggacccccagagcggtgtctccactaagcagaagtctctgtttctctcctggcctctcccagaggggctgctctgaagcatgtggatttgatcaggataatcaaggtaaatgatccttatcttgatccatcacaaatgttaaggtacaaggctgtggagatggagagtgggtggagtctctgctgcccggtatcctaagctgggtgatcgcaagcagacacacacatgaccacctcttgggccatgcagggggaatgaatgtaatgaggccgatgttacagggttattgaaggctcaggggagaccaggccaaaaaaaaaaaaaaaaaaaaagctatgacctgagacctccctatagcagtgtttctcaaactctgattaacgttacttgaggagcttgttaaaaatacatactcctggccctgatcagataaatcagaatatttgacacagagtctttaagctccccctcgggattcaaatgcacacagatttttggtgctttgccgcctacagtacaagagagggcaggactgtcctgttcagtgcactgtgacccggacgctcaggcccacggaactcccctactccccctgctccctgcggtgccacccacctagctttcgtgcctgagggtggtcctcagactcctcctagaacaggcccagaggctcttagctatgtaagtattcattcctccaatcactgcagagcactcaccaggtaacaagcacgcacacccaggcgagttccccatgctcgtccccacgttgatatctcagactctacaagtcttcagctgctgcctaggactctgtaagtccttgagcttgggacccctaccacacacaagcgctgggcgtgccccacaggcggggaagtgctggccatatacacccagtgaagtgggaattccagataatgagtaactttttagcaaagtacccatgccctttgaattgtgaggtgtttttgtttgctaaatctgacaattctacctgtagggaacagggatgattgagaagcagctgctccgatggccagaagccaacagccttccctgcagagatgcgggaagtcccagggacagcaggaaagtccaggcactgcactggcagtgggattggggcttgggtcagaagagggtcagggccacaaggaaggaccctgggaggcttcctgctacataatatgagggccgggagcataacaaaggattgccttatccatgattgcatcatcaaactgaagcctgagacagaacattctgtgaggtggccttgttcactgcagaggagctgactcacacagttttgtctgggaagttgcaacctgtgccaggagtagccagcctgggagtaacaaagaggcttttctactgcaggttttcctagagctcctctccctccctcccctggccaaaggtgagctctgcagggagggtccggctctaggggactttgctcctgggcatcctagctgcagagattggtggggcttgtccagaaaggggggtcttctggacctggggatgatgcagttgggcctcagggtactgggaggccagtaggggtgcttcaaactggccagtaacctgaaggactcatattcttaaggatatcctggtggccacgtagaaaacagtcaggtggggtgagggtggaagtaaggaccagctcagaggtcactgagggtgcagccagacaggctgggacccacgtgggcagcagaggtggagagtagggatgtggagggggagacccagccccacgctgggggccctgaggggaggtggaggctgagccaggagaagaggcaccacccactcacttcctgcttgctgaatgactgtgaggagcaggagaaggagcaaaagagcaagtgaggaagtcaagggggttatttgggggcaatgctccatgtgagggtagctaaggacaggtgccaaggaggcccctgtgtcaaaatcccaggtcaaaatgttagttaccagagacctctgataaagacagagccacaggtaaaacgcagcggcacaacccctcgaccctaaaatcagaagcctatctgtgtcctggcaaggagagaagcacgagtgatcatccacaccgccaggacgcaagcccgttatttctgatgcaaaacccaggctccctccagggctggcacagaggactgccagaggagtcagggggcctccaccttccccagctgcgcaacctcagagggtgtctccttatctctggggtcactgtgtcttcatggccaggctgggcacaggtcagctgggagtggagctgtgtttgcagggaaggaacgagggtggacgtcgaagccaacctgcctggttcagaatcctggctcagcttggcacttaccagcagtggtggtgaggccttgggaatgagctccgcctccctgtacttccgtttcctcatatctaaaattgagggagtaatgggacccgcctcagtgggtgttcatgtggattccatgtgctcttaagcataaagaacagagcagctatgatgaccatcatctatgtcactgggcctccggaagtgagggaaggagaggcagatttgcttaagtagaaggaaggcggaggaaggtagtaaggcgtcagccatgtggcacagattgtattatgagatttactggttttcttacttcgtcctcaaatttccctccttacccacttcccatgattcctgagagtcaagaggacgggagctgtggaatgtgttagtcatctactgctgcagagtaaatagcccatgattatctcacggagttcctgagggtcaggaatccaggattgctgttggccagggcaatcccagaaggctcacttgtggggctgttggtagaaggtctcagttcctccctatgtgggctactcacagggctgctcaaatgtgacttagagagagagagagagagagagagagagagagagagagagaggcttgtttgtttagtgtccaggaccgagagaggatatagagagaaagcacaaaagagagagagaaaaaaagagaaaggcagagagagagatagagacagagacacagacagttgttgaatgtccaggaccaagagagagacaaaagacagaaagcacaaaatagaggggaaaagagaaagacagagagagtaagggacagagagagggggacacagagagagaacccatggcagaagcagcagtctttttttttttttttttttttttgagacagagtctcactctgtcgcccaggctggagtgcagtggcgtgatctcggctcactgcaagctctgcctcccaggttcacaccattctcctgcctcagcctcccaagtagctgggactacaggcgcccgccaacacgcccagctaattttttgtatttttagtagagacggggtttcactgtgttagccaggatggtctcgatctcctgacctcgtgatctgcccgcctcggcctcccaaagtgctgagattacaggtctgagccaccacgcctggccagaagcatcagtctttttataacccaatctcggaaatgacaccccaccccttctgccttagaaagaagtcactaagtccagtccaatgtgagagaaagtaattaagctctatctcttcaaggaagtggtatcagacatttgtggacacatttgtaaaatgaccagagcgttagaacctcagaatccagcagactaattgccctcatagtagattattaatgttttaaaaaatggatggactagctgaaggaataaatgaacgagtgagtgagcaggatatttctgtctcatttcacatgcagaaaaggcactgaggctcagaggaattaggacatgtgtgaggttctctaggcagtaaggggtgggggctggcctggtttgccagaactcggagatgcagcatgcagcgtgcagcagttctgaaatggaagccagggatggcaagctacagcagccactccctcccggagggagaacggacccaacaccaaggaggaagggatgactcagcagccctcaaaacagagtcaggagttctccctgcttttgccaaaccctctgcaggcacctcttatccatacagggacgcagccaaaggcctagctgtgctgaaggaaatttgcaaatcctgcctcaaatctgcagccagtatctcccccagcagcctccaaaccaggccagcacgaacccagccagagagcagcataggtgttgggcaaaaacaggctattgactccatccttttctaacagagaccagagtcctctggccttccacagagaaggtggggccttctcagggttctctggatctgctggtgtcagtcagtatctatttcttcttcctaagaattcttttttttttttttgagatggagtttttgctctgttgcccaggctggaatgcaatggcacaatctcagctcactgaaacctctgcctgccgggttcaagggattctcctgcctcaacctcccgagtaactgggattacaggcacccaccaccacacagggctaatttttgtatttttagtagagacaaggtttcaccatgttggccaggctggtctcaaactcttgatctcaggt

SEQ ID NO: 61149 - DNA, 13405 bp, Homo sapiens
aaaccaatatggcacatgtatacctatgtaaaaaacctgcacgttgtgcacatgtaccccacaacttaaagtataatttaagaaaagaaagaaagaaggaaaatgatgctctgaggccggagaacttgagaacactcagataatgctctgaggcaagatgactagtcatccccaatgtccactctctttgtctctctcatggtaatggaactctgaatttttagctgggaggtggctacctagaatcttgactgcactgcacagcctcctttgtagctaggtatggccatgggacaaaactccaggcaacacaacacaagtgggaatgacaggcaatgttcaaggcattcctttcaaaagaaagggtgtgcccttcccttcccctgtggccctttctatggactggaaggtggacatagcagtgagccatcttagcctagacaaacagacgtggaggggcagctgagcaaccagacaggaggacgtggtttctgacaacgtggaggcaccatatcaacccactgcctccagctggacctgcaggagagggaaatgaacttcagtctcattttagcaactatttctttaggattctgtgtaacttaaacatatgtattggccaggtacagtggctcacacctgtaattccagcactttgggaggctgaggtgggaggatcccttgaggccaggatttcaagactagcctggacaacacaatgaaaccctgcctctacaaaaaaataaaaatttaaaaattagccaggcatggcgttgtgcacctatggttccagctactcagaaggctgaggcggcaggatatcttgagtcgaggcggcaggatatcttgagtccaggagtcagagtcttcagtaagcaacgagcaatgattgcgccactacattccagcctgggtgacaaagcgagtctctctctctctctctctctctctctctctatatatatatatatatatatataatatatatataaaaatatataatatattatatatgtgtatacgtatatatgtatatatatacacacacacacatagagagagatatatatataaagacacacacacacacacacacacacacacacacacacacacacacattcaattccaaaactgggagcctgaaagtcatttaagaaagatgggcccagacagttattggtcatcttagtgccttacagtcaacaaatatgtaagtcctctaaagatgcagcactatcgcaacagacaaacaaaaaatcctgtcctcgtagagtgtacatttaatatcatttcatttcatcttgattaccactctgtcagggaatattgccttgcatcttagacatgaggaaattaagctgtagagatttcccatgatttgtttgaagtgagtcagttggtgagtcagacatcagagattcaagccaggtcagctcatgccagagctagaacctcgccactggtctggtggcctccaaagcatgccctctagagaggcctgtcagggctaccccggatggggactgtgaccatgaggaatcaagaggaaggatttttttttttttgagacagagtctctctgtgttgcccaggctggagtgcagtggcgtgatcttggctcactgcaacctctgcctcctgggttcaagcgattctcctgcctcagcctcgcctcccaagtagctgggttacaggcatgcgccatgatgccctgctagtttgtttgttttttttttttttgtatttttagtaaagatggggtttcgccatgttggccaagctggtcatggactcctgacctcaggtggtctgcccacgtcagcctcccaagatgctgggattaccagcatgagccactagtcccgcccaggattttttttttcctttttcatgagccaaagaaagaccccagactagctaagagagaggcccaaggatacctgaaggccggggaggagggacaaccacttgttggggtgaaccaatcgcagaggctcagcaggacagaggccaaggctgaggaggcccccacagagaaacagagcctgaggacaaggggttcctcacaacacctgtgctccccgaaagctcccctccacacccctctctaggtgccctactctctggggttggtgaaggggtgccaaaaatgcaaactgatccacagaaaaatagagtcctgtattttaaaaatatatctaggtttgtatatggacattcacatcacacagacacacagacacacatgcagccacacacacacacacacacagagacaccaaagaaaagtgctttagaaatacaccaaaatgtggctgggtgcggtggctcatgcctgtaatcccagcactttgggaggctgaggtgggcagatcacgaggtcaggagttcaagaccagtccgaccaacaaggtgaaaccctgtctctacgaaaaatacaaaaattagctgggcgtggtggtgtgtgcctgtagtcccagctactcgggaggctgaggcagaaagttgcttgaacccgggagtcagaggttgcagtgagctgagatcacgccactgcactccagcctgggcaacaaagcaagactctgtctcaaaataaaaataaaaaataaaaagaaataaaaaagaaatataccaaaatgttagctggggtcttctctgggtagtaaagtgctgggggatattttccaaagtccttctttacattctctgagtttttccatgttcttcaatgagtatttaataagcagataaaaactaatacaacaaaggattttttctgtgtgcttttttgacctttggaggaagagattagagctagtcccataaccaggttatttgagtaggtctaacaagcccgtattaccagaaattatcatctggtcatttccagtccgagaacagaacacttggttgtcctggcatttcccaagcagggggaggagttctctgcaggaataaataagcctcagcattcatgaaaatccactactccagacagacggctttggaatccaccagctacatccagctccctgaggcaggtaatccatgatgttttacatcctgggagcggaggaatctgtttttccaggagagttttaggcagcagcctggagtgtgtggagtgtgaggggtaagcagaggccaggaggaggtgtactcaggtgttaggggccaggggtctgttcttggctgccactgattccctgtgccttttttagaggcatcctctgtgtctgggttttcacacctgcaaagggtggaggtgccctggggcctctatggtcatttctgccttgatacttacagattcggatttgagtcagctgtgcatctgaccctcagggaagaggtgctgtccccttgcctggagcagggtgcagctctcagaacatgtggcagatgtgattattgcagcaggtccctctgagcagaggccacaggcctcaccatgatttcagggtctccatggggctgcctcgggagctccacttccccaaaaggacccctggccaagtcgacagatgggctgtgtctctgtccagcaacagaaaagacaaactgctgggaaacagccagccctccaacttgcccaaacagaaaagacaagcctttgcccctgaaataattctggagaaaaatattgtctaacatttatccagagaaatgattgcatcagcctgagagtgaacagttgaagcaaacaaggtgcctctgtccctgggcttggccaaaggcatttccactggcctcccctccttcccctccttcccctccttcccctccttcccttcctttccttccttcccttccttccactctctcttccccttttcttctcctctctctacccctctcccctcccctcccttccaatcgcctctcttccccactcttctccccagcacccaagctgccccttttctcttctgaattctaggactgagtgggcggaggctgaaggtgaataatcttgtttgctgcggtcaccggcttggaactcagcccttccagggtctcttgtgcagtagctcatggctcttctctggcttgtagtttcaggaaaggggtagtatgggaggtggtgactgctcggtacgtctaatatgaaccaggtgccttcatcatttatctcacctgagccacttaacaggttgtgcagagacggaaacaggttgagagatgtacagtcacctgcttgccagtacacagcaatcaaaagtggccaaaataaaatcccagtccaagtctgggagactccaaagccctctctgccttctccccactaagaggcccttccaggcttatggtggacacagacaccacgtggcaacctggcaggggcagagaagaacatttgcctttctttggtcttgctgccaaccattatcagggccatcgaggctccagacactgtaccagggactttcatttccctctctcagtcgaccctcactgccacccagcatcacatcgtggaggcctgtggaggccacaccacgtgacatctagaggctgggagagtcactgtggcctctatctctgcccagggctccttcatccctgggttctactttggtggcagttgggagaatgaaggaagggagcccctgctttctaatcccctaggatgagatctgctcaccaagcaggagaggagcaggcattctgattggactgaacctcggaccccccatcagcttacagaccgaggagccaggcaaacctggctgcccactgggctcctttacctgtttgctgtatgatcttgggcaagccccctcaccgctctgtgcccggcttttccactgcaagaaaatggcaacaattatggtacctacctcaaagggtgaaatgaagcagagtgatgtgtgtcgggtgccccagagagcacctacctgagggaggctccaaagctagcaagaggcagcaggacagggaccaggacgcaggctgggtggagggcagtgggaggtggtcggggctccatctggccctctgagacttaaaggagctttgcttttcagagttgagaatggagagaatgttacctctcctggctctggggctcttggcggctgggttctgccctgctgtcctctgccaccctaacagcccacttgacgaggagaatctgacccaggagaaccaagaccgagggacacacgtggacctcggattagcctccgccaacgtggacttcgctttcagcctgtacaagcagttagtcctgaaggcccctgataagaatgtcatcttctccccactgagcatctccaccgccttggccttcctgtctctgggggcccataataccaccctgacagagattctcaaaggcctcaagttcaacctcacggagacttctgaggcagaaattcaccagagcttccagcacctcctgcgcaccctcaatcagtccagcgatgagctgcagctgagtatgggaaatgccatgtttgtcaaagagcaactcagtctgctggacaggttcacggaggatgccaagaggctgtatggctccgaggcctttgccactgactttcaggactcagctgcagctaagaagctcatcaacgactacgtgaagaatggaactagggggaaaatcacagatctgatcaaggaccttgactcgcagacaatgatggtcctggtgaattacatcttctttaaaggtgagtgtgcctggcttggggttcagaagaggtggatctcagggccatttctgtcctgactcaacaatggtgttattaggcaaaccactgtagaggagagtgcccacagcatgggggcagcataagcatcaaggccccaccctgcccataggcatcgccgtctcctgtggggtttttccaaattacagtttgtccttggaagacataattcagtggagcccatcagcctctggtctgagtcagtgtggtgcttttcactctgatttaaacttgtccggcaaacagaaagaaggagctctcctttcaaaccactccagggcgcgtaggagctagagctccctccttgcaggggtgctgctagactaggccaggaagtccctctgtctggatgcacctggggctcctgccctgcacatgtgggaggagcacattccagccaggggccttggtgtctggaggtggccaggtggggctggggccatcttcacagggcaagataatccccaaggagcctggccacttccaagattctatgattctactctgctatcatctttaattattttaaaaaatatgtcactgacacataacaaatgagggcagaaatggcattgttcccatctggggaagagcctcaagggtgggcagtatacaaaacatgaccctttgccagattctaactggtccagtgcccaatcccattgatagaaactcaaccaatgcaaacctcagcctgcaagctccgaaggggcagagtgcaagccggtagcttttgcctcctggagcccacagtccagatggggacaaaaaaagagatagggacacaaagagtgatcactgagccagagggtggaaaggtgcttaggagacatgagctgcttggaggcagagtcctgcttggaagctgttggttgattcctgggcaagccacttcccctcctgggcctgggttttcatctgtaaatgaaggcgtggatccagatctccctctaagactactccacgcctcacgtgccatttgttctctgagtttcccatgttctcgcctcctactacctagccctatgctaggactctcccctccaggacacagtagccagcctagctttcccctccccacctgcctctaacaatgggaaacaggcaggtggtaaacaggtgggcagtggaggtggccccatgtctccagcctcccctggaagctcccacccccctcattgttcagtgctctggtcctcctggagtggagacctgcagggcccctccccttcctctgttgacctctcctcactctccaggtgccagttttgctccctgcctcagcctggtttacatacagtgtatgtgacggggcttggtcactgctggggcagccctgtggaaggtggaggggaccgagcatgcatgagcttcaggctgagacagtcccagctcagaaccctggagtgcttgttccctccctttctgctcttcctcttccattgcacccactggacccaagagcatgcaaggattgactcacccagtgatgctagaactatgtattcagctgaaagtaagggggtgggggcatccaaccaggggcagaagatgggaattcaagaaaggaaggtttcccctagaaaacggttttcgtcttttctcttaaatccagatagaataagaagcgaaggccgttacagcagagagaaagttgagtcaagcagagatcagatactaaagacactagactaaccagacattcgggccctcagttgaacagctgaggatgtcagaagatgttaaggaggcaaaattggaaaacttggtggctggcagacagaaatggggggagatgggagcagatgtgagaagatttaaaggcttgtagagcttgggtggtgatttcatccaccaaacctatctctctccccattctggcatacaaggcagcagtcagggtccccagaggcagcccatctttctggcagggacccatgctggagatctggccagctgaaaggccccaaaggagctcggtgccctgggtaatatgggaaggtgctccatggcactgccctcacatggaggccacagaagcccctgaatggctgctgcaattggtaacggggacacctgttcaactgaaatatctcctaccctgagatgggtcctttctccaagggatctttacaattacatttgtccccagtcattccatgttgggaggctgcagggaccagagaagctgagatggtctttggggaggggaaaggaaagatggacagttattttggtcctagaaagcccaaaggtggggaagtgtcaagaaggaagatgagggcacaagagaatgtagggccacccagaagctggctctcattgcaattacagaaagaaaaaccaaaataaagaaagaaaggaaagaagctcccatttattgagcagctactctcaccagccattcacatgcaatacctcgtttaattctcgcagcggctctgaaaggtggatggtggtattgccatttgttaggtaggagacatgccgtccagaaaagcaaataattaaacattcaaagttgacctgggcccatttgaaaattccttttgctccctcattttaacccctaaagtaaagccgtttgtgactttatgagcttttaccaagcatctcctaaaaccaagaatggaggtgaaagattgtggagcccacaacctagagaaaggattgacaattttttttccataaagggcctagtagtatgtattttaggctgtgtggtccacatgagggcagattcttctttttgacttcctcctctgcatcttcttcatcttctctttcctcttcattttttttacaacctttgaaaaatataagcaccattcttagctttaggtacacacaaaaataagctatggctgtattggcttacaggctatagtttcctgacccctgttctaggggaggaaaataattgtacccaactaaatgcgtgcgaatcatgggcctatgtcatgattcccaaagaatgagtttcatggaattttcaacattttaaatattttactccattcttcccttgcttgcatagtttctgatgagaagtctgctgtcattttcatccttattcctttttagataaggtggagttttcctccctctgcctctacctctacctctttcaagattttctctttctctttactatggtaaataggcctttagtgagaggagttatgtcagcctggctaggagtcaggctgcatttcaggtttgtgatagctagaggtaccagaggcagtttcatggaattttacctttgcaacactgagagcctaggcagcctcagagtcagaacacccacagttgaatcctcagcctgacagacactgaatccagggcaaatcttagctgaatattcatggtctgtagaggtggacatgagctagatatgagctaaggaccatagccagctcatggcttttgtgatgtccaacaccgctatcctctaagatgtcacaagtgtccctaggcttttattcccatggtctctcctggctctgagttctatcttccattaaggttcttcctgttcctcccctcattcacactgattggcatctcttctgtctgccctcaccaactcacatacagaacccagtctctttcctcttatttccacccaaagccctcccacaagccactgttatatgttcacatccctgtaataccagtgagtaataattgctaatgagacatttttccttttatggaacaaaggctgtcccatttctcctcaggcaccagcctcccacatgttgtcatgcctctttcccccactttccctaaaccttctttctctcttgcactccttattccctggttcctattgatttctcatttagcacaaggaactaggtctttcttttgtggcccttttcccaatccaagcctgctgggctctccctcacccccaataacttttactcttgccaagctacttctctaaaccaaagcagggtccctcctatgagggactctgggcacttccactgctgcggaagcagggtcgagcagggcgacccttgcactcacaccttctccaactgcttgctccaccttcagccaaatgggagatgccctttgacccccaagatactcatcagtcaaggttctacttgagcaagaaaaagtgggtaatggtgcccatgatgagtttgcatcacctgactataccttacttccgggacgaggagctgtcctgcaccgtggtggagctgaagtacacaggcaatgccagcgcactcttcatcctccctgatcaagacaagatggaggaagtggaagccatgctgctcccagagaccctgaagcggtggagagactctctggagttcaggtgattcttcctggcccccaaagaccccacatctctccacgtcaaggtctcaccaatgtccagggacaagggcatggtggtgggagaactcatacagggacaggtggaatttacacttactttgccctatgctgcctacatggctttgggcttgatttttctttttcttctttaagacaatgacatcagacaggacaaggggctgaggcttcctctgactccagcatgttctaagtcatgagaaatcttctgcacagtcccaaacactcatgcatggtttctcctggtctcaatctcttgaagggagagagaaacagaaggaattgtgatcagttgagggctgcagtgagatggactctgagaatcagttctgcactggtgaaccactgtatttattcattctctcagcatttgctgcatgattaattgagcacctactatgtgtcagacactaatttgcaccctgagagtaaatcagcaaataaaacacaagattccctgccctcctggagcttaatttgtaattggagaggggacaggcaataaataaatataacaaataagttacgtgatatattagaaggtgagaaattgagtaaggggatagaaattgagtagaggaggatgaaaggatcaggaaaactggaactcgtgttagtttgtgattttagatagagtagccattaggtgatgtttgagcatccatataacagaggggaggggtggagtcatgttggtatattagggaaaagcattcctggcagagggaacagtcagtgcaaggcctctgaggtggaagtgagcttgatgtggtcaaagaagagtcaggccagagcagctgggcttccacttcctccatcttgtcttgatcagggaggatgaagagtgcgctggcattgcctgtgtacttcagctccaccacggtgcaggagcagagagagtgaggagagagttgagagaggtcaggagtccccaaaggggtggagcagcttaggtagggccacgtagacccctagaaaaccttgcccttcctcctgtgtgtgaaatggagagccatcaggaggtttggaggagtgctgcgatccgagtgttgttttaaaagactaatcctggctgctgagaggagaataactgtagagcaggtatggagtcagtgacacccgcaggaaccaggcacagacatgaggtgggagcccactgtggctgggatccaggagggagccatgcatgtgagaagtcattgagttctggataaatctgagggtagaggaacttgctgggacacacggaattgagctgaccgatttcatggggacacagtgaggaggagcagtagttccgggcccagaccctgcagtgggcccagggagtgcatgtgggcagctgtgtggggtagagaggaaggagcaccagccttgggttcagaccgtggtggctggtgtgacctggagcaggtcgctgctcttctctggagctcagctacctcctgaagagaaaggaatgtcctttccccaccacccctgttttcactgggtgattgtgagaatccggtgaggtattgtatgttgaagccataataaaccactaagggcaagggagctgcttcaacactaacctgaggctgcaacccctgccccaaccactgtccagaaggccggacacctctcgggattgcctgaccctcagcccctcctcactctagatcccaggagaccccagaacgtgggggtcctacccaacccatccgtttactcccagactccttcctcctttagcacctaatagccaccagggagcaggggctcagcagataattttgagtggaaagaattctccaaacacttttgatttacaaaatgctgaggaaacatgtgtccacacactcctggcccacagagaatgctcaatagatacttgttgaatgaaggatggaatgaacggacaaacacatgaatgaatgaataaaaatagaaataggacaccttcctccttcaggggactcagagtttaatggaagacacagcctcctgtataattgtaagaccaggcagacagtgacaggcatcttaagagggctataaactaagggagggggagtttgcaggtggcaggtgtgacctgggcctctaggagcttgctacctgctctatgccagcccacacctggcttgagggacagtgcccactggtgaggcaagatgggaacctccaattgattgtttcaggatccccaaagctcttctaacacaatcagactcttcagaggcccccaggccctttttgacctgcctctggctcctggcccacctcatccctcactaccctcctccctgaaacactgagatcacccaccgccccgtggagcaactcctcctgctcccaccttcttccaggttcttccacctgcctcctgcccacctcttcacctagctagctcctttcctgcctttgggactcagcctcaacaccacctcctacaggaagccctcctggtgcccccgtgaagcaggctgccatgcagccactgcagctggcccagcccaggctctcaacacactcaggggtccctgctggtgtgaaggtgcttcaactgcattgcaagctgcagggaaagggcagggccaggctcgagcagggccacaactccaggcttggtgtgctgcctggagactttcacacttgcagatctgaatgaataattaatgaataagaagagtaaagacaggggttaagaaattgaggaacagattatttattttccaatcagaagggggtgactgtagaggaaaccagggaagaccatgctgcgaggtgggaggcaggtaggtactgatcagcagaggttcagatactttttttttctcgttttctagagagataggtgagctctacctgccaaagttttccatctcgagggactataacctgaacgacatacttctccagctgggcattgaggaagccttcaccagcaaggctgacctgtcagggatcacaggggccaggaacctagcagtctcccaggtgagtctttagacttgggtcaattcatcctttgtatccgaacttgaattggtgaaggccagatggacttttgggtactcttgaacttgggttaatgcacgtgcatttctcattatatactcaccctgcttgggacacccccaagccaagaagagctaggttacagcccagctcctcctgccgtgttaggggttgagcctctacaacataatgtcatccaggcttggaatcagagagccatggacaccattccacactataccatttactatccatgggggcaaacaattaaagtcctccacccccagctttcc

SEQ ID NO: 61150 - DNA, 1965 bp, Homo sapiens
aaaacagtgctcattcgtctgtcccctgaggccagccaagggctctgctccacattttcccccatccgtggcctccttttcaaccattgctgattaccattgcagagggagaaagagctttggagagtctcagaccagccattaagtctttccccgagaagtgacccgggttgtacccactcacactgattggccagatcaggtcacctgacctacacaactgccagggggccaggaagttcagccgggtcccaggatgcaagagctaggtccagatgctcagcaggggatgacagtgtgggtgtgtcctgcctacagggtagcgtgcttgtgcgtccgcaccctggcttcgtttgggttagcactatttatgcatcctttgaccccatgtgagcccctcagggctgaaagcctgtctccctcttctccctagcagcgagctctcgcatcgatctgattgccagttacacagactgaaaagtcatcagatgtgcactttttctatgtacatattatactttaataaaaagttaatttaaaaatgggaaagacctactcactccagcagggtagaaatgcttttatcccagagtctcagctcttgggactggtccattcattcctcagatctactcactcacaaaatcaaaaagctgatcctcagcctgacagctatcgatcggtccaggaagcaggaccaagttagcctcagtcctcatccagtctccttagggtctctctgctttctggctgaggctggataaaggtaccgagtgggttaattgtgcggctacacagcgggaacctctcagatgcacaaagtccattaacctggcaacctgggcgaggagacactgtttgtctcccagtttgtgctcttgggacctggcaaacatctgacctctcctggatgacttttccagggtcagcctattatgaacgaatcctgactaattcggtcacccttccatttcttaagtatgatttgtggcttaattgcagcaggaaaaaaataatgagaagtgcacagcccaggccatatccataattcataactgcaataaaaccctcgacatgctgtcgtgacttatggcagacgtagtggtgtgcaccctggggccagcggagggcccagatgtttccgctgcagaatttagagctcacaggctggaggatccaggcttcccaacactcatggcaaagctcaatcctggttggaggcaaaaaccagagctttggcttagggcccagggactcaggaggggcccatgtgtaggctgcccaggaaagcagggtgtgttggaggcttggaggctggagacaccattgaggaagcaactgcaaagtatctcaaacctacagagccccttgccatcatcatacagcagggcgggtctgcaccagccccaagagagcataaggatgatatatcagttaagaggcgaggccatgaatgatagaaaacccaggtcaaatagcttaaactataaggggaatttattggctcacataactgaaaagtccaaagatcctcaggcttcaggtgaggcttgatccaggggctcaaatgacatcatcagatagaaggcgtcatccattcttctctctgccttgcacctctggtgccacacagtggccactcactggcagttccagggtttcctctcaggaagtcaaatggctgcgtgagttccacatcttacagcctcagggcaagaaagactgcctccttctgccaagcactgaacgaagttcccaactctcactggcacccattgggtcaggtgtccattgctaaaccaattaccagcagaggggtgtggaggagagcagagcacgctgatcaactggagccaagcaggcaagtgaagcccatggactccgtatacttaaaaagaggggaagggtagttccctagggggatacttgtttgcccaaaagaagcagaaccggagatgctaggaa

SEQ ID NO: 61151 - DNA, 2703 bp, Homo sapiens
gaacctaatttccaaagatatcaataatattgaaaattactattctctaggacctggcttatcccgaacccatcttttaataaactgagttttttggtgaggatgtatatttttatttagaaaacttaacgtttacaccaatacatattcaatatagctaacctgttttaacagcacatttttaacaatattttccgagttgcttaaatcctaacctgagtccttttccactgtttgaaaacaagcaccacgaagacacctgacaatcaggattgtaaagattcagaatattcgaagacagaagcataggcgtccaagtgatcctctttcatcagatgaatgtttttaaaacctgaaagtcctaagaacacttacttatcgtgtagaccagtaacgtgtccctttaaccacaactctctccacaaaagcacggagttaacactacacaaataggaccctccaactcatctccacgtttccgcggatcttcaggttcctaaggacacactcagtggtttgctggctctgacctccaggcagagccatcagggcaactcagcttttctggacaatctacagaaatctgatgtgctaacttaaaacatacactgatttccccaaaatcaaaaaccctgaagaaagggtcctccgcagggtctaggcattttggcacaaaaacatctgaggggagaggcaaaagaatggcctcggcccctgcccgccccccagggccccaatctggtcccctgacagtaatcacacaggaccctcccgggagggaccgagagcccagcttcgtcccctccgggcgcggcacagcggccccatcagaggagggccccagggtgctccggcaggtcaggcgcgcgtctccacctccgctgctcccgcgccaccttagcgcgcgtgacgggacctgtcaagagccccaggcctcgccaggccggggagtggacaggcgccggcatcccccaccacgccacggcggcccggaaagtctcccagggctgcctcgcggggaggcgccggggtccgggcccaggagcagagccgaggcgggcagacgccgggtccacaggccgcgctgtgcgggacgacgaggcaggcgaggccgcgcccttcgtcagcgcccgccaggcccggacgcgcggctcggggccatggccggcacgcgggcctccgcgcggaggcgggagcgcggccaggcgacccgctccccgccccggacacaaagctgctccgcgggagcccgcctcacctgcagcacggggcgccgcgggccttcgagaaccatcggaccccgctccggcgcgcgcgtcacagcccaggcctcccggagccgcccggcgccgccgcccccgccgccatttcctcgcgctcgccgtcgcctcgtccccgctgtcaggttactccattcacctgggcctgcagcagcctgcgccgcgcctccgcctcgacccctcccgccggcgcctgcggagactgcgcagcgcccggctggccggcagccagcgcacggcccgcggcaacggcgcacagccgcttggagaatcccactggctcccgcaccgcccctccgcgcccccacgctccgctcgccccgtggcggcatgagagcgagcctgtgattggacagggcctggcggtgaaaggttaatcccggccccccagccactcaggagcagggagacagcgggcgcgcgcgcggaggccggagaggcgtttgcggcccagcgcctggactggaccttggcgttgggccgcagttgcccggagtttttggggcccccgggaacccgcgcgccgaggccggctaagtttggcagactctctgagctctcggaattcgactgcctccattgttgctccttctggcacccacagaccgtaacgtggccgtaattgtttcccggagagcttagcttccctctgagcacctccctcccctttttaaagtaccttcccactcgcctgcgtttcctcgcgttagtggtgcaggggcctccgcatttggggaaataacaaacacccacttccgccccccaccccaaccgggatccccagataatgagaaatagatggtggccctctgtttgtaagctgttcatttgcataggtcggaaccgcgcaccacagcttgaagctaggaattaaaatatcggtgggaattaaataagtggctggcttaaagaacatcttcttaatttatccccaaatgtagacatctcttcagtggaccccctgataggccggtttgctccaggtgaggtgtgctcacagcaactgcaaccgtgtttctttcagaccatgggcgtgagcagaacctactatgcgcccctgctgcctgggctgtgctgttcagtttggggccaccagccccacatggctcctgagcacttaaagtatggctagtcggaatcgagatatatgcattctttaccaaataatgttcaaaaaattgttacatgttgaagtgataaactttttccatatattgggataaaagttttatttgtttattttttagtgtgggttctacagaattttaaatgtcacctgtggcctgcattatattgccattgggcaggctgatctagggcttgcatgcctgtgatccttaggtgcaccctgtgaggtaggtgctttaactgtgtgcaccctgtgaggtaggtgctttaactgtgtgcacattgtgaggtaggt

SEQ ID NO: 61152 - DNA, 803 bp, Homo sapiens
tgtgctcaaaattctccagtggatcccagttcactctgggtaaaggccaaagcccttaacacatcctacaaggccctacctggcctctctcctctcactcaccatgcattcaccaaaccaggctctttgctgttccgtaaaaaccccagccatgatcctgcctcagtgcctttgcactggctgctccctttgcttagaaaactctttccccaggcattcaaaggatctgtccctgcggctcttttaggtctttagtcaaatgtctcttgctcaaagaggtctttcctggctgctgtatgaacctggtggcacctcgctgtccacccccaatctaccttccttccctgcgttttcttatagcactgacgacatactgtgcatcttaccattattttgtttctgtctgcctcttctcactagacggtcagctctgggaggataaaaaccttgttttggtttcctattatattcgcagcaaccagaacagtgctgatgccaagtaggtgtgtaataaatatttgttgcaccaccttttatttgctctccctctgtccccatcttactcctgctgcccttggttgcatcccctctgccctcaaatgatgcaatcatcacgtcagctttggctcaggctctgtcttctgaggacccctggcaactacagtaacttcctggaggtcacacagctagtaaaagacagatctaggattcagacctaggcagtcccactccagagctgcatagctactactactattattactactacttggagcattacaaaggctctaggcaagttaatg

SEQ ID NO: 61153 - DNA, 1108 bp, Homo sapiens
aaaaactaccttcgtaacctttggatttttaaacttagaaaggacttttaaaagaagtcttcccacttccaacccagagaggtaaattcaaggcatctgcaggtgagccacagctaggacgtgggttctccatacccataccagtgttggcctgctttggacaatgtcaactctccagacaacaggcactcccagagtttcctttaaaaaagtgtctaaatccttgcatgacatttagcaatactggcattctggcacagcatgggcttgtagagaatacacacctattgatttttgctggggctaaaggaagtggtagctattgcaaacagaatacaagtatcaaatgatattttgctattttgttttttgtaacaatgcaaaaatcactacttttaagcttaaaatacaggaaaaataataatccctgcctcagagaccaaccagttatgaattcatccaagtaattcgtggtctctacttctccattttaattacactgccctcaggccttctctacttttctttttgaaggagaaagcccaatttcctactctgtgaagtacgtgttagaggtgcagagatgagcagctgggggcaggatgtatagttaattggaggccctgaagaactgtctttgatgttggacactgagattttactgcaaaagaccctttcaaggcggccattttggttgcaaatttgcaactgcagtgaagtttagagtgtttgaaaataacagtcctatgttcccagttctgctacttactagttcacgctatgaccttatttttctgtcctgtgctttagcttcctttccgaaataaacacctcccacgattgttctaagggtcaagtgagttaatgagtaaacaatggcttaaacttcctcttgcaaaaaggcctgagttagatttgagacagggtagctcagaaaaaagtaatggattggagagaggttggaagaagctatggtacactaagggttagggaaagaggtatagtcaacgcttgcttcaagaggaaggaaatagagaaaagggggctgctgggcatcctacaacttcataaactttcaagaaaagtatttttcatccaacaaatatgt

SEQ ID NO: 61154 - DNA, 1463 bp, Homo sapiens
taagcggctgcttttgttaggacagggagcactagctgtcagcatcacggctcagctgctaaatcatccagccgaggtcctccccagtggcggcagatgtttctgttttctagccaagagttttgtggacagttatcccaggtcgaaagagagaaagagagagaaagagaaagaaagagacgtctgcagaagctaaaactctgacaaggttagctctacataccaggaataccatcacagccaactcaccctgaactgaagcacactgacgctcctccaggttgggggaagatggcattacaaggcaaaccagtgggtcagctccaccaggtgtgaagtgccaggccacgctcatggggaagtggaggcctgttcttggctgggctccagaatcaaagactccccgtggaggcccaccaaggacacagcagctggtgaccagggctctggcaataaagtggggagcctctgtgctgggagcataaacaagggactagaaggtactttttcaggaagtcttttggggaccgtgctcatggcgaggcctctaagaaaccaaatactgttgagagttcatcactgaatactgcgtagccctctgcgggtgccgctaataggtatcttgtgttttgccattgggaaagcaaaggtgggatggttaagaggtctgataagataccagctacattatatctgagaagagaagcagggactcttgactttagacctacagttaaggacagacccaggacgctctgtgctggctgagctatggtttggtagagttgtgaccccgttgctgcacctctgttttagttaggcacaatgggttgccaaggccaaatcaaacagtggactctggaacaggctttctcaatcttgacacttctaccattctgggctggatcagtttgccccctcatggaacatttcatcatgtctgggagattgttagctgtcacacctggaggtgatactgttgtttagcagttagatactaaatgtcctgcaatgcacaggacatcttcccatagcaagaaactatgtgacccaaatgtcaacagtgccaaggctgagaaactctgctgtctgtgaagagaacaagggccaatctgcacacagcagagggatgcaacatggagaagtctggctaatgtccaaagtggaatgaacgtcaagaccagctggctcaacttcagtcatacttaaaagaatgttctagaagccagcagttctagggtgcttagccttagggtggttgataaaaggcctttctcttccaatttttccacttctcagcgatgattctagtttatataatggctggctggctaaattttaactgtttagttctaatcttaagccttaacagactcaaagaaaacactgggcatttattcatttattttctaaaatacattggcttaaaaaaaaaagtactagttcattccacatgactatat

SEQ ID NO: 61155 - DNA, 1016 bp, Homo sapiens
ggcacgggccaaagaccttggcacatcgtaagtgctcaatagatgcagccgtggctatgattgctcattttggacaagttactggactaccctgtaaaatggagataataactccctcctggggctgttgaagagacaatgaagcctgtgcacgccaggtgcaaaaaagttgtgtagtaaacagactaatctgttcttccaatttacagcacatcacggccatgcacagaggccctgcagatgggcggagtgcctttcgcaatcctcacaaagccaagcgcctttagacaagtagacccggcacctgcagaggctgggaggaggcagccggagtcagagcttggggcagcagagaaggtggatcccacctgaaccccaggggttatgtgtgtgtgtgccatggggtcacacactaagcgctgggacagcatggtcacgtggcagagagggactggctaccctgggttctctctgttaccactgggaggatcatttgagagcaaaggtccccatccactgtccgggaggccaggagagggagggtggcaggaggcctcacactttgcaactttgctccagttttgtgcagagggaagaagaccttggcacccatctgctcccatgccccaggtgtcatttcccaagaagcccagcgtctcacagccgtctcggcaccagaggacagccgcagccccatgggtggcaggctctggaggcttctctgatgctccctggtctagaaatctcttgcccaaccttttatataagtgacctcccgagatgctttacatgcacttgctcattcttggtctgagctgacctctgctctctgggaaaccccttctcctccttgcccaaggattccttttctccatggctcagattctttctaactgcaagcgtccttggctcacatcagccacgcaatctcactccatcagcttgagcgagcccctgtggatctttaaaccagatgaaaaaacatctttcctctcttgagccaagtgaggcggccc

SEQ ID NO: 61156 - DNA, 1592 bp, Homo sapiens
tttgaaaacataactaaaattcttaagaaaatataaaatgccaaaattagggcaagaagaattgggaaattttaaataaaccaatgaatgttaaaaacagcaacatagagaccttgactcaaatatttctgatccccatcttgcagctgtgctaaccaaggcacagagacgttaggttacccatcgaagaaatgagagcgaggtttgaaccccaggcctggccctaaagctcacatccctaaccattacacagtactgtccgttgacctcgtccctgaccaggacaccagatgtcactcatagcatgtcccagtaaaccacaaggaaatcattagcagaagtattccaagtccttccaaattaggtcaccaccccctgcaatgctgcctgccaccttggagggtccctctgcagatggatgcgtgcttttggtggttatttgcaatttcaaatattttagtcagttcttcccttctgcaagggaagaatcctgtcttcaaagtctaaatgccataaaagggcttccctgcataaacaagcctgcagtggggggaactggaataggaaacaacgtttttatcataagcttgcctgtatattttttctaccataagtatatatttgataaaagttttatgttttatttacaaaaaattactatgtaccctgtacatagtgcagcatttctgatcttctgtcttcaacaccaatcgggggaaatatttacaaatgttatatttgacaagaaaattttctttgtacaaaatgagtgggtatctacagtagaacaaaattgaaaattacaacagaaaaaaaggcacatggattaaattattctatgacaaatgatttcctttcattcttccttctacgtttgttgcatttttgatggcttaacactattttgaccacattgtgtgtgcaccagtaaggtatgctgcatagtggacacagctggctgcctgcccaatatcttttctcgcctttcctgaatggtagccgttgtcactgctatttatcttgcttcctcttcatcactgcatgttgagcagataacttgtcttttagttgattagcacaaggaaccagacacattcaaacctggtgggaaactggcacagtcctgcccgatcctggactttgcaccctagctgcaataacataatgaaactttgtagccctctcccttgggaagaaggtgagtcatgtctgtgtattggaaaagggtatgtacaaatatcttgggaagctaatggggtggaccgagacagatgctgctggttgcctccccaatatccattttccccttctttctaacaaacagaatcccaatttctttccttttctttttcttttttttttgagatggagtctccctctgtcgcccaggctggagtgcagtggtgcgatctcagctcactgcaacctccgccttccggattcaagcaattctcctgcctcagcctcccaagtagctgggactacaggcgtgcaccatcacacccagctaattttttttgtattttcagtacagacggggtttcactgtgttagccagggtggtcttgatctcctgacttcatgatctgccc

SEQ ID NO: 61157 - DNA, 1273 bp, Homo sapiens
ggctgctcagactttatgccgctttgcgcacctccgtgaaagacgagcactgattgtggagacacaaatacatttcagagagtgggtgaattcccggattctgtctttgtaaactggtctactctctaaaatggatttgtagctacaaatgtcatgttactgccatggtttttgcatttttgtagtttctcctgggcatcttgctatctaaaacggccctcaggtatagtgctgaagtgcagaaaggctgcaatattccctgcagagaaaatacacttatcagggaatggaatggaatgagcagtcactctcagcagtgagagtcaccagttttagaggacctgtgcctctgcattgcgacctggagaccacacaactgctgtcgggaaggatggctcttccaagcctggccttcccaagatgcccacaggtccacccgctcctctcatctgcccattgggcagttatgccccagatgacatggggatccccacagcccatgcccccctgcagcaagaacctggaagtcatcactggcttctgcgtccctggcctctatgagtatccatcagcctcactcagagggaatgagtcctgacaacctgcgagcagctttgtcccccagatgcctgtcctggaaatttttcctccaagcggcagcttggctctgggctcaggagggcccgcatcaaaggcctggctgtgcctggctgacaggcgctggggctgggccagcgtccacgcctgtattcccaaatgctcccaaacatcctggcaaatcaatctgaactctccacgtgtctccccacatcgtttggacagccagcaacccgatgtcatcacctgttcaaaagcattaaagctattctcagagctgggctccaggggactctcactgagctgatgttttctcagagccctgtacctgcgctggggttcactgagtttttggcctggctactgaaaaccactctgccagctgttctgttcaacagaagaacaacaaaataaatacattcccagtgaccagaggacaactcagcaagcagcgacctgaaaaataatctagaacaagcaaagagtcaaccaaaagatatccacgtgacatttatgaaatgcctaataaaaatagctaccacttctgcagcacttgttatgtgtcaggcaggcactgtgcttagggctttagagacagtatcgtatccaatcttggtaagttcaaggtagggcctactctttttcccatttcatttatttatttatttttgagaca

SEQ ID NO: 61158 - DNA, 2550 bp, Homo sapiens
ggtctcactctgtcacccaggctggactgcagtggcaccatctcagctcacactgcagccctgacctcctgggttccagcgatcctcccaccttagcctcctgagtagctggaactacaggcatgcatcaatatgcctggctaatttttgtaatttttgtacagctaggatttcactatgttgcccaggctggaactcctgggctcaagcaatctgcctgccttggcctcccaaagtgctgagattataggcatgagccactgtgccggacccctgcatcttattttaataaatcctcagccagccttgtgacctcggagtgccagaactggattcgaggccccacttagcagctgtacaaccctgggttagtcccgtaaaacattcagtctttaagctcagggagaatcacaaatccaccatgctcagtacagagggctcaataaatggctagtgtgtttacaagaccacagaggcgcgcagaagctaaggttacactactagaaaatgaaggaggaaagactcacatccaggcctcccagggtccatgcccttcacaggaaagcccccacttctatgagcatgtttagaataaacacagtgtgatggttacttttatgtgtcaacgtgaccaggcaatggcacccagagatgtggtcaaacattattctagatgtttctgtgaagtcgttttttaggtaagattaacatctaaatcacactttgaaggctgggcgcagtggctcacacctataatcccagctctttgggagggcaaggcaggaggatcacttgaatccaggagtttgagaccagcctgggcaacatggatctaccaaaacaccgtcagatctcatgataactctccatctctaccaaaaaaaaaaaaaaaaattagccaggtgtggttgcagtggctcatgtctataatcctagcactttgagaggccaaggcaggaggactgtttgagcccatgagtttgagaccaccacatgccaaaaccctgtctctacaaaaaaaatacaaaaattagccaggcatggtggtgcatgcctgtagtcccagctgctctgggagggtgaggctgagagggtctcagcctgggaggcagaggttgcagtgagccgagactgtgccacagcactgcagcctgggtgaaagagtgagactctgaatcaaaaaaaaaaaaatccccagctgactttgagaaaagcagacggccctccatcaaatgtgggtgggctccatctaatcagttaaagccttaacacaaagcgtgacctcctctgagcaagaaggaattctgccagcaggtgccttcagacttaaactgcaacttttccttgcgtctccagcctgctgacctaccttactgactttgatctcgccaaactccacaattgcataaaccaattccctaaaataagtgtctttctctgtatgtagactcatcctcttggctgtttctctggagacccctgactaatatgcataggtatgactcctggcacagtgcgtgctacaaagaggagaaggcactacctgtgaatcagaccatctgtgagtatttgcaattgcccaaccatatcaatttctcactttcacttcctggtgagtcatattccgagcagctggctaggatcagaagaaacaaggcattcttttcatgctcagacagagccctgttgaacgtttaccttcctgaagaaggcagaaagaggaagggcctcctagtgacattctccagccttgaggaagaagaaaattctgatttaatgagcttgagtttgaatgtaatcagattttctctatagcaacagctccacaacacaatcctcttggcagctgcaacaaccagccatctcctgatgaaaccagacatctcacacacgggccactggagaagccaccgtcgaggcacaagatgccagaggatgggaccaccccacctggtcatcagctttagatttgagtgggagtaagcaggtagtgccacagtcctttgatttgggaatttacaaatgcgtatctaaaagtatgcttcccctgaattgaaagtctttcctctaagatctggaacgagacaaggatgtccactgtcattacttttattcagcatagtactggaagtcctagctagagcaattaggcaaaagaaagaaacgaagggcatccaaatggaaaacgaagtcaagttatccttgtctttaaatataaaacaacataatcttgcatttagaaaaacctaaagactccaccaaaaaatgttagaactgataaattcagtaaagttgtagaatacaaaaccaacatacaaaaatcagtagcatttatatgacgaaagcaaacaatctgaaaaagaaatcaagaaagcaatcccatttacaatagctataaaaatataaaatacctaggtatagattttgccaagtgaaagatggctacaaggaaaactataaaacactgatgaaagaaactgaagaagacaaaacaatggaaagatattccatgttcatggattggaagaattaatatattaaaatgtcaag

SEQ ID NO: 61159 - DNA, 1638 bp, Homo sapiens
ctgctgggctccgagctgaccacgctcttctgtcaaattcttaatttcttcctctcccaaagggcaagaacaatttaaaaagaaaccaccttggaaaaagctttagctggccagagtggaacccgggctgtgacagcgtccctggttactgatgacaacattcacccacccagctgagcctgggcgtgagccttcctgtctgcctggggcttggctcgccatccaggaaaccacctgttgcaggcgcctgtgaaatgggagccaggcagcctagccatggcgatggcctgtaaacagatttatcccgcccacatggagccgcatccctgcagctcctgcgtctcggggctggctaatacctgggaccgcatgctgcctgtgccaaaaaaacccagacacacatcctcctggaaatatcattggccacaggagctgtttctcatccccagagctccaggttgcaggtgcggctggggattatcacttctgcaaataaacaccaagcccaggtgaaagctccaggagagacggagtcagactggccccagcaaacctcgctggggaatggggagccctgtcctcctccttaaaagtgagctgagcgtacgttattcagagccccatagataaattcccatagcctgtgacccaatatttccacatctaggtatctgtcctctaagatcaccagaaatggggacaagaatgaacgtgcaaggaggttcagcaggaggtaccaaaaagcatgcaaagctggagaagccgtggatggccaacagcagttaagtcagccacagaaagaatgcgcatgcagccccaaaaatgctggttacccaacatttaaaacatgggaaaattctgaggtcagaacacaaagtgaaaaaaaataggatccaaaattatatacatggtggactgaaattgctaatggcaatgacaagcatttattgagaactgactgtgttcctggcactgtgccaagggttgacgtgttcccacgtcctcatctggcctcactgcaagcccgagaggaaggtctgacttttgggcctatttcacagatagggggactgaggcatggagagaattcagcggctcactccacacaactacacgtccttaacaccctctacaccatttatgttaaaactcgacacattcacagggaaaaagcccaaaaagaaaatgcatcaaaaggtaaatggtagtcatttctgggtggcatcatttggaacattttgtatttttccatattttatacagtggacatgtactacttttaaaaccagaaactatgctatttttaaaagtctccagagatttcataagctcccctaggatggtttaaaataacaacacaaacaaacaccagtaatgagatctgccccccaagggtcccccacccccacccccacccccacctccaccccctgcatcttgggtcacaggctccatggccctccaggaggtgtaagtaaaagccttactgtctcccttattgatttttgtccttcctctaagaaatgtccttgaatttaaataacttcaggtcaaaagcctaagcaagctctgccctgcacactcacggggaccgacggtaccctctgacttcacctgctctgcagattcccaggctgg

SEQ ID NO: 61160 - DNA, 1524 bp, Homo sapiens
tcctgtccaacagaaaggccctggagacagacctgcatccacattccggctccccctccctcacctgtcccttccgagtcacatgatcttgggaagttacctcctggtctctaccttgtagaaaagggcacttattttcaggtgtgatggtgaggattaggataaatccctgtgctagtctcctttgcacacccctcctcctacttcatcttcctttctctccctgccctgtgtcctgggggcaggtcctccacaggttgtgtcactgggcacctggtcttctggctactcactgggtttggccaatgggaggcgctggcaggacaacgtggggtggaggggccacatcacttattcctctgctgcctcctactcttgctcccgctccttagctgtggttttggccagggctgcattcttccacctgggcccccagctccagccagagtgcccctcaccaggcgatagctttgtggggctcctataattcagccccctcttcttgcccatcaggcctggcaatggtaacagctccctgctgctgggagccactgggtgctgcaccagcccttgctggtggccttttcctgccccatctctgtaaacagcctctgcatcaaaccctctggactcactccttggagtttcctactgggctcctgcctcatacgaccctataataagctcgatgcaattttagtcatgattacagggtggaggccactgctcctggggaaaatgtgttcaggctgcaatgcacacaagctggttagttcagtctaatcgaagagggtagccactggaaagggtaagcaggagacttcagagccattggttgtgaaggcagagctatccttcactcaacaagcactgtgcttcctgcatgccaggcattgtgccagctggtaagaacagagaggtgagtaagacgcaggctctccctggggggatagcccagcagaggcagtagatatactgtatgaacaggtggctgctgcacaggggatacgtacggtaagagctgagaatggcaagaagaaactctgtcagtctgcccgggggtggtgtcaggagaggactcagaagaagggacactggactagccctctttgaatgcacagttttctgggctaaaagagcacttagagcaaaagggaaaacatacacaaaaacaaaggggtgggagaggcccgttgggacaaaggtcagtgttctcatgttgaccaaaggaccaggccacttaaagtgacaggtggccaatgacagatgaatgacccacaaacaagtcaagttcggtcctacctcaggacctttgcacttgctgttttctctgtccaaagtaatgtgcacccaactgtttgcatggcgtcatctactcttcattgttcatctcctcagagaggctcccccgatcacaagtagcttccttggtttcccttgttgtaacaaattgccacaaatgtggttgctgaaaacaacccaaacttatcttataggttgggaggtcagagcccaaaagagtct

SEQ ID NO: 61161 - DNA, 1837 bp, Homo sapiens
gctctgattggaaagcagcctcccgtctcccactatggaggtggcccagatgctcagtggggcacggtgtggccactccatgggcaccactgggttagctctgggccaggctcccagaggtggctgagaccacatcctgcccccaaagggctcacacccagtgcgggagtcaccacagtgtgacaatgaagtggcaccccaaagcacatagatgagtaaaacaaaagtcaccccaactctgtgggctggtgtcagagccaacctgtggagcctctttggagctgagcctgttttaaaagaagcaaatcacagaccttttggactctctgataacgccccagtccattgcttcactgaatggaagaaatccagaacctgcctccaacagcaaagatgtgaccatcttcacctggcagggcacagggctctgtgtattcggtactccagatcaaaggagacctctaatggaaactttgttagctcagggcaatagagcatgtccatgagccacgctgctgcctacatcggcttctgggtgagttgttccctctgcaaggaacgttcctccccctcccatctggctaactcccatttattcttctcatttccacttaaaaacactaccttctctgaacagccttccataaaacataatgcagggtccccttgttagatactctccctgtagtctgccatcacagccatcattatatcccgatgagaccggggggactgactccctgccatggagcagagactaggtctgttctcctcacttctgtatccccagtgcctgggaaagagcctggaaccgagcagacgctcaataaatatttgtaggaagctgctgttgcatgaagttaactcaggaatcagaagggctctggttggtttgacttgaaaataggcaatattttagaaaatagaaataaaagttgcagattctgcacctgatgcactaagtaattttccatgaagtaactttccaaaagggtcatgcactattgtgtcactttgttggattcttcccacaactggagagtatcgggttataatggacacaattcacagaacagctattacatcaactattgattttccaagggccccaaagctgaagctgcacatcaaagagtcttttgagtgaaggcacatgtagttcccataattcttgtgtgtccgagagtggggacagctctttggagaaacacagctcccccttcatttgcctattaccctaccagctctcaaatgggcagtaccactcccaggtggaaatgcggggggaatttttgactgccacatgactggcattttgtggactcactcaaggatgttaaaacctcctgccgtgtgtggaacatcccactcatagaggaccatcctgctccaaaagccaggagtggccaccccacactcacacattgagggatgctggcctccagccagcctaggccatgtccacagggtgaaatggctgcaagggaaaatgaatccaaaaggtcacttcattattaatgaggaccccctactccctcatccccaggtctgctgcccacccaggatggaccggtcaccttcctgaacaaccagcacattcctgcccttgcatgctggctcataccaacctactaggtcacctggaggccatccccaccaagccccacctacttgagcctccacccaacgcaaagtccttctataggaaactttcctggatcactcaaccccaataatctctcccatctccaaaaaattccagacctccaaccagacaattcacttagtacgtgtcaactactgctgtgtactctccacaacatggtccctgagtgca

SEQ ID NO: 61162 - DNA, 1470 bp, Homo sapiens
tacatgcatgttatttagagacatggaagaaaatactaaaatcatcagcttaaaaaacaatgcaagccatatcctccagggaaaggggctggggtctcactgttttccatacaaaccttaaagaaaaggcaagggaatggggaaacaggcattgatgaagacatatgacctcactgaatgttctagcaaccaggagaagttggggttatcatccctttccaccaaaaagacatggtcgggctcacagctacccacagccagtcaatactaaaaacaggctcaaatccaactctgccaaacccagcatccacactctccctttgattccacattcatgcattcaacaatataaactgagcactctctaagcctgggtcacaggggtggccagggcagactccagcacctgacccagtaggacttctggtctacctgggcaaacccacagtaaacaagccatcattaacaacaaatccaagtgtagcagtgcctaccctacacagcctcaacctaggactgcagcacttatctgattcctgctgttcctcttcctttcctcacccactccacaatccctcactgacctcatggcattgcgatgtctctgtcccctacgggtcagcaatcacgtgccacttcatggcccttgcccaaggtactcctgggaactcaatacaggccattgcccggggcaacctcctgctttcggcacccaaggcccttggctttgaatcgggaggtaacacgtttggtttgttttagatcagagttaaactcacaggccaggccagctctctcttggagagagccagctctccaagagagagctccacgcttgtgtacatgaaagaagaggaagcagcctttgtagaccggcctccagaaaggcctggtgagtctagggggctgcagcaaattcctggagatatcacagtgtgctgtgaaacctcacatctgctgctcactcgctgagaacagggcaaagccacggagcccctctgacctcggagtctgcatctgtgaagtaggggccccagaggtttacgtcagccttaaatgacataatggggatggctccgctttatcatctgccatcaccataacacaacacagggacaagagggtggttcccatggctgcctctgctcacttctgccatcattcaaggttatgagaatttcatctcctcaatttcttcagatccccactcttttgagatccaccccggggaatcaccaggcagaaatcttcagtcaagaagtcagcctttactttgttagttcaaggaaaacctggtgtgtaaatgactctaaacagaaccagctgggccactgaacagactgtgataaggctcagcagcaaagctggctgacatcttgcccaacatcctttagctgggatccagttttctttctgggttccaagtaagtcaattgtcctctctagcaccacctggtccttgatctagtg

SEQ ID NO: 61163 - DNA, 969 bp, Homo sapiens
taatcccgcgttcagtcaaggagggagagggaggctagggaggttggaaacacagacgacatcattcaacagcactgaaacagtgaggcaggattaggacttttctttcattctttggcaactgaagtcccttgtaagttgcatgtctagcctgggactttcgatatgtgatgtaataaaaccaaaagtcggaaactgtctataaacccatattttaatgatgctctcttgttttctaaataaactgtgatatttcacatcaagtagaagattgtttacccaacacaaccaggactcagcttgctctagggtaacggcatttccagggttcatggatctccactccaaaagtacacaaggattagaacagagatgttactgctgccagaacatgttcagtcccaaaatccacacaacagcgtatgcaactagaggacacgacgatgccaccctctttgtcccagggccacagggcatagatgagatcaccatgacacaacgacaccaccttctctggcctcctaggtaaagagtctgttggctcaagccggactctcccttcctcttaaagcccactcctgccctttgtcaggaagcctccccgagttctccagccaggtggtggcagccctatgaccacagccctggtctgtgcactctcagctaaagcttgctgcccccaccctggtctccaccaaactcacagagaaacctacagggcagtccagctgtgcaaatatctccccaatgtgtctcttctatggaagcagagaaggcttgacagccatttgttatttacttgcgtatgagattcctgtggctgctgtgacagattaccacacgcttagtggctgaaaacaacacaaataaattctcttctagttctgaaggtcagaagtctgaatgggttttaccagctaaaaccaaggttacaggcaaggttccttctcgagattccagaatccaggt

SEQ ID NO: 61164 - DNA, 2620 bp, Homo sapiens
tttctgtcttcctctttttctacactgggctggatgatacatatttttggttttgtgggtacttctttgcctcaactactcagctgtgcccttgtcctgcaaaagcagctataggcaatatgcaaataaatgggtgtgtctatgtgccaataaaactttatacacaaaaagaggcagcaggccagatttggcctgtgggccgtagtttgcaaatccctactccgatagaaagaaagtaggaaaagaagacctggtaaggaagaaaaagtccattttttgatgctgcacttatgatttctgatgctgcctctaattccttctgtgactaacgcaatctaccactgtttaaacaaaaaaaaaaaaaaggcatggggaaagaaaaaaaatttataaaaaggtttctatgggaacagggagttcacttttaatggttcaatcacaaaaaagacaattactttatttttctctcttcttctcagacatagggcagatgtgatctatggcttgtcgggcagagggactttgtccagagcctcagctatttcagtgaaaaattaaatgccagagtgttccacaggtcagggagggcagtttatgaaatctgggcctcttgggcaaagggttgcttccctagagctgcagatctggtgagacatcccgcctctctcatgaggctatagggccagcaggcagctctgggctgctctgatgcaaagtcgtggctgctgacacgtgattctgtggcgaaacttcttcctaggtctgctgccaactggactgagggcttccctctccctgctgcaaagccatttgtgagatgggcttctgttttacctggcccctgaacactctcgttccttggtacaaacatgcctgggtggagtccagagccccttgtttgccctgatggcgggctggccactatacctccctaggtaccttcaacttgacagccaaggacaagccaagaatgtacatcatttaccacgtgtacttgtatagcaaagcttatgaaatgcaacattttctacccaggacacttggtggaagtgaatctccagcactccacagtgaaaagaatctaggatgcagccagcagtgcttagtagagcccagagtcacacaccagccatccactcatgcatgccgggctggaaggcagacggctttaggtgggcacctgcccaggcccaccactccttgaccaccttcccaggggtggatttgagccccagataatccaaccctctcattttgcaaatgaggaaactaaggaaccacaagggagagagatttttcagaatctcacagcgagtttgcaacaaagccaggaccctggctcaggccttcagcctttgggtcttggttgtggcttccgcagccgcacaatgctccacctggaaaggcccctcaagaaaaatccacaccatgagatagggatggagctggcactagaacacggccttttgcctgttgtaatcaggagtgaactcaaagcccgtggcctgaccccagccacagtcagaaagaaactttctacatgatgattcatcccttagaaccaggcacacagccccaggggtagtgccctggcaggcagttccttgacatgaaacctgtgcatttggttttctttgggtttttatatagaaaccttcagtgcacttgctgtgccctctaagagctggcggaggtgggaacaggaacggtccctccttggctccatcccttctctggctgctggataacggtgaccatggcagcatcccatcccactgctgtgtgctccactgctgtgtgaaaggaaggtctagagatagggaggtaaagatggagcgataaggaactggaggggtgggctgtgggggcaggaattgttggggagttatgggagagaaggttggtgtggcatcctgagccaggccacaggtgacctcgcacaacaggtcaaggggcttggacttcatcctgtaagccagtgcaacccagcctttttctcgtggtcacatgggaccatgataccatttgtcctgggatgggccaaagagctgcccaggcccccactctgctgcccttagctcatgggttgggaagctctgctgtaggtcacaaaacctactggtggctttagcaacaacatgctcgagtggctgggtggtgggtggaaagccgtaaagaagtcagtgactgcggagtccaagttcgcatgagggacacctgcacctgggcctgagccagtggaacaaaaggagaaagtgggccacatgggccggggctgatccttcggaaaacgcaggccctgccctgcctctgagcctgccttgaggggattccaatcatttctctcccttctgcactgtgcaacccagaacctacgcagtcaagtttctgcttggccttcaaagtccaggtccagaattacagcatcaaacgccaaaagcaccagaatgacaggggatggcccaaagcagaactgacctctgcaccgctagaatcagaaaattcaagctacagtctggctgggtgcccatgacagtttcacgctcctgaaaggcagagactagaaccagctttcattctccaatgtctgcaagatgctacgtgctcgacacacatgtgc

SEQ ID NO: 61165 - DNA, 2620 bp, Homo sapiens
aaaccaggagctaatcctagaggaatgcaggaacttgttgcacgaagcattggttagtatgtgcttattaaacactcaatggttgcctaagacagacaggtacacacactcacaccctcacagtccagcagaagacactaatgcccacccccaaacaggatgtcagttcttctcaggcaacaggatccaggcacttggcttattatcaaaagagatcactttcaacatcccagcccaagcctcctcctttaacacaaatcacagccagaagagatcagagcggcccagagcaaactcagtttccagtgtccaccccaggaggctccccagtccttttgaggtcacctctgccggcactgtccttgcccaacctaggggtggggcagaccctgggctcccaggaaacattcaatcaggtgtaatgtttaaacttgactgctcggccatcccccagcgctggggctccctaccctataacagtaaagtcgctgccctggctgggggagggcacccacagccccatcgcctctctgcccaggcctcccagctcgctcctagccactcctaaccttgaaccctctagaaacccaagccagcaggggaagcagctacagaaacttcacctgcacaggtcaatgtgggtgaagaagggccggaagtggtgttctgtctagttctgcaaagcccatatatgaaaaaaaagaagctggagatacagttccatgaagaacacctgtctgttgggtggataggttgtggaggggaaattatgggtgacttttttccttcaaatatttttgtgctttctaagtttccacattgaataaattcttttgaaagagaaacacacttcatgtgtggcaccgccatacccagccgctctccaccactggagtttctctttcacctcttctcagctacctcccaggtagaagccttggtcccagtgtcctgtgcccaggcagggtcggagttgggggccagcgtgggggaagggtggggctctcgccctctccccagttagagtcctgatcctgcaggggaggggcagctccctaagcaaagtggccgctggagttgggtgcttgcctgaccccaccgatccgatccgcacccctggccccgctttccccaactcaccccctgaagcgccgcccaccattcaattccccttgcctcgaaggtacttaggaagtgcgcgaactcacacacacacacacacacacacacacacacacacacagagtcgcactgtctcctcccctccctaacctgggccaccgcccccaagagcccacgtacaaacttctccaaactcgcagcggtgactggagggggtggtgacgtccccctaatgaaaatgcgagccctcgccccacaacacacacacgtgtggcgccccaccccctgggcaactgtaaacctggccgcggctggccgccctggggcttgggggcgggtatccaaccccagcctcccacctcgaggcaagtgacaggaacaacgagcggccggcgagcgggggcggcgcgggggagttgccaagtgtcggagcggcgccccgggccccccgagcgcccagccatcccggggcgagcctgggctgcgttaccttgcaggttctgcactcggatgtcgctaatctgcccgatgagctcctcgcgttggaaccagtcccactcgtgtgcagccatgaagcgcgggcgggagagcccgggccagcgcggcgcgggcggcgggcgcggagagcctggctggcgggcgcgcgagcggcacgcacccggcgagggcgccgcggagctggagtcgcggcgggcgcgggcggggcgcgggcgcgggcggggcggggcggggcggggaggggcgggcggcgcggtcggggccgcccccgccgcgggctggcgcgagcgagcgcggggcggcgggtgcggggcggcgggctcgctctcactcccccgtgcgggggcgggggccctgaggagcgaggggcgaggggcgaggggcggggcggggcggggcaggggcgggaggctgggtcaggccagcttgtgttttttttctttccggggtgtttgtaggttggattgtttggttacaaaccggctgtgatgaggcgcgggtcccggcccccagattgtgatgtctcagggggcggtgggccgggtgacgcaactgggggtgggcccgtgggtcccagtacctggtccaggaggcagcgtctccctcccgtccgggataagacaccccctccgcgggtcccctgtccactctggagaggcagcccccacttggagggaccaggacccgagccctgcccatccccgaatcctgggagccctgcgtggggagtgtcgagggcctgggtcggggggcaaactagtgtggaggtaaagttgtgggagtctccaaagtgcgggggggctgtgaaagaagggccttcttcgttggtttagatactaggagccttttccggtccagtaatgtgactccagcttctaggaaggaacaagaagcaggccaactcctaggagctggggtacgctgtggggtctctggccactgagtctccaagtgaccctctgtggggtcactggaaattagtgaaaatgccaggacagaa

SEQ ID NO: 61166 - DNA, 2722 bp, Homo sapiens
atcttggctcactgcaacctccgcctcccaggttcaagcgattctcttgccttagccttctgagtagctgggattacaggcacacgccaggacgtccggctaattttttgtatctttagtagaaaaaggtttcaccatgttagctaggctggtctcgaactcctgacctcaggtgatctgcctgccttggcctcccaaagttctgggattataggcatgagccacagcacctggccagatcatttttaatgttagccagaactaaggaagggccccgtttcaactgcaaaaagtccagaccagcagagttgagcttcactcctcctccactttctgggatctggtcccatgcgtgctacatggatgatctcacttctttttcatgtagtcctgcaaggtaggtactactgtcaccactttacaggctgggtggtgaagccacctgctcacagtgccaccgccagtgaagggcagagccaagacaggaatcaggtctgtctgtcaccaaagtgccatgttcttagccactatactgcactacagcctgggagacttgcagagccacggggaagtcacacgtggatctttctttctaggctgatccatgacctacctctcagttcctgggcaggtgagtgccgacccgaagtgcttgctccgtgggcttgtcctgccttgcacccactgcaatgccttccaggttgaggtgcgctgggcacacgcccagagacctttgcactgccgtttgaaaagttatttaatgagaaactttttgtacttctcttgtcctcttgccagaggcttctgtatacataactctgcaaactgctctgctatttgctcatagaagtcaagttgatttttagtctctcttccttctatgtagatccctctaaatagttctatggccatttccttttttataactatatatctttataactatgtcttcctttatttataggtgtatgtaggtgctattctttctcctttatttataagcatttcaacagaggaccaggatctgaagccaaaaagtgagaattatctgggtcttttagtttttttgttttttaatatttatgggtacatagtaggtatatatatttgtgtggtacataagatatatggatacggagaattgcctgtttattcatcgaagacctagaaaataattcacagagagcaggtcaggttcaatgtgaagcttccataaagtcaaattcctgctgcagaaaaatgtggggagaatcaaagttctggccctgagcctcatcagctctgagccttcgccctcctcccctcctgtgcagggggtggaaaccacatgggctttggcatcagaaggacggggactcaaattccagctctgccagtgtccttgggcatgttcctaaactgccctgatgatgtttacctggcaagatcttgggaggattggtgtcataaagctcacaaaggtcccagcacagaggccaacacacagatggtgcccaactctctttgtgggctgtgccttgactcccgaaagattaggtgtgtgggcggagccggacaaaggcacaatgccatgctgatccggccagtctgtttcctgcctggggcgtgttctctcacagcaaggccccggagagaactccaggaagagacacactgagaaagtgagcttttatggaccacactagctcacacccaattattatcatgatgaaatggttttcccaagggctggtatgaaagattgtagattttgtggattccttgctttggttttatttccttccaccaacttaatgatgggtcactttgctagtgacctgtcattcaccagccccaccttggtaaacagcagcaggatgtgatttttgagtcagtttctctatatgctggaaacattgtgagcggggatgagggagagggcagagattggtttgttcaatcaacaaatatttattgagctcctgataagtgccagacatggtgctagcaccagggatgtggaaatgaacaggtgcctcccctcatggagcttacattctcttatggaggctgaataagcaaataaaatgtcaggtagcagtaagtgctatgaagacatgtaaggcagggcaggaggatggagagaaatgaagggaagagatggtgctgtttgagatagagtggttaggaaggggctctctgaagaagtgacatttgaacaaggacttgaatgaggatgttacctatgtgaggaacagcaaatgtaaagacactgaggtggtgtattagtcagctattgctacaatgatgctgcataatacacatcctatgactcagtggctgaaaacaataattatttgttcttgatgatgcttctgcaggtccactagtgagcggctgatgtaggatgggctcagctgggcttgacttcaagctgcatatctgtgtctctcatcctctttgcatcagcaggctagggagggcatgttctcaggttggtggcagcagagggataggacaaacagaaagaagtgattcactttagggcctcacttggaactgacacaccgtgagtctactcatattttactgaccaagacatagcacaacgccaagcttaacatccatggagctgagaagtatactgtacctctagtagtaggaatggcaaatggcagagggcatggacagggagatgggtgaagaattgggaacatcagtgctgtctgccacaagtgggaac

SEQ ID NO: 61167 - DNA, 1106 bp, Homo sapiens
agcgtcattcaaccctcactgcatgcctccatgcatgttagctcatttcatgctcagagtacacctgtgaagaaagtcttatgcagccacactttttaatgaggagcctggggttcggggagaggcagtcccaggtcgaagatctacgtaactgttaaataataaagtccagattcaagcccagctctgtctgccttcaaaacctgcactttttccactagatcacccataaaggcaagctgcccttgaccctgaccatctgtaatcactaagcaaaaacacagcagagggtcaaggcaaaggtcaccagccaggggccacaggtcaggttgccaggcactccctctttatctccgtacactcacctgtggtggagtagacacagtgcaggctcagtcctgcagactcctttgatacttcctggtaagttcagcgccatgttgcctgaggctcttcacatgttttggaggaaatcttggctttggagccctgggttcaaaccccagcttggccacttgctggctgaagagctgcgttaaatctagtttactcatctgcgaaataggcataataatagtaacatccctctatgggtgatgggagatttaccaaagactatacgtagttgacataacaatcatcagccctcgataaataatggcgttttgctataaataaaatacaagtgtccatgtctaattcacaattcacataaaagccagacccgggtcagcttacttaaacaacagtgtggaaagttgttggctggaattttcttcagggtaactgaagctgaaataaagcaatgtgatttgggttaacaccgttttattggtactattgcctaagaaatgaaaagtgtgtgtttggttattttgtttgttttttgaccctacaaatttctagaattccattacacatgatgcaatttgatttccaacatctgcaaatcagcattcagctttacttcctatttcagccagtgtgggagagatttttttgatttcttctgagcaagaatcatcataactattttcccctcccttttctgctgacaggatggtcaaagaataagctgtgtgtatttttccctacaagtcactctg

SEQ ID NO: 61168 - DNA, 715 bp, Homo sapiens
aaactgcacgagcgatgtccttgagcatgagttgacaaacgcttctgtgaaggaccagagtaaatattttaggactttgtagcgcaagaggcaaaattaaagctattttgttggtacttacataaccatgtaaaatgtaacccacttaaaaatttaaaaaccattcttactccttgaactgtgtgaaaactagtggcagctagatttgacccacaggtctactcctgtccgaggcgctgagaatcaaaacaaacaagtagacaaatctgaacttacgaaaccccaaacaggagcaaacacaagaaggtcagtgccagcagccgagagcacagaacaggcagcaaacaaagagccatggcggtgttgtgtgagaagtgcggagctgaggtcacaaactggcctgcagagattgggggttggaatcccaggtgtatggcgctcaatcacagactgtggtcagagagagggtccattttccaggatggtccaaaatgaggcaacggagaagaactccatagcaggagcagtgctcaggggagcaggagccctgtaggctggagggacctcggcagatgcttgtccagttttctcatgggtggtaacctcacactgcctgtcctcagtgccatggtccacttgctgaatgaatgcccaggcctgaaatctttgcccagtgtcttatttggtcattttgtgagctgcatgtgtatgtggg

SEQ ID NO: 61169 - DNA, 567 bp, Homo sapiens
gagaggagtagccagatatgagacaggagaggcaggcaaggaagatttccaggtaatggccaactagataattgggaccaaacctcccactaaggacaaaatatttaaagcattttaaaggcataaaagtattaacaaaagaatgtgaggcacaccgggccacaacttgggaaagaatgaaaacccagggcagtcagtgctgtgttcagatctgcttttgcccacagaacatttgccaatttggaaggaatagctgtaaaacatctttgcttttggcagcctcactgggctggggagacaaaggccaaagtctggggcctgcagaggtagagattctgatagggttcattcacccttttgctgagctcctaaagccttcaccctattaaaaatgaaccagaagtaaacctggaccttgtgtagacttgcagcccagttcaaagtcatcttagtagaccagggaaactcaagccttgaacttggatttagtggtcccagaatgaaaggtccctactcgcctggcagtagcaaataaaatcaactctggaggaaaagattatcctaaat

SEQ ID NO: 61170 - DNA, 789 bp, Homo sapiens
gcgtgagccaccgctcccggcctaaaatgcactatttttaatgtcttctagagaacactctcaatttatgtatgagctgtgcttgggttttaaagagagaactattgtatcacgcgcattttaaaaaaccatcaagttccttatccagccaacaatgatcaacggtcagcctacttacagtccacgtttcagaacatttattcttaatcccaaagttggtttaactgaacacctctggactcattaagaatacttagcaaagcaattctaaaaacaaataccaatgttagactttggaactgaggagtaaacagaaagacagtttgtcattttgctgagctcaagactcagttgtttgaggtcaggaaccatcagataaataagcagaggttctgttgaggtgaaaggtcagatctcaactaagggtctaaatttctggctcacggcagctgttgctttgctggttactgctagagggagacgctgcttccaggtgcagctgagcacctgggcaggagtgattcaggcctcacagacccctcacctgcaaccttgagagctgggcctgttttccaggaaggtcccgctgaagccccttctcggcttggaccctgacctggaggtccaagagcttcctctgcaggggctcaaaagctgctccaaagtctttgtgctgagcgagcaggctctgcagagacacaggacagtgtgcacattaagagcgttcctcatgagcaccgtgttgtgagacccgacccgttcagccaggctgctcttcgtctcggccag

SEQ ID NO: 61171 - DNA, 914 bp, Homo sapiens
tctgctgaaaagtggtggacccaggtccaccaatgacagtaaaagccgacatttacccggtgttctgcaggtgcctgactgtatgacaaaaggtttgtaggtattaactcacttatcctacataggcccagtgacacattcacattatccctactttacagctgagaaaacaggtttaatgatactaacaacgctgcccaaagtcaccgggatgctaagtagcagaggcaagacttgaaccaaggatgacttgagtctaaactctttgctattaaatcccctggtgccacacagcttccacggccctctctgtccctcccagaaccccactggtaactgccgagttccaggaaggtaactccagggcaggaatctatcttgagctgcagctcaagaatctagagttcagggaaaccaactgagccccccagctgccaggcagcctccgtcacactgtgcccgctcactccagccctgtgccaacccagctgcccactgacattctgctctggaactcagaaggcgttgggattcagacccaggtaaacccaggtaaaaccccagctcccatggcaggccccattagcgattacagcctggtgcccctgctctgtcaagctggccggggccgcccaccacaagctgacccagagttctggcatgggcgtgctcgcttgccgtgactcactcggctgtcctgtgactcattcctgccctgccacacacattcccacccttatcctctctttcccactgctctcttatgcttggatgttatttcaggaactgagttacagctggtcttaatcccaaagctttttccaatggattctgggaacacaattttgtttatttatcacagaggaggttgcaccaagaggatagaccttggcaatcttctcctctgtggcact

SEQ ID NO: 61172 - DNA, 641 bp, Homo sapiens
ggccaacagggacctgctccaattctcagggtgctgccagccaactccctgcaggcaactctctgaggacagaaccaagcaccatgaagcaacagccaaagccagtaaaagcagaagacaaatggagtcacccacaggtgcatggggctttctgagctccccagcagcacatccatggggcctctctcccatctcctacaggtcccagacagattcctgtgtagggcctggaatttctgaacaactcatgcagctgccaggggttctcctggaataaggattgaaaatcaacaacttttgagttcagggacctgaatccagtccaactcctctgaactctgagccttttgttctcatttgaacataaactgcctctgggcacagcccttgcctattttgatcacaacacgtggcacttactgacacacagtaagtgctcacacacatttgtgaatgaaagatacatctggaaaatataaactacaatacctacctcggttggtgcttagtaggtactcagaaagtgttcttttatttgattatttttagagacagggtcttgctatgttgcccaggctggtctcaaactttctaggcccaagatttctgcctcagcctcccaagtagctgggactacagtc

SEQ ID NO: 61173 - DNA, 1071 bp, Homo sapiens
ctcacccactggactcctcccactgggcagcgctgtgtctctggcatcttcctagttcgtgtccacctcagccaatgtcagtacgttgaagaaatgccattgcccaaggcactggttacaaagcggaagagcccagatcccagccgcaaacacgtgcttctttggctcccaaaccaaagttggctccagctaagtgctgcatgactaaccctgcagcttcctgcaggagacccagataggaacttacggggctatcctcttatctgctcaaaggagcacattaggaagtgaagactgcggccaggagagcctggcctggatccccctccctgggcatttgggtgtttttacccagatggaggtgggacaagagacgccacaagatgaaatttttttaaaaattaattttctaaaattatgcctgagcaaacttgagtttgaaatcagcaaacagatacataggcaaatcacagaagccaggcctgctcgctgcctggtgctggataaatgacagaaattaacctggcaaccccaactggctcacacccaaccctacagccactggcttgtggtcaccaagttctcaacagctagtgaacaagtggcggaggggtttccctaggagaaaaggatgtggtcagagaagacagggtagggtgctccggggtgggccctggctctggaaaacctttggtgttcctagcccatgtgacactggtcccacagaaaggatttcctttgaggaatggcctggcagtgtgagagccactgggggctgtggagaaagagccagatgtctggttaggaggctgagtgactcaccacttccagcccacagcactcctggcatggaaaggccagtgtagcctgggagttacctgccagaactctgggatcaggtaacctgggttcaatttccaactccactgctaactgaggtagctgagggtgggttacttaacctctctgccaaatggtaacaacatcagagcatccttcattgggctgttgtgaggataaagacaaaaaaggcagagagcacttagacattcagtaagcactgaacaggta

SEQ ID NO: 61174 - DNA, 1593 bp, Homo sapiens
ctgctgtttggggtcaagatcccaagaccccaggggaagtcaacatccatctgaggctctctcaggccctgcaagccatctctggcctcactgccctcccctttagaaatgtgggaatgaggctcagagaggttgagctgcttgccaagtttgcatagccaaaaggcgtctgaacgaaactgagcattcggggttggacttcccctcttcgccgcctgctctgctctcccaggcactactgagcgcgctcgcggtcgccaggagcggattgggcccccgccgcgcgcaagccttggtgacaggtcagcccgcccctaggggaggcagagggaagccccgaggaggcacccggcccgctggggcgcgctgcccggggctttagggctttttcttgtgggccggccgaagctccccggggttgaaaggaaaggctcgggaatttcgcagccagcacagaacggttggatttaaactaaaaatacccgcccgcccgcagctgtcacgccggggcccccgcccccgcgccgggcgcgcctccccaggtcccccagactttcggcgcccccgattcccggggctgtgtcagagctgggccaggggctgaggaccccacccgcccggcccccggcccccggcccccggccccaggcctggcctcccggccccgtgccacttaccctcccggagcgtggaggagcgcggcgccgcgggtagctggggccgagcctccttccctcctccctgcgtcccgggcggctccggggcggggcagggctggggcgggcccggacaccgcgagtacccccgcccccgccgggacccgcccggtggccccgcgggagaggccgcgcccctctccgcacgcgctcagcggaggccccgggtgcgcaaccccagcccggcggacatcctgcgtggccccggggaccagggccgaagaaaagcctcaccgctccctgtcgcggacccggggcgggggttaaggggggggtcctgtccacgcttgcctggaaagcagcccggagccctggcccctgtctgtctccccgacacacacacagccacccaccctcttctcatcctaggggatggcgcggagctgcctctccgggaaagttggatctgtgcgcccagacatggaaaagggattaggacaccggcagatcttgccctcacagagcggaggtgggggccttggaaggggcacaccgcccgtaggcgcgaaatccaagaagaaaatgacactcatcagccagcctcgcgcggggagaaagggcggggtggggggtagtggcaccctgcccgtcctctcccacccccacagtccgggcccacagtccaggagtcacaagggatgtgaatccccaggcataatgtgaacccccaacaaacccaaggcctcagaatgcgcctcacctctccctccccaccagcagaaacatcctcccactctcccaacccctgctccagccacgccaaccctttaaccttgtcccagaatgtctaaactgtatctgcctctgtgcctgtgcacatgaagttgccttggcccggcgtttgctccacagccttctgccaaactcctactgcttg

SEQ ID NO: 61175 - DNA, 5290 bp, Homo sapiens
gacattaagacacacgaatcattcacagaactaagtaatgctgcatgtcatcaaatgcgagactgcatggtacaaaactgacttgtagaggaacccagagacaggaaagagaagtgacaacacgagtgtttggggagtcctctggataagatgtgagatatatctcaaatgatggacacaaataatgatattttatatttattaagggcttacctaccatctgccacacactgttctaagcctttacctatattgttaatttaaccctcatcatcacccttcaggatagctcctattatcatcccattttccaaatgagggaaaaaaggtgaaaacttggccattcacccagctattatgtgactcacctagggtacacactcaggcagtctgaccccagcacccactccatcgctgtggattctgtctcatagcaatagtggtcatgattcaattccattctgtttcttaggttatattttccacacacagcatatgctatagctatgctgagccttctggaggaaggttattgataagttcaaacactgttcaaacaaaccagcaccactgttagtaacgtaacaggtgagaagtctgtgtgtgatgtatctgctggggtgtgtgtgtgtgtgtgtgtgtaaacagcaaggctgaagcctccagttgtgtgattatctgtatatgcagcaaaacacgcacacaccacacacatcaaagttcccagctctatatgataaaacacagaagcagctgagcccatttcagataatgaatgtggttttgtattctctgaattgctacataccaggaaagtcacttccaggctcagctacctcctgagttgctaaacatacaagatgtgtgatcacgcttcgctcacagcactgatggctgctcaccctttcagctgtatcatttcggttaaaacaacagcataccacgagcccggcatgtttgcttgcttttgttttgaaatctaaatgcagccttgataatgtcggtgcttccatcgatggggtgggtggcagagtgaaaagctccctggatcaacatctcctgacttgctgtctctctgagctctgcatttcccagtcggctgggcagaggcgagccatctcacctcctcctgtctccacatttagaaaatggggccagttcttcctgttttccctgtaagagctgcatgagattcacataaagatgatgaaacgcactgcaaactttagattctgtgcaaatgtgtacgactatggtaaattaaaccctccgcttactatgcttccaaagaatgcttcacgacagacaccaactcaggaagaggctgtgagtaaggaagacttccccactagggaggaaaatgaagctttccgtgttttttttttaatccctggagacatgtttttgaacgttgctgaagtgttctctccttgctttgacaagtgtggctgttctgaacatgtgatcatattggaatcgctgtgtgataggcagagtgcccaggaagccagggaggctctgaacccagccctggcagacacacggaggtgtggcctttgtaccctctttagggcagtggaacccatgcagggcacctgcaccacccccacccatcccatatgagcagccggtgcttggctcttccgggaagcccacacttggggcccagccctgtccctctatcctagcggcatgggctggtaaatgccaaataggtccatgtatcttataaaacctgctgctcttgatgataattcttgacagcccaggacacttccctaacagagaaagttgtttcattgcagtagtctagttccaaaaccttagaatcttattgccaacaactggcatggaacacatgcagaacaaacattttccaacaggactgccgcaggtccttgcaatggcaatagctgcagcacctggcctaagattttaaagaactttcatcctaaatttcttctttgatgttgtagacttggtatgcagagaaaaatggccagtgtcgctaaatgcacctcctggttaattacaaagccctattcagcagacagaagcaacctctataaacaggcaagaggtgtcctcaggtatttcaaaggtctcggctagcaccatgccaatgggatgagtgcaccagcttcagcaatcaagcttgtttcatcatccaaatggaaacatttctgcaaaatgactggactctatctgctctgttcactaactacagaaatggcctaaaacaaaggttcacacacagacaaaagtaacagccagaagacacctgacaaattcactggcccaactctatcacgttgcagagccccttagaggtgaagcgaagcgcccaagggcagcaaacactgattgcatcagcccacactgtgtttacctccattgcaaaatccacgagaccctgggtccttacctggcctctctctgtggcttcctttttttttttaagagacagccttgctctgttgcccaggctggagtgcagtggtactatcatagttcactgcaggctagaactccttggctaaagttatctttccacctcagcctcccaagtagctaggactataggcacacaccactgctcccaactaacttaaaactttttctagagatggggcctcactatgttgcccagactagtctagagcatgtggcctcaagcaatcctcctgcctcggcctcccaaagctctgggactacaggtgtgagccctcatgctcaggccctctgtggcttctggtaaattcctcttccctaaagcacttgctcctagttctcctcatggcctgtccctccccagcgatatgcgttccccaggttttcttctctgcactccttcttgcccccccacccgcccaaatctcctttatcaatagatccagacccgtagaggcaataatctgcatactctctccctttatttcagacataacctgatgatttagatgttcctcaggcacctggaaacagaaatgtccaaaagtaattcctgaacttacctttccaatcctccttccccctcccgctgtattccctgcatcatcaagtgcagtcagtggctaagcaaaaccctaggaataagcctgaatcttcccctcttcctcccagccccctccccacagtcagccagtcaccaaatgctgtcatccctaccttcaaagaactcagcttgcagcagtgcccttcccccatgcccccaccccaatacctgcaaaggttaaatctgatgaccctctcctaagtggccccgttagctcggccacctccaatccatcaacactcccgcaagggtgatctctcaagcactctgcagcttacactcctcctgggactctccctcatccagaggaggagagcccagtcccttaccatctgtcctcccctcagctatgtccagtcctgcatttctcaagaaacggcctggcattctcccagtggacccaggggcctctgtgcctttgccctggttgctccctcttcctggaatgtccctcctttttatatagaagcactttacccttctctcaaaactcagttcaagtgtcaccccctactaagcttttcctatcccttaggcgctgactgagctttttccgagagctccattcccttctccagttctcgggggcattcttgcatctgtccccatcacaggactgcgaggtccttgggatttggcagcctcttactccactctgtatcctgcttagcgcagagcctgtgggtgcctcactgaatgtttctccacctcctatggcacctgtgctcgatattatgagtttcacacaatttgggatttgctgagatcctgctctgtattgttcaccaggttatgtattctttattcaagaattatctattgaacatatagtaagtgccagggatggcactagggcaccaggttacaaaaatgaatcctacccaactagaagttgatggcctagtgtgtgcgtggtgggggtggggggaggaataaacagatacaattacaatgcatacactccctgaagaggttctgatccccaaccactgtgaaacagggctgggtagtagcacaagtgaggtggttatattctttgaggcctctaattgtgtgtcctgggttgacatcagcatttgcagaaccactttatggacggccctttctgacgtaacgtcggctgagctctcttatcaagcccactggtttacacagttagaaaaattcaactttacaccagtattattcagtccctcaacacctgatgaaatgtactaggtatttccaaggtgtcttccaagtactaacatgaagtatgtaacagagttagaataactttatctggcacaatggagtaaagtattcctttttttaacataaccttaagctgtgtgtgtgtgtgtgtgtgtgtagtttttgttggcaagctaaaataaactgcatgtttccttgacttcctattcagagcatggggaaaagaatttctttttcttgctcggaagcataatacaaggcactagtgcacaaggaacagtcacgggtgaagactgttcgcccctccttacatcgaatgccccagaatgctgctttttaagaagaatcccagaatgtctgcctcttagtgcttcacctttcacttactgttcagtcattgtttctttctgcttttagtgttagccttttaaaatttactgcttctgatctgttgtggttatattagaaaactaagtaagttagctattccctaaaataagaatagcacttgggtaagaactgagagacttttcctagaattgagcaaaatgattaattcccagagaatgtataattacaggggcagcccttattggctcttgccccagcttcctcagtaaaatagactagtgccccctacctgccttgccaggaaagacagagactcattctattataaaatgtatttctcaaaaccagaatgactttgaaagatgtgttatttttctgaacacaagtaaaaattccttcaagtaagaggatattatttgctctgtaattagacagccaatagtatgtgtggattatcacggatctgtggctgcatggtatgaagagatgaaccaacgggaatatcccattgatttcacatcgactagactggcatgtcccctcaaggctgcactcatacagctatgatatgaaaatgccagatcaccgtctatctggagagggaagaaggtttgccaatataacagcttctcctcaagtcacccaattttgcctatgtaataaagcttatgcaaaaaaaactcctttttt

SEQ ID NO: 61176 - DNA, 3236 bp, Homo sapiens
tgttcaacagaaaacactccatctgctaaacaatatctcgactgcaaagcttctcttactgttggcggatagataatgacatagcccagtcattatcaccgtggcaacagtgaccagaaactatcagaggaaaattgcacatggaacagctggctctcgagcaggcatgcctcagcttcctctggagtatgctttttctgcaagtctggtgtgctcgagggtaccaccaaccctgtgcggctccaagactacagattatgtagcaagtccactggtcctgctcttccggatttattcttcccgccaataggagcacttaccacgttccaagcatcgtcctaggcactgaggatacagcagtgaataaaactgagtgctgggtaggaagtcaataaccaagctagtaaataactgtatattgtcaagcactggtaagtacaagggagagcagagcaagcaatgggcctgatgaggcttgctttgtctcctctgcactcccacactgctttgtatctgcttctcatttctcacgatgggtccaagctttgggcaccaggtctccctggacattccgcgctggcactgcgcctagcacccagcggctgctcaggaaacgtttgtcgaacgaacgaattcacttcttagttccccattcaacaaacctttcctgatcctaggcccaacaggttaaaaggctggagggccaacgaggctggaaactcagaggcggccgggggcggtggctcacgcctgtaatcccagcactttaagaggccgaggcaggaggatcccttgaagccaggagttcgagaccagcctgggcaaaaaagtgagacatcgaccccccgcccccgccgccaattccgtctctacaaaaaggaagaaaaaaaaaaaaaacccagaggaaatcacacaggcaaaagcgctttacaaattttaaaaatgaaaactgttctagagaaataatcgcgcgccggaggcggaagccccagagcctcagctcccacgtggcggcggagccagggaaagtccaggagccaaggctacggcccgagcgctggaaccccggtcaggctccggctccccgccacgacgaactgcatgcggccgcggcgctccggaggcgcccggggacgctcacctaagctgggagaggcggatacccgcccggcctagccccgctacctcccaagagaccaacacgacaagcgcgcgcccaccgcattgccatggcaattcaaccgccgctgacaccggaaccggaaacttcatcaggaggtgaccccttcccggcgttccgcggaacgggcgagtcccgcgcctctcccagttgtctcggcgtagtccagctggcctcattggctcacaggaggaaagtcgtcttccctcttgttttgcctctcgttgccctgcaagcgtgaccctgatggacatccagtctctccaattaactaacaaagcggttgccgacgaccaatagtaaggcagtaggatgaggctccggcataaggcccacctcctacctgccgggcgggacgagcaacatgattggtggaatcgagtaattactgatcagtattgtccaatcacggagggcagtttagagccggcccaatgagggcctccagggggcgggtcggactgccgcgggccggggagcgctctgggtggccagctgtgggcccgggccgtcgtgggctccggcttgcgtgcggagatgagcgggtccctcggccgagctgcggcggctctgctccgctgggggcgcggcgcgggcggcggtggcctttggggtccgggcgtgcgggcggcgggctcgggcgcgggcggcggcggctcggcggagcagttggacgcgctggtgaagaaggacaaggtggtggtcttcctcaaggggacgccggagcagccccagtgcggcttcagcaacgccgtggtgcagatcctgcggctgcacggcgtccgcgattacgcggcctacaacgtgctggacgacccggagctccgacaaggtcaggccagtgtgccgggcaggcgccctccgccccgggcccaggagcatcgctgcacgaggccgaggggttccgccgcgccgggctggggagcggggctccatccgccggggtctgtctgaaggttcgagccgggttagggcgaggagtactgccctggagtagagtctgggctgagggtgtagttgatttcactgggtcttgaggatctggggctctgtactgttgccaacttgagcagtaggtaaagtcctaaaggttcacttatcctcacttcgagctaatataggcgtttcggggcgatttgtcaatgactgactcggaggagggtggcccgctgcctgactgctctgcacggttaggaaactcatagtaaggacccactgtgagataggtactttcgcggacactttggggaggttggaagccattggcctactcgtgggtaaggtctagggctgtcgatggtggggagagggctgaggttgcccttgaggctagtgaggtcggaggctgatctcgcttggctcacggctcagggtgtcaagcatcatcctctgtggttgctacaagcaaagggttgggacagctgtcggctgaccttagtcgggatctatgttgtcggggaagagtcatgacatttggctttagatactcaagcacagggctgaatttatgtgggccagggcttggagaggtttgtggggaaaagaagcagccctggctcctgggccctgggctaactcactggctcagccttggagcccagggggccagggcaccagggaccagatggattaggccgggagagggaaggctgcagctaataagcatcttttccaagtactccacgtgcattcgccagtcttatctgagtaggggaggaggaagaggccaggcacaagggcctgctccttggccaggatggtcagggttggtggaaaactgggaaggctgtaccttttccttctagagagtgacttaggatacctgcatcccagttagagactttcagtgactgagtccctgcatgtccctagctaaaaagaggtgccagttgtgtgctaaaaataggtgccaggttctctgttactctaaattcgaaattactaatcatagtcattgcttacaatgatgagacaggctggtgtttggaaaagctttgggttgacatcctcttctgtggctaatcaggtgtaaaacttaagtcactcacctgcattt

SEQ ID NO: 61177 - DNA, 858 bp, Homo sapiens
tgctggaatatagctagtaaacggaaaataggagcaaaaatacgaatatgtactgataacattttatttttctgtcttttatccacgtctggtgtctggtttctgagcttactttcttaagttttcaaacagcagcgacaggaatttaacccttacattccttgaccactgagtttcatcagattgctattttggttaataaacgcgttgcatatatattgaatataacatacctcttttattgattagaaaagtaaagattagtaagtattaacatttggactgggcagggtggtaaaagcacgttccccaaatggggattagttcagccaggttattaagactcttcccctcttccctatacagctttatttaccaagagcaactaacgggctgtccgatgcttgcttttgccagccgaaactatgtttgtacaccagatccaaggtcatttctagtaataggaacggagctcttgcaaaactggccttttgttggttcttatgccaaggagacctgaactttacaaagtgcctaaaccggaggaaaacattctttcctagttttgagtactgggttcccaggagtgtgatacagacacatcttgagactgtgacccaaggaacaaaggtgactatgaggcagcattgtgttctggccttctcaagaccttcttgtccttctctttttatctggagtgcacacagaagacagtcacaaagggatcaggtcccagtagactgacatcatcatttcctaatcctggtcttaataaaggaacttatgctcatggaagcaatgtagaaaacactgaaaagtttaaagaaggaaaatcacctgtaatttatggaaactatt

SEQ ID NO: 61178 - DNA, 697 bp, Homo sapiens
tcccttagggcagagatgccactgaaggtgcacctcacctcaaagatccctatcctggattcagtcagaatagccatgttattctcctccttgtgaacctcccggggcacccggttgtgtcacagtgaagtctctcctatcccagaaagccttccctgaccccagacggaacagaccctttaatccactctacagccctgttctttgttcatcactccaggacctaactgcctgttacttggctttattcagatcccctctggccagcatacagagtgccccaaaaaatacatttagaaaagagtgaagaatttcctttcttcattccttttggattagtcacaagaaatgttaggctattacaggttacagcctcgcaacaccgcagtagctaagagccgggactcaagtcaccctccctgggtttgcatcccagcacttgctgggtgtgctactgacctcagacgacttagtaacctcccttcctgcttaagtgggcaaatagcagatgccaccgacctcaggcgtgttacaagcttagatgacagcaccctgtcgagaccatggctcataatgagctctcactgtaagttgaccttgacagttaatgttggattacacctggacttggtaccgcgctgtggtatccaccaccgttcggagggtttaagggagcagagaaggacaggctgatgaa

SEQ ID NO: 61179 - DNA, 766 bp, Homo sapiens
gccgcttagtgcagctctggctgtggtgtccagagtgttcgccctgcagccctgagaagaactgaatttgagcttcagttgcctgttgaaagagccagggaggccaggaattttggaagttgcccctggccatccactatcaagtatgtgaaggaagcagagggtcccacctctgaggtcagacaaatggaaggtgaatgcaaatgatgcctccttgcaaatgatgccagggaaagcctcctgggccccgtgtgttgtgcggacaggtggccaggccagaggtcccactggacttcactctgaaattccagacagcaggaagtaaacaaagtgctttacgagcgagttcccgcggtctgctggtctttccctgcacttccgtccgacctcggtcacagccctgggtggggtcagatatttctacccatactcagggccacctgttgccccaagttctcacttcctggcagtgtccctctgctagcccttgctgctgcccccaccttcctctgtctgcccgccaccccccagccttttccttggtcacagttgtccttttgttacctgcggttatcagaaacatggtcaaatagggtataagcttttagtatcccattcatttgaaattttaacctcgtttttaataaaacaatgcatgcatataattagtcaaatgatactttaaaaactacagtaataatgaaaaacagcactctcctgccttttgatccatgggtcctgctctctataggaaacaaatttccat

SEQ ID NO: 61180 - DNA, 1621 bp, Homo sapiens
tcattctgaaatagcaaaaatggctagcagcaaggtttttcaagaaaaggaggcatccctggtccaatgctgctgaatgtgtctcaagaagctacagccagtccagcccaggccacagcgtgtccctcacttcctgccccaccctccttgctaacatttaattgatttaattgaatttttggttttaccaatcaggattgtaaacacattcatcctcatgcaatgtgcctattcctagtcaaccctggtattgtaagggtatgggcagctttcctggagcagaatgtccatctgtaatgtggggcctgtaaagaaataaaggttcaaacaaccacagctcttcactctgtccaggagttggttatgctgtgggtagtggggtgctcctctcccctagggatgagccggtcccccattagctgtgtactcttggaggggtaatgcctcctctggctcacccctttgtcctccccagtgcccagcccagggataacagtgtcaggctttccataaatgaactaatgagggggacagggatgaacaccgcagcctcccttcggtgcctgctggaatggccaagctctgcatccgctccccagagctgcctgagcctttagggttggaggagggggagaggaaggggagggatgggtttctagggctgagatgggccccttagtgattctggtggggctgcctgtttatttagctgcctgctacccatggtctccaaagcctgccctcgctggggattttccatctggcttccagtgactcaggctcccgcagggtgctggccttaccaggcagcagagatggccccacgattaatattgatacacgccagctgctgaggcctctttcgcaagcaagacaaataatattaactaccacagcaaccggcctctgagccgcactgcccttagggtttgcaagcactttccattccagctttccatcctctgaacaggtgatctgtgtcggcccctcccatgccccaagcacaaccaggcagggcacctactctctgtcttgtgtggtggggggtggggggaggcaaaggatcagatgaagacaatgggttgtaactgcatgatagtgagaagctgaaatgcgccggggctgaggggcgcctcctaaccagcctagcactccaggccagaacgccagggagacaagcctccagtttttagaaaacaaaactgaagttcatcgacttgttcattcaataagcaatgactgagcacctgctatgagccaggcactgttctagacactcagggtgtatagtgaacaaaacaaagccccaccctgctgatggcaaagggaaggtagacaagaagccaataaagaaataaagatcaagccttactttctgaaaaaccaaaagaaagaaacagtgaaagaatgcgctatggaatggagacaaatgttgggggaaacagaaagtaagtgtggggctggagcgggaggggcatgaggttttggagaggatgatcaaggcactcctatccccaggggagaggtggtgccagtgtctcaggacagggtgacagttcagagaggtgacctgacaacgtgcctggccaccccaagcttctggatagagagagttttgtac

SEQ ID NO: 61181 - DNA, 897 bp, Homo sapiens
gctcccttacacgcataggcctgcagcatcagggggtcgtgtgagctggggctgccttcagaggagctcgtggcacggccgagatgccctcccttctcccttacctacactaccctcctccctacctccctcctccctacctccctcctccctccctatgctcccctcctccctacctggactctcctccttcaaggagtattgtttgtctgcacctgtgctgacgctcaatttttgactccctggaggaacattcaaaatcctgccttgcccaagaaactccaaaacatttaatttattcccaaaatttgcctccggggcaattacgagttactgggcctagaaaatcagtcggatggaaaaatgcagtgagccaggaccagcaggggtcagtgtggtattagggatgggaacagaccccggcagcctctggggtcagtgggttgtcgcccgctggtggctgcaaagaaaaacagaagaagctctgagattccccccagtacctttcaggaactcatgttcccatacgagaaataacccacaaaccacgaggtcccagagaggaaattaactgataactccctgggatcaccctgccccacccccaaaataaatgccaagcaaaccttctaagccagaagccagacaggtgaacaggccgaacccggtcctcagacctcctctgatggaactgggcatggctctgatttgtttgaataaagctttgcattgaagtacaacatacagaaagaaaactgtgtataccgttcaacaaattttgacgacgtcctcatactccataaatccagaaatggggccaacaagcggaacattctcagaaacgtcttcagcctgcaccttgttgtgaaactcacttaaattggttgccaacaataa

SEQ ID NO: 61182 - DNA, 2671 bp, Homo sapiens
catcctggctctgaccttgggcaagagacacacattatctgagcctcagtttcctcatcagtaaaatgggagcaagagtagcactgtgctaggctgatgaaggccctccaaagataccccttgaacccatgaatatgtttccttagatggcaaaagggactctgaagatgtgactaagtcaggatcttgagatgggagaccatcctgcattatccaggtgggcccaatgtcatcacaagggtccccatgagagggagcagggggtcagagtgagctctcagaatgtgacaaaggaagccagaggttggagtaacgcaaggaaggggccacaagcccgggggtgtaggctgcctttccaagccagaaaaggcaaggaaacagattttcccctggagcctccagaaagacccagccccaccaacaccttgactttagcctagtgagactaattttggacttctagtatcagaactataaggtactaaattgatgttgttttaagcactaaatttgcagtcattggtgacagcagatgtaggaaactctaccacaagcacctcccctagaggatcactgtagggatgaactgagatgaggcctctaagcatccggtccctggggcacagcttggagctcagtaagtgggagccactgccactcggtcaatactggggcttccgaacctctgcccctatccacctcctgcctctttccggccccaggaacctcctgggggaaacgaggagtgacctctgaccacgtgaggaagggaaggagaccatatggtggagattacagtcattgcatcctcggccccttccagacttgcccaaccacgggaggcaggccaggtggccgtgaagtcattatttacatgcctcggcttgcgtcattggtttcgagtgcagccagcggtgaaagcaaaagttcatctcgggctggtagtgggtggccagctggccagatcattccctgcagtaataaaccaggcagggatgcagtcaccccgcccacagcctttccctgggctgcttcagcccgcaccacattccgggcccagctacagctcgtctctcctctgggaggcttcgcccagtgacccagccccagggtgaccaactcatccctgtttgcccaggactttcctggttttagcactgaaagccccgtgtccagggaagcccttaggtcctgggcaatctgagagggttggtcaccctactcagctgtcagtgtggagagagcctgccccatggtacttgatcctgctccccagtacaggacggccttgttctctttagattctgcctggtctcagggcccgccccatgctgaccccccacccagcatcttcttcctctggtttgccatggctcgccctgccctggggcccggaccaacccactttgttggggtcactgctcctgtgtctttctcataggccttcactaccttccagctacatatttgtccccaactagatcgtaagctccaggagggcagggacccttctacttgactcaggtccctgaaatcctcagtgcctgccacactgcctggcttatcactgcacctcaaaatatcatgtttggaggatggaggggaggaaggaagaaagaaagaaaggcaggaggagaatccccaagtcacctgtgtccttcggactcctagcccacaatgtgactgatgttacagaaaatgcgctccaggcagaagacaggctgcttggcatttagctgtgcggtgaggaatggcctgatctggctggtaggtgagtctaatgggctggagagcaacgagcagcggggacgcaccgggagctcctgggacttcaggctcccgtttttcagatctcttagacagagccttgccccagaaaccgtctgtactgagacttcacacaaggccccatctgtgtgtggatataaaccagagcagctgagaaacccgccctcccctctgagacctgggcaaggctctggagcacagaggaggaggctggagcgcatgcactttgatcctccaaaagggagctgcccccacctcagacacccctcccccaaattactgaagcctatccccccgcccccccgcttactctgtgcaagcagagtaagcttcgtgtccatggcaatgaccatggccttcaaagttcctcttcccatcctcctgtgagatgccagggccatgtgcggggtagtcctccctggagctctaggcggggccaccaggactcacctcggagtcatgggtgtggagaccgtaaggaggctgtgccagagcaggctgcaagctgggcgggatgacaatgtcactgcccacgtgcgttctttctttcaggcgttccctcagcaacaactcattgagagtgtgctgtgtgccaggcctagggcgggagagctgacacacatcagcggagaggctgccctcatctagataaaggttctccaaaatgtaatcactgggcaaaagtgcaaatggttgaaaaatattgacgtaatgccatttagaagatggaaaactctgctttgcagtgtctgtgcgtccacagatagaaatgcacagggagaaagtgggacccaggattaccctggggagaggactgggaggtggacatggtcaaaagagccttgactcgggtttttgcacagagaacatgtacacaggttat

SEQ ID NO: 61183 - DNA, 559 bp, Homo sapiens
tctaagaggcagtgaggtcctcatccctggaggtagggaggtgggctgggccccagcttggcaggaaactgagaagggtgatcaagctcccatgggtgagggtctagatggtttcagtgtccctctggcccttggattccctgacttctgagatcttggtcctgtaagacactggctccaaaacattcagctgcctctccacagtcttccagttgctaatgagcagtccatgaccagagggaggtaaacaagagctgagtcaccctgtggaatccccgagtagaagtcacctcccttcttaatagccattataaacacattaccagcagctctgtttatttgctgtttggagtttatgtagctgcacggaatgtaatatggaggatgagctacaaacatctgaccaccccacatttagccatctttgtgtctggtctgtatgtcattccacattcaacatccttgtgctggccaagaagaagaggtgggcgggctactgccagccccaccaggggagccctcatgggcctcaccatcaactaaatggtgtcctcatctc

SEQ ID NO: 61184 - DNA, 1513 bp, Homo sapiens
gagagacggtcggagatgtggggtcctggggctcacacccggcaaggtgagagggtgtttgggttttattgtgggtgcagtggaaaccagaggatggcataccttcttaaaaatttctctggacagtggttgccaaggggttgggggttgggaggactttgaccacaaatgggacacgcaggccacgagggtgacgcactgctccagggggccagagccgtggttctgcacctgtcaaaacccacgtaactaaacaccacagaaagtgaactgtactgttgtgcaatgttttctaagttctttaattgaaaaggcccttccagcagctgtatgaaggtgtggccgaagtgtgggaggcaaaggaggggaagtgagaaaccggccagagtcccagaggagacccctggtcagagtgtctgggtgaggtgggtgatggccgtggggagggggctatgagctcaggtcctctgggagcctctgaggagcctcagtttcctcatcagggacactgtgcagcaatttccactcaggagctgtccatgtggtctggggatggtgcctataacctgcctggcagggcctggctggagcaggtgctcagcccttaggagctggatgattgacctttttccagagggtggctgtggctggcctcagggtgcctggaggtgagccatccacccacggagcagggagggggccaccttcagaaaacagacctgaaggggaactgttcaacagtgaaggacacctggctggaggcccttggcctacagatcaagtgacgtcaccccaagccgaggaatgtgacccagaatgttgtgtacttagagggcttctctctcccagggaggtctgagcatttttatgggggccaaatcaggatctggctgaagcaccagccttgggagggggaaggtgcagggcgggcagctcccagggaaaggtgttggctcaggactggagctccaggctgcagaccagggcactggggtcagaaggactggattcctgcttcaacatggccacgcattacctgggcggccctgggaaggtcactcgcctctgcctgtttataaggtcagatgagtagaacatgggaacgtcccttggtgcactatgaaatactctcccaacacagggatggacaggatggtgatgctcacggtgacatttggcaccttgagtgggtagaaactccactgcccctgggtcagtgtccttccagactcagtgagctgtgtttgaacctgagagtggagatcaaaagacaaaagggatattgctggtaggaatgtgcagcagccactgagtaaacagtccagccactcctcaaaaagttaagcatagagttaaccacgtgacccagcaattctctgggtcttcccaaaagaatggaaaacagactcaggcaaacacttgtacgtgattgtccctagcagcattagccacatagtcaagagatgggaatagcctgaatgtacatcagctagtgaatggataaacaaaacat

SEQ ID NO: 61185 - DNA, 537 bp, Homo sapiens
catggggcttcccaggccactttgtggtcagccgggagggacgtttttgccgtcccacgactccaacgggcagccgggctacgcaaacatggaaatcttccaagagcctccctggcccccagggctcagagggtggcagagcggagagcgaaggtggccgcagccttcccggccccacagccagcctggctccagctgggcaggagtgcagagctcagctggaggcggagggggaagtgcccaggaggctgatgacatcactacccagcccttgaaagatgagctgttcccgccgccactccagctctggcttctgggctccgaggaggggtggggacggtggggacggtggggacatcaggctgccccgcagtaccagggagcgactgaagtgcccatgccgcttgctccggagaaggtgggtgccgggcaggggctgctccagccgcctcacctctgctgggaggacaaactgtcccagcacagagggagggagggagggcaggcagcggggagaagtttccctgtggtcgtggg

SEQ ID NO: 61186 - DNA, 1910 bp, Homo sapiens
ccctcccatcaggttcacacgcatggaagctatgggaggttaagtttgcaacccctcatccagaccatcccttcacatacagtctaggaaacagagagcagtaagacctgcccaagcacacccagtgcgactcagcagccacacacaggagtaggctcagtcatctcatttaatcgcctgactcccttgtgaggtctgtttcaggatgtccactttctaggtgaggaagaggaggctaaggaaggcagtgcctgctcagactgcagaggctggattcacccaactcatctgactccaacaccaatgtgatttccaagcccccaggcaggaattcattgggcaaaggctctgtggcaaagtggcaaaagtaggcaggaacaggcaggaatagagagtgggaaagggaaaataatacctgattcctcttctattccgagtgagctgacccacatatgccctcctttcttctttttcagccggccttaagcaggtggcttatcaaaatcctttcgaggtcttgcaaaaaccaatcccacactcgagaagaacgtgctggccggtgaaatcggacaacattgctcacgggatgtaattcaatggtagactgcagccacagcctgagaactcagacacctgatttatgagacgcacataagtaacgtttaccgaagcccagcaaatggccccacagtgggagagaaactggcaaacccgtacagtagaattctgttgcccttctgtggggaaggccagttattcatttacagagggagaaatttctgccttgactaaaaggatcgatgctgtgggaaaaggtaatatatctgagttcccatggatctggttgataggttcacctggcgtgttccatatggggccaggcccaggccacacctgtggtgctaacacctggggtggagggaggaattagcaaatagtcttccagcatccccagctccagcacccatgtgggcttccactctctccctgagaagggccaagtagaaagagagaacaaggtttcactccaatccgttcccagctctgggtctgtcctgggctccagaaccgcgtgatcaggggccatatgtggccttcactgctctctgcagtgggaaggtaagaaaactgcccccaccctgccccatcatcaccccaatccatcatggggagtgggtggcactaaggccctccaaatcccagcctcggggaaactccctgatgttgcaatggccacaggcaggctcttgctctccggagatgagtcacaaatttgatgaggagcaggtcggaagcagccctggaaagtgttcctccccacccctgctcccaccacagctccgaggagcctgggcatccaaccagggctgatccaagccttggctccggctgagctccgctctggcctctgtgcaccttcagctccttcctgcccttctctttccctgtgcccagcccctttctccagacccccttgattccttctcagcatcctcttgcctccccggaccacccccagctcaggcccctgcccaagaagggcctcaccgcggggctgcagagtgcacagtgcagccggtcagaggtccaggtctctgagtcacacatgccactgttccagtcctcactccaccaccgcatgggcctggccgaccaccgaaactcggcatcccatctgtaaaatgggaatgaggagagcagtgcctcactgtgtcgttgtgaaaattaagtgacccaaaaggacggccttattccctttttggaaagaggtaatgggcaaagaaagggaaggaaaggcgagaaaggacaagaggaaggtcagagatgtatgtgagacaccaggacagcgccaccccagcaagcaccaacaaccattttctcctatgagcagaagaggctttaactatgac

SEQ ID NO: 61187 - DNA, 443 bp, Homo sapiens
tggcttcttccccacccctgactcctctccctggaagaggagtgacttctctgattatccggtttcaaaaaaaaaaaaaaaaaaaaaaaggaattgggcctggcctgtagagcccagttccttactccattctcactctttgggaagtacctgactgcagattggtcttctcttgcccataaggtaagcatagagttaaaggctctgccctagtgggggaagtcatcagcattgcctgggcctgcatgagtcagcctgattctgggattcagtatcaaaaagtctattttctggccgtgtgcctgagtgataccttccaacctagcccttatcagtaataaagaggagagtgcaggccctgtgcactgactccaccgtctgcctctttagtgcagaactcatgagggaaaacaggagtgtcttcacaccccagctcctatgat

SEQ ID NO: 61188 - DNA, 882 bp, Homo sapiens
gcaggcttctatttcacactcatctgtagacaatcctcagagaaggccacagaagctctttatctgtatacaaagcacatttctattctctcatgccccaaacatgggctttatcagtctgccgtgaaagtgccaccaggggcaattttcatgttgagagagggcctggtgtgctggcccccagccccatgtttacagcgagaaattaaccatggaataaaatgatgtttttctttttaatccacgcagtgtccttgactaagaggaagctgtcaccgacaagcctcgtgagagagttaggatagttaggatgtttccaagtccttcccaccgcgcgtggggtcggaatttgcacgggctcgggtgccatgcttggtagggggtgatttccaaaccaaagttccactgagaagagggcgggcgccccctgctggcatcaggggcagactgctctttccccagacatgattctgcacccactttctctcaaagcaaacccttacatgggattcactacagatccgttccaaagcgaaacagaacacagaaacaggacaaggcctcttgaaaggggttgtttaaagatctcttcaaaaaaatttaaaaataaacctgttttgtgggcatgtcaatagatacaacttccatgggaaggcagttgacaatagctacccaaatttcaaatggtgtcccatattgacacagtgttaccccttatggtgatttatccatcagatatacttatcagaaatggagaagcagcaaagttaagtggctcaaagtgaacctttagggcggagatttggctgaaattccagttcattggcaccaaagcaaatggaaataaaggctgggccacgttaagattgctttccaaataga

SEQ ID NO: 61189 - DNA, 995 bp, Homo sapiens
gaacttaagtacaactgtggaaagtatatttaaaagttagacagattttacaattttaagtttgatcaagtgttttccagtttgactaatcataactgggttaacacacatagcaagtttccttaagggcaaatggaaaatgctggcatctgagcggggtggtcagaacgcaccccacagccagaggcgccttcccggtaacacagcacgccttcctgttagtgtgtcgccaggaccaggctctacccgaataagagatggtcccacggtgcttaaacaggtggttacgctgttgtctttttaagttttttggcagtaaaaaggaaactaaaattaaaagctatataaccccatttttataaattctaaacattttgatttttggtttacattgctttcctgcttagaaaatttagagaacgaaattgatttaactacattttccaagccccaaattgaaatgcagttctgaaattgaagttcaataatattcccccaactttagaaaacaggaagtcaggtcatgcaactttcaacagtggatatatacaaagttccaccttttctttctgctggatcaatctaaagtcaggaattgacaacaatttccctcttactcctaggtaatgatttacctgatattaaccaaaatcgattttgagaaagtgttcccaattatcttgtggtaaatcacagtactgcatctatgaatatgctctaagaaaagcaaaatattcatggaagcataaaacaatatcacctttaaataaaaatactttattcattcctgataggttatcaaaatgtacactgttaaccaagtaaaaatggtatgctgaaatagttaactagggcatatttgaagaattttgtttacttttaaaagaggaaaaatcacttccaatcttcccttccacacattcctaacaagcctgcactatacctgcttaaaactgaaaatataaacaattacatgggccccacttcattacaga

SEQ ID NO: 61190 - DNA, 578 bp, Homo sapiens
atttttccccaataatatgatgaccttcttctctttaaaaataagaaaaaaaaagaaaaattcctattcctataccatatgagaaaaagaggaattgtttaccctctttccttaaaagtctgaatcaaacatttttgggtcacatgcccccatcaataatctgattaaaggctgggcacggtggctcatgccagtaatctcaacactttgggaggctaaggtgggaggattacttgagttcaggagttccagaccagcctgtgcaatataggaaaaccccaactccacaaaaaacaaaaaattagccaggcacggtggtgcactgccagtagtcccagctactcaggaggttgaatgggaggctagtttgagcgcaggaggtcacggctgcagtgaactacaatctgcactccagcctgggtcacagagtgagacactgttggggggaaaaaaaaaactgcttaaagatgtagactctctttagaggaaaaattgcaaatggataatgttgtacttagtaacagtttactgaaaccctgaagctaaccataggtccatatgccaaaatcaaattctgt

SEQ ID NO: 61191 - DNA, 735 bp, Homo sapiens
cacttttaaaaagccaagccatcttactttactaaagtctaataaaattatcccaatcctttccaaacagtagaggatataccacagttgaagtattttcttacatcatttatcaatcagtctaagtactggcaccagttttgtgcccatttgttttactaggctacaagctaccagaaaacataagcactgtcttctactcactctgcattcccgacaccagcctggccagagttacctatttactagacactgagtagacacaagctgaatgattaacagatatccataaaaactcatatgcgtctttaataagtgacttattaaatttacgagaacacaaataaagtaagccccaacattaacatcagtgctccctgagaagagtcctggtcttaccattagcctgtggttttactgacgaggtgccttgttgcatgtcgatctcctccatagcatcactcatcagatctcgtaacatttgttgatctgcttcaggaagtactggaccacgtgaggatgatcgaccactggaatctacctatagccaaaaaacctaattaaaaataactgaaaatgctcttaaaaaccaaactacttacatttattttatcccaaaaatacattacattgtacaaaaacatcagaaatagaaacctactcatttttctatgcccagcagctgttatatttcaagtttttagtattatcaccctaacaaatactggcaaagag

SEQ ID NO: 61192 - DNA, 2616 bp, Homo sapiens
ccaaaagtgaatatactttaagtaaaatgctatgcattgaacacacaaatgcaggtacgactgcatgtggtgagtcgaaattcagatgaagcacctgtatagcaatgagtgaattcacagcctctagatgacaagtagaaggcaggttttaaaatgtctgaaaattgcaacttcagcgcttttgcaacacctgcttttacgatctgtcacgtggagcaaagaggcataactcaacagcactactagggccagacgaccattcacaggctggatacacaaacctatcttgtaaacatataatcaagcaaaagcaggcaaaccggcacaagaggccttcacctaactttcttccagatggcaaacgctgcacgatgacaaacaaggcaaacatggtgcgcaagcagccaacccaaaacaaataactagggattctgacatccaaaggtcctcttcatccttaatccttccagaatgtcatcccacaaggcagggtttgtttgccacaaaaccctgcggcccctcacatcccgagggacagttctggtcacctcctcccacggacctattgagcctgcttcacagacccccgaagcactgactcaattattcccacagtgtagattccattacatctgttaaagtttccggaacacgtgatttaggagagcaaacttgttagaaacagattaaacaacactctaacacatttctctgagccgtgtcacactcgggtccaaacaattcccaaggagggactgactgtcaccaatcttggatggcactggttcaaagcgccctaaagaggggagcgagccccgcccggctcgccgccggcagctcttacccatttgtccaaggggacctgggcgagggacccggtgccttggtacaggtccaggctgagctgctccaggctcagcttctcctgcagaaagtggcccaggtacctctgcaggaggtaccggcaggccctcttcttgatggactccgaaaacggccaaggcatagtgactgctggcagctgggctgactgcggctgcgggttgcgacggctccggcctcggggtagcgactccggctccaggccgcggcggggcctaagcctggggcggcccctccatccctatttggtgccgggagtccctcagggagaccccatcgccggcgccgcaccgctcgcgctgggcctggcggaggcaagacgcagaggggtcctcctggccccaggccaggggacttccgaggagggtcccaaccggctcggagagagtgcaagagagcgcgagaggaggcggcaggggctgaggcagccaccgccactgccgccgcgcgacgaatttgttgtcatccgcgaggcgcgttcccggctgtagggacgctcctggcgcgttcacgagacccagactcccggcgcgccgccgggcgctggcggaagtgacgccacactggggccgcggaaggcgggcagaagggcgggggctggagcagttccggctccgagggggcggggcggaagaaggcggggagggagggggcggcaccgccggtcggctccagtcgcctccggaggaaggaagaagaggacgccgggcgcgcaggtgagcggcagccggggtggctgcgggcgaggggcggcccccgagaagggctaggggctcggggcgccggcgggccgtcaggccttccggatggggacgcgacgccatgcagctggctgggccgagaggggcggcaggctgcaggggccccgcgcccgtgttaagaggggtctgggggccggtctggccggcctggctctcccggctcccctcagacctcggcgccccggaaacgcacacttggggctccgccgtctccgctgggaggactggagcccttctcgagcatccccgcccgcacccgagcattgaccggtgcccattgtcagcaagttcttcggcccccgcctcattcaggtattgtttctgaggcagcttcttcgttgccgtttgcctggcggtttgcagagcgcttctcgcatacgctcgcttaatcctgggtgtgtcatagcaacgatcaggaaacttgggttttcgaagcatctgtgggcaaaactgcattccttgagaaatgctaaaggctcctgaccccgccggaacctgggtgaagaacttgggctgttctggcagtctgcgcaatcgtatttctgccttttgggaggtaactcctgcagaggcggagccggctgttaagttaagtcaacctcgaaaggcctgggtgcgggtgttctatggcccagaagccagatgtccttcgttagaatcccggcactgacacctattagccgcccagccactttgagcggccactgccctccccgagcccacgttgcctcctttgccgagtgtgagcggattaaaatcttatgtgcatggatttgttgggaagattaaatgatatgagtagggcacgaacctgaacagagtcctgaaacatacagctgtttaatcacagtgaattaagacgaccagtttaaggagtgaaatgtttactgtctcggcaactttcatgaatgccttggaaatacagcccaaaatattggtagatggagaaacatctggttcccctttccacaac

SEQ ID NO: 61193 - DNA, 2005 bp, Homo sapiens
taatgcttaaggcatgaaaacagttcaatatgatcaggctattccaagggaactgcgtattcttagtccaccacaacctttatggtccagtgatcaccgaggtgaatgttatcttttaatttgtggatttatctcagcaactgcatgtataatctcttgtggaacggtcaagtctaaatttcttcccttggtgaatgtgagcgaatcccgggcgcctacgggctctggtcgcccccagccgacaccaggggtcttcccggaacgtgcgtctggaaacaacccccaagggagctgagccggcggaccaagccgcacctgccgcaaggcgggaccacgctagcgtcgctcgggtgttcgggagcccgaaactccatggcaacagcttttcttcgcagctgaggcttacgtcccgtcgccccggccagaccaccccatgggagcgtgctgagtaactcccacgtgtcggggagaggcctaggctgtgggccattccctcttcttcagaattctcattatttttagtcatcgggtcaagcggacacagggatgtgtttccagactttccgaacaatggagattaaaaaggcacagcaatcacatggccccccgggacagacgcccagggagcttcggaaagaaaccatgcactgcccaagggctcccagtgggcagcaagccagggtgagacccgggctgcacgcgcggcgccgcggaaagcactcgcagggacatccgcctggcgcccagcagccgacagcgcgcgcagttgcgagccctgagccccgcttcgcccggcgcgccccgcccagcccactgcactacacaccccgccctgcccggcatgccccgcccaaccccccggcacgactcgccccgccctacccggcacgccccgcccagcgaccggcacagcctgccccgtcccgcctggcacgccctgattagcgccgggcacgacacgcaccgccccgcccggcactccctgcttcgcccacgacacgcccctccccgcccggcaaactgcccggagccaaggccccgcccccagagagaacctgccccgcctccctggcccgggccccgcctccttggcaagcgagtggcgctttcaccttagcaaccagcgcggctcccaccatggctgaagaagaggaaactgctgctctcacggagaaggttatccggacccagagggtgtttataaacctgttggattcctacagcagcggaaacatcgggaaggtgagcggcggcggcggcccagagcctcacgccagctctcagctcccagccctcggcccccggtccgcaaacccagcgagggtctgcgccccagggcgctgtcggggcctttcctcagggagggtcccgcgtcctgggcaccaccaatgccccctggaccccagtccgcacccaggctggtcaagagattctacatggaagctcaggtgtctggaaatcactggtccatcccctgttcctccttttaatgaggggaaactgaggctaagaggcagggacttgcccaagatcacatagagagttgaggccagaacctggacagagactccaggtctcttgccccctcctaggttctctttctacccttccatcgattttgaagcaggcagctaaacgagaaaataaatcaattttttttttttgagacggagccttgctctgtcgcccaggctggagtgcagtggcgcgatctcggctcactgcaagctccgcctcccgggttcacgccattctcctgcctcagcctccgagtagctgggactacaggcgcccgacaccgcgcccggctaattttttgtatttttagcagagacggggtttcactgtgttagccaggatggtctcgatcgatctcctgacctcgtgacccacccgtctcggcctcccaaattacaggccgagtaaatccaaaagggattacaggcgtgagtaaatcaaatttttatattgcccatgaagcgtttttcattcatccatcccttca

SEQ ID NO: 61194 - DNA, 1208 bp, Homo sapiens
ggcacacaccaccatggccagctaattttttgtatttttagtagagacggggtttcgccatgttggccagactggtctcaaacccctggtctcaagtgatctgcctgccttggcctctgaaagtgctgggactacaggcgtgagccactgtgcttggccaagcattatttattgacaaagacatataattggcctttgcaagggcccagaaatcttatccaaggcttaacctaacagttaagtaccaactgagctcttttcacgcttggggaggtgaccacacagaacaagaattggagcagagatagtgcccagctgagaacactcactgaggcccccaggctccagagggcctgtcctctcactctgttcttcccccaggtgtgagaggccaaacaggttcagcagcctctgtcaggagagatgtaagaggggccctgggagggggcagaggaagtggtcgtgtggggaagatacatctttagaacagccagcgtccctcaaagctcctcacccacatgtgactccccacttccccacttcctacaagattggaatcattcggttccttttaactttctcaagtgtgtccaaaaatccctcctatccgtatttacctgagacgaaaacatggaccttgcctatgtttgaacaaaacaagacctttgaacccttggcactgaggttacctcacctttccctcacatgactgcatttgttatcacatgattccaatgattctagcaaaacgagtttcccagtcccacagtgaggcccctccatgtcctaactccactcccatcggcccctgatggtgcagcaaaataagggctttgttacaccatagagtgtgctaattacagattttgtgctcactttacatatttcaaaagcattgtgaaattactggatctagttggtaggattcctggtgatcattggactatcaacttttctgagtttcaaaataaaaaggggaagaaaagtctgtaaatgtaccaacttgttgatgtctctactgtacatgggtcattgtaaaatcttggcttgcagctatctaattttttttttaaacaaaacacatattattactgtaatcaaggcaaaatttcttaaaacagttaaccttggccaggcttggtggctcatgcctgtaatcccagcactttgggaggccaaagagggcggatcacgaggtcagaagttca

SEQ ID NO: 61195 - DNA, 1028 bp, Homo sapiens
gatctctctcatgaggcagacttcctacaaatacatagcttttgcactctttcctttttttttttttttttttttttgagaaggagtttcactctgttgcccaggctggagtgcgcgatctcggctcactgcaagctccgccacccaggttcatgccattctcctacctcagcctcccgagtagctgggactacaggcacatgccaccacgcccggctaattattttgtattttttagtagagatgggatttcaccgtgttagccaggatggtctcaatcttctgacctcgtgatccacctgcctcgggctcccaaagtgctgggattacaggcgtgagccaccacgcccggcctgcactctttcctttgtgaaatcactgcttgctgtttggtcatcatcagttaagacagtacagtttcctggggatgaggggacagaagccaggttgtcatctcaaatgccgtccctcacattcccaccactgctcaggggagcagctctctatttttaaacatgttttagtaattatgaatatgtgttcatatgaacattttaaatattactggcatttgaaagatacatttaattttttttttttttagaaaaagcaggatgacatttttaaaagctatgtaggagggctgtgctcattcattttcaaacagaaagcgcagttgcctgccatacagctgaaccctggccaaaggtcatgagattatctctaagagatcacatttctcaagagaaaggcacttggactgggtcctttgtgtactgggtcatgccttgtaagcatcccataattaccaaaaaatgctgctggaggtcccttcttaattactgagcactttcgttccgaatcaagcagaaatgagtggctaagctcagggcctgaaataaactgagggaggcattgaagggaattgcagctagatttctagattaagtgcctttaatttaacaacaaagcctttgaaaaatgaaaatagacttaggccgggggcggcggctcattcctgtaatccc

SEQ ID NO: 61196 - DNA, 2763 bp, Homo sapiens
gggtttccctatattgcccaggctggtctctaactcctgcccaagcgatcctcccacctcagcctcctaaagtgctggatcacaggtgtgagacaccgtgcccggcttacattttctttactgcaatatatccaaaatatttcaacgtgcaatcaatataaaaagtgatcagtgaggtatttcacattcgtcgaactgacacccgtgcgtattttgcacttccagtgcctcctaaacgaactagcctcatttcaagtgctcagtggccctaagtggccaaggggctacactaatggacagggcaggtctaggtcctgtgtttttcccattcggagtcaccagtcctactagacattctgtgaaaaaagggaaagcctttgtgaaacttcctgaggactcacaaatgcacattattacatttagagtttagaactttggttaaggcagcgtcctgtatttgattctttccctcttcctctccgctaaccccctatgtgacaccgtagaacttataattcgttctaattcgcagatggagggcatatgagagaggaggctctgcctcaaacactttctcaaacttttgccgaggggtggcgagaaggtagacttccaggtcccacccgatatagattaagggctggaaacacagtcaaggggaaattatgaccaagacaacctttgctaaaatgccagcggtgactgccattgatgttcctataaaaggtcagctctgtcaggaagttccagtgcatcatttgttcaaaagtaaaatcagcccgtgttccagaattcgcggactgtcgtcagtcctaacctacacatttattcgttcaacaaatatttcagcgcctgggtcaggcatcaggaatacactggtggttaaaacagacggaaagctccatctggtgggacgcagtctgggagggaaagggagtcctggggacatgttttcgtcggctctaggctaagcacctctcgccgtagcacacggggtcggcaccgctgcccggcgaagtacttgttactttgcagtccagtacgaagcggcggagtaaccggttccaacccaaggcagcgactcatgcgagtcgttctaagcgccgcgctggggggtacatacggtgcacgcgtgggtgcctcaccccctggcagcgcctccagggacgctgctccgggaaagagcagccgccgcgacctcaggcggcgggaaaggtgggacctcacaatgcgccggaagcggtgcctcgtggcttgggatctctccgggttcttccttgcgccgtccacgccgcactgcccacgagggcgtccccgcccgagggacaactcaccgcccggggcctccctgagcgttcccttccaccatctgacacccactgctaagtgtgagaggacccagggggtaattgccgggccgcaggcggccttaggaactccgcttcccgtgaggcttcgcggcggacggcgctggtgcgcaggcgcacgcacggcgtgcgtggtggcgtcagcagttctagaacgttgctgtggtagcgctcgggcgccatgttaggacgaaggggaaggaggagaagcgcttaaagcggcgggagcggtgcgggagaggggttggacccagggctgaggcaggcccccccctccctcccgcctcagtggatcatgcccagggcggcagcggcggcggttgcgggggggaagtgactgggcggtgccggcgccggagacgatgccgttgtaagtaatttgtattctgttttctttcgctcgccggctgggccttggggggcgtccgggaaggggaagaggtaggcggagagggtggcacgcgagcccgaccctccccgctggtaggaggcaggcaggactggggaccttcctgtttcctcgctcgctcgccgccgcacttccccccgtgtgctgggttcccgcgtcccccgacccttcctggctgggtcagctgccgtcgggccgggggccttccccttccggaattgctggcggaacctctaactcgcccggccactccagcttctccgccccgtccacaaagaaaatcaaaacaacccgaaaacaaaacattgcctggtggtggggaaccacgaccctgctgcacgcgggatcagcacttggggttcgggctcgctctcggcgcccctcgggcccattcgatgttgcttttctgttcctggtctgtctcagtttgctcactctcttcctcccatttccagatgcctgtcttgtgcgccggagttagcccctttccactgaccttgtctgaatgtaggagcacgagttaaaagcccagctttgagcgttgagtccgcctgcctccacctccgcctccctagcattcacaggcggtcggagaagggggcacttcacagggtgccctcctccaaaacgacttatgtattgctttccctgttttgttttgatggggtaaccaggtttcattctgtttccttctttctctatctctggtgatactttttttttcctggttgtaaggcttgaagctagtctctttatgctttctaatgccactgcgcctttttcttttcttggtgggtttttaaaaagtttttttctcccctccccctttctgataatgagatataatttggcagctcattgccagtagattacggattttttttttcctgcaaatatacagcattgtagaggcctaaatagtgagactgcatttcttccatttttgaatattgaagcgtaagagtgcctctttgagaccagggaccg

SEQ ID NO: 61197 - DNA, 1419 bp, Homo sapiens
agcaatatttgctttggatttactatttctagccacagagtattgcactaaaaagctattttaaaaatctttgtttatttcacaaaatagtgttttaattagcataaactgagtttttagctaataaccaaaagctaattattgttttaatttgaagatttgtttggtgccccttgctgccattatagggggttattttagcctccttgctataactattctaatttaatggtgaacggtagaattagttgactttcaacttttgcaagattattaatatttactttaaataatttaacatgttgaaacaagtttataaaatataaggtaaaattttacggtctcaattctgcttgattgtgtttctatgaatgtgttatggacataatatacaaatagttaaaaaaaaaactgggtgtcatggtccatgcctgtaatctgagctataagggaggatcgcctgagctcaagagtttagatcagcctgggcaacagagcaagacaccatctctaaaattaaaaaaatatatatctttatctatatgactacatattgtaaatgatgtgcagaggtgcctcagtatagagatgattattataggctatgatatcagctatctgggttcatattctggtccagtaaacttagtcaagccttctttcttagtttaatagtaagagttgttagaaaaaattgggaataatgtaaagtgcttgacttaatacgtgggttatgttgaaatttcagtagatggcagctatgatcgtaattatattctgcaacttttttttctcctgatacacatgctgctaaacatactatctcattgctttattttggcatagttttaagttgtaagcatgtactgtaattaacaagttctttactgatggatatttaggtggtttccagttttacttcattgcatactctgctcagtgaacaaccttgattacctttctgtgttagttctgtgagaaaggttcaaattccagaacctatgagatcaagagagttaatttacaaatgaatgaactaagtaccaaagaagctccctttttaggggatagccctgggatagacactgctcatttcaagcttatttctgttgtgctggaattcgggtccctattttggtctgtcttccagtctttgcacccatactctagcagtggctggaaatgtatatattttttattgtttgttttttgctttttttggggatggagtcccgcttgttgctcaggctggactgcagtggtgtgatcacagatcactacagcctcagcttcctgggctcaagagatcctcttgcctcagccttctgagtagctgggactacactacaggtgcatgccactacagctggctaatttttaaactttttgtacagatggggcctttctatgttgcccagg

SEQ ID NO: 61198 - DNA, 1536 bp, Homo sapiens
atgaccttcatgatgtctctgtgttttgtttctgtatcttttgcatgagaaagcaataacggagccagtaattgtgttctcgaagcactacgttgtcagtaaaaattaaaatagcataatcattaaatactcttattttactacgaatccccccataaattgtgatttctgtttgacagataatttttctttgtttttattttaaccagtgtagaggaagtaccttggaacatttaaactaataaacatgtatgtagatacttttaaaactatgatataaaagagacacagttacatgtaaggagaagaataaaggaattggttttacaggaaagtgctagtaccccttaattcctggaatcaatgatgaaactagattcaaactttgttctattcactttcgtataggactgtgacggggcttctttcactttaagaaagattaatgtttacactgaacaaaccttaataatgtcattttatttgaacaaattcacatcattagaactttggtgctttttctaaagcttgcttaatgtttcttttaaaagttttaaactatgcttcagtccttgctggatagtacctgtaagttctttgactggttaaaagatatattactaatcttcactgaagtttttgtgaaataatcaaatttttttaggttgtaaaaaaagcagcaacaaatagaggaaattacatcaggaaaatttgcatttcagctgagtgtcttgtgaaaacttttaaaatatgacaatgggctagttttatccataccaaattctatttatatttttaattgttctccagaaatttgcctctttaagataaagtgatgactatcattaggcttttggaggtgttcacagatttgaatttttaaagacatcctcatataaaatactccaaagattgactgtacaaccaaatggaaatgtttagtcttcccatgagtcacaagttgattcaatcttatttgaggcatatcatgaaatactgtcagttgatatgtgtaggattttaaatcatgtgaaatatacctgacattcttggaaggagccagaaccatggagaaaaatctcgtttgttttaaaatgcaaactaatcatcttccagaaagacttatcagtgttcctcaagaaaaaggggtaacattgttttgtgaaatttttggagttctaagaaaacagttttttaaatgccgcttctgagataattcaagttaacatgtaactagcagtaaatcattaacattaggaaatgtgaatacttacttcagttgttagatttcactaggaataaaggaaaagtattaggaaaaccaatgtattctctaaggtgcaagatgattttataatttcatgtgtgtatacagtaaccttaaatttgttaaaaaagttaaaaacaggaaactaaatcttggtcttgaattacgtaaacatagaattgcaaacatttttgactaagatatgccagctttttattgtacatctgagttatgatcttcccaggtgagatgaaatggtcttcaagaga

SEQ ID NO: 61199 - DNA, 968 bp, Homo sapiens
tttaaagtactgcctatagattatttcatttaatcctaacagaaacaggaaacttattttacacccaactctctgccaatacacttaataaatcaagctactacgaacaaggctgtaaaccacatttcctagaagaccagggagcagaaggacggggatctccctttgccgctaagagactccaactcccaggatgccttgggagcgctggaccacagctcccggcattcccggggaggcgcggggctagcgtagcctccgccccgcgcctcgcgttaccactcgtcccgcccctcctcgtcgcctccgagccaatgggaaggctccatactgcagggtgcgaaggggccggcgccgctgccgagttacgagtcggcgaaagcggcgggaagttcgtactgggcagaacgcgacgggtctgcggcttagggtagggaggccgcaggcgacacggctcgaggactcgcgcgccgagccgggggcgcggaggcgggcggccggggctggggccggcactgggccttccgggcggcctgtgggtccaccggggtgcgggagtcgccgtcagcctcggtcgccccgcgggaccgcgctccgccgcgtggcttccgcctgcgcgggcgtccgctccttccttgtctcgttcaggccccgcaggcgcccccggggatgcctggactggccaggccggcccccatctgagctccacgttctggacgcgcgtggtgtcgcggccgagctcgcaaacgccgcctcgggcctcaccgggaagccggttctgtcaggcggggctccgggtgaacagcgcaggcgaggcccctgccccgcagagctcactctgtagaagggaaacaacacacgcagctgcgatgttttgcggatacggaaatgctttcttagaaacgggacaggcagttgcgggctagaggaatgggggcgaggctctttaggttaggtgatccgggagg

SEQ ID NO: 61200 - DNA, 975 bp, Homo sapiens
cttacgatttgtagcccctttctagaattacctcaatgttacagataaatcagccaaaacttaatgtcctccagggctttaggccactcctaaagagactacagtggagagaatggtagacatatggagtcaaagacctcagtttaaattataattccaccactgatacgcctcagacaagttggctgacctctttgagttcttcttactgctttggtaaacccaggacaaataatgtgccctgtataaggttgctgtcaggatcatatgagagtgccaaggctggtgcttaataaatgacgcttctttccctctccccacattcacgtggaaaggtaaacattacgtaaaataaagacaggcaggtgctatgatggaagaaaagagaggaattcctttggattgactgaaccagggaaggcttccaaatcacagtcacatgagttggactctgcacctagggtgaatgtggcaatcagcctcaagaacattaagagccaaagaatggagttggaaaaacacaggctatggggtggtgggaaagcatggggaatagaaagtagtgagggtgaaaaggacagctttggacagacaacaaaggcctcataggtcagacgaaaatgattgtacttgatctggaaggcattcaaatgatcggcttagagctatgagagggcaagtagtaaggggggaggtgggccacatgtcaaggctgcattatctccttccctctccctctctccctcactccatttatttcttcactaaaccatcatacaatcacccatccatctatcccacccaacgattcatccactcacctaaccacccagcaatccatccatcctatctttcacccagcttacccaccctacccatctatccatctactcatccatccatccatccatccatccaaccatccatccatccaaccatccatccatccatccatccatccatccatccatcctc

SEQ ID NO: 61201 - DNA, 1177 bp, Homo sapiens
cggtagacttgtggctagaacttgttatttaattcactcgcaaaggaacacatgtattatctcaaatttgtttttaaatattttgatcgctgtatttcaatataattagtttcctttgtgatcttctggttttatttaatgcattaaaaaaacattctgaaaagagggtccttcaacgtcctcaggtccacaggacaggaaggattcataaccctgtcctggagtgcagatgtaagcgaagcaccctgatccagatgaggaaactgaggttcaggaaggaggttaatggcccctggaggactctgattcccagactccctcggaagaaatatatgtcttccagaagaaagagaaagctcctccccattgctgccagccacctctgggtggctgtttactctgccaggtggggtccctcccagggtccactctgaggccgcatgatggcctttgagacggagaacaatgccacattgtggccctggcttcagataaaagagaaacttggcccaactgcccaggcaagagcgactgtccccttaatattaatgcagggagggcgtgccctcgtccacaccctcaccactctcgccgttgtggcggttgtggggagtgtgatcccactgccttctaatgggtggtcaaaggccagcgcgccgggcacttttattgtcagccgcctcagtaatctttaacctctgctggccaaagggctgaaacccagaaagacaaaacaaacatgggttgggcaccagagaagagtgactcaagtgaaccaaggctggagggagctagttcaccccttcatccctgccaagccttccgacacctctaagcccacaatgctggtcagaaggtaggcaacacatgcccaaggcccacccaccacgatgccattagcacaactcccttggtggtggagggggtaggacccctgggttcggggaaagagggcggatacactccagccatactcacccctggtctgtggccaaggccaggcctgctccaggagaaaccacttctgcgtgggtcagccaagaaggaaaaggggcccagaggggtagtggagtgcatggtctggggcatcagacaggcccagggccaagactgatcccactgcaccattcatctgattgccctcctggggcctcagtttcctcacctgtgaaatggg

SEQ ID NO: 61202 - DNA, 770 bp, Homo sapiens
tttttgaactaatttcaggctttcagaaaagccgtagaaatagtacagattctccctatatccctcccccagcccccgctccagtgcacagcttacataacccaagtataatcagcaaaccggggatgtcaccaatgtgcaatactgttaactcgactgcacacctgattccgactgcaccgttttcccacgaacgtccctcttcccttccagggtcctgtctggggtcccacattgctcagtccgcatgtctcctttgtgctctccaatctgtggcagctcctcagtcttagtcttgcgtgatcctgacactttggaagagcatttttcagttattttatcaaatgtccctcagtttgtttgtctgatattccgttttggatggaagttgtgcatttttggcaagaatcccacagaagtgacgttgggtcctcctcagtgccccatatgcgggttcatgctgccaatgccttatcactggtgatgttgaccttgattctgttggttcaagaggtgtctgccaattacaatgttgtaataaataacctgtgtgcatctatttttgttggagttgtacattcaggatagattcctagaagtgagattggtgcattgaaaggtacatgtttatggggctgtttggtattgccaaattcccttcaaagggttatattaatttgcatctccaccagctgcacaagaaaatatctgttctctgcagcctcgccaacagaatgcaaggtggtggtttgacttccgttaatctgata

SEQ ID NO: 61203 - DNA, 2391 bp, Homo sapiens
ccgcgaatgcctttgcaacactgaaatgccctcctcccaacaccggccgggcaggggtgagccccgcagccaggggcgcgcgtcactgtcagctccttttcccaagtggagaccgggaaaagacaagagttgcatcgccgggctggagccacgaggaggaagagttaacgccggaatgacaaactctaaagcaccgaattgcctctccctagtagggcactgcgcgtgtggagcacggccaggggcgcgtgggaagaaagacgacctatttcctacgtccgtcttcctaactggacggcgcgggaggaggcgggggctggtccccgggcaccctggtgggcaccgagaactcgcagagaggaacataaaaccgcacagccttccccgagcagcggggtgacgggaggaaggaaggaaatgggagcgcgacccggccgcgcgcagagccgagccgactagcgcgaggggcccgggccccacccgagagcaggcgcgagggccggggacagcggggcaagctcggggagagcgctgcctgcacctggcaccacctcgagaccgggtggcgcggggcccgggagcgtgggcgccagaggggacagggcagcggcgagcgcgcgcctctcgccccgcagggcgcccgggcagaggccgaccggcgccctccgaccccgccgggccctcctcgccctggcccccgagcgcacacctgccccttcaagccccggggccacagcggccggcggggaccctggcgggggcgcgggccggacttcggccgaggggcgctggccagggcgagggacggcctcgcagagctcggagacgcggcgcgagtttcccccgcgggccgcgcgggcgcagagaccgccgccagcactcacctgcccgcttcccctagcgcagcgggaacgacgtactccggcccggaccccgccgtccgcctcaaccaacccccaggcggtggcggcggtggcggcggcggcggccggacgggaggggcgggacggcagcctgagacggccccgcgaccgcggcccaacgcttctcctcccgccccggaccccgcccccgggccgcagccgccgccgttcattggcccacgcttcggacgcatgggcgcggccccgccccgccacccagccggcgttccgttcggggtcctccccagccagtgggctggcagctcccgggggcaagagcggccggctcagccgccgccaaccacgatgtcgcaactggctgcgttcgcccccgccagagctttgattggacgaatctcgacccgggccccgcctacgcgcccaagttccgttagcaggttcggttgctccagaatgccttttcgccccgaggggcgggaccgacgggatgggccctgtggctggctcctccctctgtaagcagcagccactgacccgcggggcgggcggggaggagagcggcggctcgttcctcttttgagagctctgctttcttcccattggttgacaggcatcctactctctccgcccctccggtcgcttggtggcgtctcaggacgcagcgtgatgacgtaggtccccgacattccatatacaagatggccgcagtcggcaaggagagacgtcgctgaggggcttgcctgaagcgaggggtgagtgacccaccgactgagggcagcgccgcccacctcccgcgtatctggaggtcggagtaggttatggccaaccgccgctatccactggcggagtctctctttccggattctgcctccctccgctaacctccggtacacattgaactttgcgggcgacgcggggttgtggggcgggcgtgtagagagggtctgaggcgccggggcggggcagggaggccggactcaccctagaactggtagcggccctcgcactggggggcagtcagagttggggaactttctaggggttgggcaaaaggggcagcggtgttaaccgcgcacagtctcacagccacagacttctcatatctccccgattatttcgcggcgtattagtcccaaccttggctaggcctgaaactttttggaggttgttccatgtctagggtactccgactttggagttttggagagccacgtaacgagggtgcggctaagatgaggaaaaggcacttccgggattagatttcgttcttgcccagacatcgtctttacggacccgctcctggtggttgatttggtttgttatgagagaaattgttctttagaaaattggagcgtaagtctagaggttatgtgacagctcctaaacgattgtctgcccaagataggctcggtaatgctccctaaatttagactgccagttaaacggagctttcgctaagtcatctgaggttaggaactatttctaagagcatttcttaagggtggtc

SEQ ID NO: 61204 - DNA, 1258 bp, Homo sapiens
tggcagccaacccctggtgccctccccgcccgccctggcctggacctgctcccagggccttgcaggttgaccggctcccgcctccacatggagaccaggccccacccctgaggctagggggcctgggagctgctacctccggaggccccccgagccctggggtctaggaaagcgtcattgaggtggggctcaacccacgctgagcctcggtttcctcgtctggacaatagaaagggtcctctgccccagggtgtgtgcagacccctaactccagcccaggctgttgggtctctgtagtgtagggaacccaacagggacgctggggattccccctggggcaacgcaaggcggcactccccgcgccagacagcagggggcgccagtcgcacacatacggccctgggagacctgggcacctacaccttcctgcaccttccgctgcagaacacaggccatgtgccagccggcccctggcacctctggcctcatctgcaccaggcccctgggctgcctgtcctgttacagcccccggctctagggggctgggatttctgcagcacaggcaggagggaagccaggagcgtgggggtgggctgtgcaagccgcccctctcctgcccgcctcactgggcagtggtgggtgccagcgagggcatggcccgggatcctgaaagtgacaccaggactagacaaagccctagtgttacctccagggcattcccggggtgcaggggcccccacctgtactagaactcagccccctcgggccacacacacctcccactgactaggtacccacttagggcagatgggcccactgagtccttgccacactgctcccagcaggcactatctttttacatgttcatacatgccttttttttttttttttttttttttttttttttgagtgagaggatctcactctgtcgcccaggctgaagtacagtggcaccatctcagctcactgcagccttgacctcccaggctcaagcaatcctcccaccccagcttccagcgtagttggaactacagatgcacaccaccatgcccagctttttttttttttttttggtagagatggggtttcatcatgttgcccaggctggtcttgaactcctggactcaagcaatcctcctgtcttggcctcccaaagtgatgggattataggcgtgagccactgagcctggcctacatgcccactttacagacaaggagagtgaggctaagagaatggcttgcccaagaccaaacagct

SEQ ID NO: 61205 - DNA, 1553 bp, Homo sapiens
cagcgacagcagccaggtcccaaaagaagaaaggaaagcagaggaaaagtaaattccaggccccgggcccatgtggcagtgaggacctgaggctaagaggaggccaaggaggatggccttggtcccagacaacctggaggtctcatctgaaagcctcaagggtgggcactaacccggaacctgggggtccaggtgggaggctcaggaaggagtggaggaggcgaagctcctcccaggcccggctagcctgcgccccaaaaagccccaaggttgatcaggctgtgagccccctctagctgcccctgcaccactggggaggaggtaggcaggacctgggccacactgctaggggtgctgcaatcctgccctacggcccaagcattctgcggaggctgacacacctgccctccacaagggtctctgggggccttcatgagactgaccccagcaaggcaggaccaggcccttgcagggagggggaggcgcaaacctgagccccacagtgcttcagagagagcctgggcacagagtcagcaggtctgtgctggctgagtgtgttgggcaggagtgtctctgcccaagcctcagtgtcccctcagtccggtgggacgaggtcagactctctagacctctcaaagggaaggccaggcaccctgaaagcccccttctggagagggtcctggccagctgaaggtgctggcactgacggagctgttgctgtctgaggtgtgggaggggttgccaagccaacctccacccaggccctccccatcctgtcaccacttcacgtgctcagctgccaatgacccataggccaggctgcctttcacccagtaagtgcagctggaatcatcgccctttggacccaaggttctccccgcaagggggccacgagcttccggggctcaagggtcacctgctcaccttgggcaaggcttggaaaacccggtgcttcctgcatggctcttggcaccgtgacatcactgggtgacccaaaataggactaacagaccaggagctcattgtcctgctggccagggacttggttaccccaggccaccagggatggcctgggggtgtggccctcaatgggagaaggaccctaggcttcccctagcagtgccggatagaagggaggagaggcctggggtcagctgggcctctgtaatcacagaaacactggtctcacatcacagctgtgtgacctcgcaccagtgactgaccgtctctgagcctctcatgttctcatctgtaaatgggaaggatgaggccccctcactgagccgccgagaggatgctggatagattccagaacacccaggccagagccctgcagctcaggacatggggagaggaatgtcacaatcttctcacaggcccttcaaaagtcttcacaagcacaaactccgggttcaaatctcacacgggggccactaattccctgtgtggttttttttttgtttgtttgtttttgagacagagtcctgctttgtcgcccaggctggaatgcaatggtgcgatctcagctcactgcaacctccgcctcctgggtt

SEQ ID NO: 61206 - DNA, 1481 bp, Homo sapiens
ctgaagaggactgtggccatcccagcacacgagctcccccatggcactgtgcttctaaccaagcccgggactgtggccatcccagcacacaagccccaccacggcactgcacttctaaccagatccttcgtttctagggagatacacccccacccagccttggtcactgtggcaggcaaggcctccgcctgagtgtgcccgcccggcacagcagaaagcctggcactggagtgtgcatgtccctctgcaggctcctgcagggctgtgtctggcacagcgtgatctgcagccccagctgtggcaggcgggcagggggtaagcgcatgctggcagcccgcacatcactgcatgctgccagctccaagcaggtgacagcaggaaccgttagccttgctgtcaaatgaggaccccggtcaatgggaagccaccacccacaggcccaggtctgacctggtccccacccaggctcaagctcctcttctcgggttgctccagcctttctgcaggatcaacacctaactgggctctcagaaaagccaacgggcatgcctgaggtcccaccttgaagctcatcatcataaacggggcacagggcacccacagtgagtggagtagagttcatgactcctggtcctaccacctccttgctgtgtgactctgagcaggtttctttccctctctgggccccagagcacctctctgtacaagggagttgagagcttccaaggacccttctggcagcacaggtgggcacagatggacataggcccatgggggcctcaggtctggtgcctgcccacaagactgtgtttctttaagaaaggtatgagcaagaacagacttgaaggtcaggggagagccagtgccaggatgaggtcaatgtttggttactgatgagaacaaacaggcctcagtcctgcagagggtggccttgctggaagtgaggcgggcgggacagggagctagggagcctccctctgtgtaatcacgcccacaggtgagaggtgacagcccagctgctgagaactgccccaagccaactcctggtctcaacagggaggatggcgtgggccctcagagcctcatgggatgggacaagtgggccttaaaggtcagcctgtccccacctgtcctaccagcaggatgaccttgggactctagggtgtccgccggcttgtccaaggctacaggtcaagtcagtggcatggccggggtgacaacacgtgccctggccctgccccacagctgtcctatgagcacacacacctgggccttcaaatcccttctcctccctggcacacagccacttttttctcccaggccaagtggcaataatgataataagagccagggattacagccctgttggatgaaataaaaatcctgagtccacgctgataaaaaggcatccatacatagctcactgagggaaaggggaagcggccctcccaggagaaggccaagtattaaatgtggaagga

SEQ ID NO: 61207 - DNA, 621 bp, Homo sapiens
ggggtgcctgctgccacacgcctccagggctcccgacaagccacatggccgtagcggccctggcttcctgggacccaaggccaggaggaaaactctgaaaggtcagatgtgaaaaatgccaccagacccaaggtcaggcagggagacccagtgtccaggaacacaggccttagggacaccagctggcacctggtcgctctaggcacagagcatccattcctacaaacccatgtcacagagagtggacagccccgtgaccagctggactggcatgtggctcagcaggggtggggcctgggcacctgcccagccatcctccacggcagcagagcgctctgctggtacttggtctccctccaggggacacctacagggcagtccctcccccactggaaaatcaggtcataaatcagcattactgtcctttgttgggcaccaggggcgggcgccatgcagtggctcctggctcagaccttgcaggacctgctctgtgctgcgagcgggcagaccctccatttctcagtctgcagatgaggaaacagcccccaggggcccaggcgcacaccacagccacccagggccccagcctggagaacccacaagctccaggcactgtgccca

SEQ ID NO: 61208 - DNA, 910 bp, Homo sapiens
agggcgtggggacaagtgcagagaaaacactcactggagaacgtgcactcgtccatggaagctccagaaggtgcgggatctgcgtggcggcagctgccacagggggcaaccaaccgccttccaaggagaggggacgcagaccctctcccggcagcccgcggcctctgatcatgcagccaggcggctgcacttggcttttagtcatgggccggtgagctcactgtcccccaactggttttccaccaagagctgctgaaactaaagcatggccacttggggatgatgggacttggccctgttcttgggctcgctggagcccatccccctgcattaattccagctgcccctctcaccttccacagctcgtcgtgtgcacaatcccctcctcctccaccacccctgcggggctcagctctgagcaggctctctcacgccatggaggtctgacccccagtgcagagggatgcctgggttggcaccccctggcatgcaatgcctggcacaatgtggagaagggaaggaggaggaggaaagccttcaatccctcccataaaagggagacaacctagaaccctctacaagagatcatctaaaaccttagtagcactggcctggacaaattcaagttctagaataactggaagcctaaaaattaggttggtcacatgctccaggtgcatgaacccaggggcagagtgtgtctctgtgattcatgcagccaggagggaggctgggagcgggggcaggctgcatgggcagccgggaagagctgcctcctctctccctggtgcaggtggatacagaagcccgggaggacaccggcccccaccccacctgcctaataactcattgtctggctgttgggttcatggaagagtctatagtggacaccccaacccaagcagaaaag

SEQ ID NO: 61209 - DNA, 3845 bp, Homo sapiens
ccccactcctggcctgtgtcctcactgtctgccaagccccgtccccagacctagccacagcaatatccatctttaaccaaagaataaagcagtaaggcccacgtcgacccatcttcgtgaaggaagacctaaatcctcccaactcccaggggtggccctccagtacgaaggctgaaaacaaggaaccaagaaacagaaccacatgacacagggctctggtttctgaagcactgatgtccccaaaacaaacaggctgctgggccagtggggtgtgtgctcggctccaccagacagtattccaaagggttccctggatgtccacacctgggccccagctccgccaggctgccctgccccacagaggcacccaccactgcctggggatctaagcagttacggctgccccagggctgggaccaaacccacagccacaaaaaccaatgccacctacccaggaaggctttgaacagacaagagacagtgattcaacggtcccaggccaaaaagccaggacactccagagccaagagctgaacccaggcacatccagcctcaaacctggatcctacaccaccccaggcaacctcatcagcacttgagacattgctagttctttgcacctctgcttccccccaacatgtcacacaccccacatttcaggtgcaatgctccaaggcgacgcagggagggatctagacccaggcaggactgatttggaacatctgcggatactggaggttagaaagacccctgttgtaatcccaactttgggaagctgaggcgggaggatagcatgagcccaggaggtcaaggctgcagtgagctatgatagtgtcactgcactccagcctgggtgacacagcaacacactgtctcaaaaaaaaaagaaagagcctgagctcaggcccagcgttaccctgagtggttcacaggtaggcaggacacggacctgtggggacagggaggactccaggaaggaagtggggcttgaaatgtgccctcctgagaccaaatccccctgccaggcaggggcatccacgcgcagctttcacatctgttctgagtgcctcacatacctcatcccatccagccctcattgcagccctgcaatatggaaagttctagcatctccccactttacccctgaggaaagaggcacagagaagttcacaaagcccagggccacacagcaaccaatgctggggccactgtgagccaggccctggggccctggacaggtgacctctttatcctgccaggctcagaatggtcaggatggtgggggaggtgctgacctcagacagcttggcagcacctgcgtgcctggcccctgccacaccctgacccttccacacagatgaacggacaccactctgtggatgaggagtcacggcaggggccagaggggcccaggcagagcccagacggcaggggctcggggctgggcctcggatgcttctttttcagggagggggacaggaggagagggtcatgggagggtgtggggccagggatataaccttccaggccaggcaggagacataaaatgcattccaggacctcaagagagctatcctacagtccagggggtcttcccggcaccagattctccttatctagatattcaccttcccggcccctgagcagaacagaaagtgtggagctcacaggcacgtgcagctttggaggaggggcagaaagagccagacctacacacaaacggtggggcattagcagaaaaggagaagggcagagccgccccgctgggtgggcacaggcaaccaactggcctgggtggtcccaggaaatggaaaggggcctccttccctcccagtaggcgggggaaggcaacccacccctgcctcccagatcccacgaggggcttctccaactcacagccagcacaaagtcagccctggagcttcccccactcccacctactgtccggccagccctgccacccctgcctgtgcccaagtgaccccacctgccagggacactccctcttcagcagaccaccccaccctcacgggaaggaggaatgaagacaaaggatgaggaagacaaaggcagtgcagtgaggggccagccggagacagggatcatgggggaggggctgggagacaagaagtcccttccagaaccaacatgcaggactctaacctgggcctcacaaactccctccccaggccatctcgccaaggcctgcctgccagagctactggaacaggcacagccacagcagcaatagtagtagtagtaataataataataataataataatggctaccaagttacgataaccccccagctccagctgctgtgatgaccaagtgccttttgggcgtgcaggtgccagaggtgcacagccgtgccgttctgtaggccccactggaaggctgagacgcagaccaaaggcccacaggcagcagcactgggctaccctgacggggaggttcagccacgtctgcaggggagcaggcgggcccctccaccactggaaagatcaaacacagtcatggatgttaaatgtgctttgtagaatctcagattcttttcttccccactgtttgcagtaagatttacgatgccagcaactccttagagaaaaaaagtggctgggaaatggaatcacatgcacagggtaatttgtggcctgtccgggcctttgccaatgtaaatatttcaggcaggtaggtgcccagttcaatgccccctgtgacaagagcctgtctccagtgagctgatcagaacaacaaatcccacctgccccttttcttcctgctttctggcacctcttggcacatgggtggcctgggacatcacacctatccagcctcctgcctcattgagctaggccctgaagcctcaggggaaggaactggaggggacaaggagtgaggcatgtgggccaaggagctggagactgcctgcagcaggcacccttccacggggcatctcagagcgtgatccccagagcccccaaccctaacccagcacccgcaagtctctggaaggcagcggcaagggccagattccccacataccctcccaagcctgagggctcaaattcacagggtggtggtccctagaaagacctccagggtgggcttcagtggccctggccccagcagcgttagtgaatggccaggctgtggccctccccgagagtccctccctccccagggatgggtcttttcatgccatcactgccgtctcctccccgctactttccccaaggaaactgaaagctgtggcatgtggccttcctcacgggacactgcgggcgctgcgggctagtgtctcagcctgcaatcccggctcccacccccaccccaaggccctgctccacagggaagccagagggcctcacaagtataaatgatcaggtatcacacctccgccaggctttagataaaatcccaaccccaatagctcctcctaccctgcccccttcggtcaccagagtccagccacagggcctggtcagctccgggaaagctctgacatctgtcctttgctggaaaccttccagggacgacagctgcttatcatccaagccccaggtgacctggcccctccttaagaggcctcccctgccaccatctgttttctgctcttcctagcactcaccaggatatgaaactgtcccatccatggatttgtttgccagtttatccatcttccaaaggagacttctgtctgtcttgcttcatggaagtatcccaggagcatggaaacggggcctggtgtgcaacaggtgctcagtaaacggctaaggaaggaatgtctgcccaagtcccaggcagggtgggaggcacggacctgaggcagcgccttctct

SEQ ID NO: 61210 - DNA, 2001 bp, Homo sapiens
ctgccatttggaactggcatttggatcttgatggaatgtcctaattgacaggagggctcagtgcacatgccagggacgcgcaggagttaaattctgagacaggagtgctgctctgtcctgcttctgctgtgcctgcccagcctccagaacaagaccatgtgctgcaagctgccacccagctgtgctctctgacccgccacctgccctcagcaccagcaacactagcaagacctcagcctcccaccagggaagctcaacaaagaagtgaacattgctccagggatttttttttgtctggcagaagcagttagatctgatctcagctggaatccttcctggattggaagacactgagccactctccgtgctatatcccggccacagctcactctcccccaaacaggtcctgtcacaccccatacgctcccctcaccctcccacatgctcccctcaccccatccccactcactcctcacaggccgaggcacagggaaccctgccaagttcaatccagaccttgggcagggaggcaataaagctaagggaggtggggaactcccggcctgtgaggaggggaggcagggtggcctgcgaggaatttagggaatgcagggagataaggggagagcggagaggagaggcagtggtgctgacagcattagcctgctgggaaggagcttcatgagcaccatctgatttacttggtccttgtgtccgcccgaggggcaccagccgggtcaggtggcctgaccactcacagctatgacccaggcacattactgaacctgcttccacatctgcaaaagagactggtggatggcctgcaggggattctaggaggttaaggaggtcaggggccagatccccacccagggacaggctgtagaagccattctgtgggacgctggccatcccatgggtcacccccagggttgcacccacagaccctgagaagccagtgactggtcaaggtcacagggcaaatgccttcaaggaggggcagaaagacttcctggagggtcgagactgcagccagagggtggccttttggatggcatctggaacggggcttggtcccagcctccacggggatggtcagggtgctcttccttcctgctggctggccctgcccccaggatccagccctgttccacctgagttcccgtacacaggagtcttcgtggggtgaggccgcgtcctggccctcagccagcgcagggcattaggatgcttagtgtgcattagtgactgcgccaggggagtgccaaggccctcaggaacctgggagaggccccatgactcatgagcgtggctcctgggtccccctgccgccagggcctcagccgcctactgtctaccatccagagctcagctggcaccagcgcccagcaatcactcagcgaccctcacccccttctgttggtaacacacctcgaagggttgccagaaagacctgctgagaaagggagaaaactctctcaagagctcaaagcaccacaaaaatgcaagctgccaacaccaaaggaaatcacccacaaacatatgtgaccactaactttcttccccttaaatggacaacagggtggcagccctgtatgtcccacctgccggaggaccctgtatgaattgtgcctctgcgcacagcggacctgcatgtgctgggcctgcaggctgccagggatgagcaggccatgaggtcacccctctccaggcttccactggcctgccctgagccaccagggccatcaccagctgtcagagataaaacaagacaagtagggagctggcttccagggcaaggggcccacccagggacacccaggctggaagctggtgcgctgctacacggactaacccccacagaccgcctgtggttcacagctgcctacagggggcagaggtagacatcaggaatccaaatcacctaccaggccaaatcacacacgtgggctgagatgacaccccatccactcccttccagaaactgagctgcaacagaaa

SEQ ID NO: 61211 - DNA, 560 bp, Homo sapiens
gaccttcccaaccaacaaggtaggggaagcctctgtttatggaggaagcaagtgtcccagccaagtcctagcaggggacaggttgggagctgggctggggtcagtctgacccaggtccagtctcccggtgcactctgctgctgtaatcacactgatgccaccctgatgccccccaacccccaaccaacacaccagaggctcgatgagtcatgacaggaaagcaccacaaggctgcagtgagcaggggccaagcccagagtcagagcctcagctgcagtgctaatggccttatccgccagggacggccagagtaatggccggcagctggacacggcggctcatttaaccccaagaggcacctgcctgccacagccgctgccaagggaagacggcagcacagaggacaggaggggaggatgctcaaagccctagtgacaaggccagggcagtctgcagcctccctgggagggagggggtgcctcgctggccgatgtccaatctgtccccaccccaccgtttaaaagccacgttctttgttttctgatcctgaagcctttgcg

SEQ ID NO: 61212 - DNA, 1168 bp, Homo sapiens
gcgtttagacaggtcaccatctctaggccccacagtgggacccatgtggtcacaggtagcctcaccatccccacacctgccccaaggcaaggaccaaccacgaggcaggtgataaaacccaggctgtagggcataggaagagaattcccaggaatataaaagagctggctcataggaccactgagtgaccgataggaggcaggatgggcaggggaggccaccccttccttgtggctctgagtcaaagggccagaagagatgagggtccctgggactctcagctcagcccatccaagcttcctattttacagatgggaaaatgagggcccagggagaggcacagacttacacatggttgggtctcaagtgggctgaagccactggttctgtctggatcgtccaatccacagaacactagtaatcttccaagacccccaggcagggagcatgtcagctgacaaggccactcaggcccagcaggtgatgtgtctgcatatttatcaggtggggagcaggggaaagatggggataagctgtaaaaagtttccagtttctaataggacttctaacaggtaactctgggtcctcttggaaagtccatcagaaaaggttagagctagaactgcccacaccccgaaggaaagcccaacctagggacttcagggacagtagaagaggcttcaaagaccccaccggccctggccttgctcactgccccagtgcttgtcctgggtccccactcatccatcaccccagctgaacccaaggtgcaggcaaatgcccaccgcatgactttgctcggctcttctttttgttttggtttcgtttggttttggttttggtttgttttgttttgagatgagtcttgctctgtggcccaggctggagtgcagtggcgcgatggctcactgcaacctctgcctcctgggttcaagagattctcctgcctaccaaatagctggcattacaggcgcgtgccaccacacctggttaatttttgtatttttagtagagatggggtttcactatgttggctaggctggtcttgaactcctgacctcaggtgatccgcccagctcagctgttctttctgcgaagcctggtctctcttcttacctgctctcttctgcttttactaactccatcttcaaggcccatctcagttccc

SEQ ID NO: 61213 - DNA, 702 bp, Homo sapiens
ctgcctgtgaggacaggggatgtatgagtgtccaatcctgggtgcttgcctaggggagggggaccatttctgacatgttatgatcaaagaagcatcaagtccctttagcagacaagtttgttcctctatccccaagcctttggggatgccaatagagtctcttgttgttatgtagcagggagatgagaattctgaaccccagagtggtccctgcctagatcccagacgctgatcccaaccaccctagatgtagggatgggagtagcggggagcagcatcagcgctggggatggagggcacagcagccacctgggagcggcagcatctcccacaggcgctgtcctgcctgagccccacccaagagctcaggacgcctgccctagaggacagaggtcatgagaaggcagatagcagctgagagcaggactttggagcagactcaccaggtctggaacctacagaaggctctctcctgtggccactctcctggccagaacctcctcccgatggaagccctcagcttccacccactgctcccccagcccagcccacaccacagtggtcaccagagtgatgctccagaaccaccaccccccaagccagactccaagaatcactgctcaggaggcactcagacctcagaggcagtaaatgctcagtgaagtccgcagacgcttcccttcctcctgaagagcaaattac

SEQ ID NO: 61214 - DNA, 1760 bp, Homo sapiens
cacaacatttgcagcagtcctgtgctaagtgggcttgggggaggatgggttctgtgggaaaccctatacttcaacctcccactgacccccagtggggtggaaaactcagtgtagcctagtcctccactcctgtattattcactgtcgcagctgacatgctgagccagactggggccgcatctccttgcccaaaactcgacagagcctttcctgcaagtatgctctaaacactccagccctccagtgtcctgcagagaggcactcttgccaagtgtcattgatgacgcagctgaaaaccagaaacatttcactttccagccacgagactgcagcaatctgctctttggactgcacttagggaaaccgaggcccagataactgacccctcaaaagcccccaggacggcaaaatcaaaggggctgaggtgctctgaacagccccagcaaattaaaccacctaactttgcgctactcccactgccctgaagcagcctgtggtgggaggtgggggtggatacagtgttacaaagagaaacctgagttgtagccatagattgctaatcagtaacaaaatatccctctaaacccagtcctgccttgaacccacaggctcaggatggtaaataaaggaaaaacatgctgcactgcccctgccccacctccatgggtatgtctcccaccccagcccccaccccaacacgtctgcagaggccacttggccaccaaactaaggagaaaacgtccctccccagctcaggctgaggggttctggggagggcagttattgcaggcttagacacactttctctgaattaggaaaggctttaaagggaaccagaaagagctgttcattctccaccttcaggcaaaaagttcaggcagttgcaactaccagcagaactggaagccaagctaccaaaaaacgtggaagaacagggaggccccggatccaccagcgaggaggagaaagctggcagggagcagaagggctgagcagggggctgggagagggagcaggctgcaagctcccacagccccaagctggggccaccctctgcactgggcgcagcagtaacatgggcgtagaagacagaagctgacagaggccaaagttcctcccacccacaccctggtcacggatgaccacggcacttcctgtaaggcgatcaacagtttataaatcccttcagaaggtttatctccacctcaaacccacgaggcagaggtcatcatctccatttcacagacaaagaaactgaggcacacagaggagaaaagctagaatccgttccaaatacatctccctcgggaaagtcttagagtctcggctgagaaaggtcccaggactagaagggcggaatttatggcaaacaagaaaggctctgagccccaggcctctccccaactgcctctgggtctcaagcggctgcctgtgcaccttcccaatccccacaccccactgcagaactccagccaccgcacacacgtggacgctgcttggtttggaggacacctgttgctgcaagaggggaaattcacttgcgctcaaggggccttgtatcctttgctgtttagaacttcccgctactaggcaaggatttccaaggctgggatgaggcgcccaccgccagcccagcagtgacagaccctaattttggcaactacacccgctagaaacttttctgggaccggaccggcagcaggttctgagctggacaaaaagacgctccaccactgaaccggcccaccaccgcccaaagc

SEQ ID NO: 61215 - DNA, 1757 bp, Homo sapiens
tcagggttctggagaagcaggcggaggcccgcccccggcccagctcccggagcccccgccgccccgcccaccccgggcggagagtgggcgggtctccgaggcccggccccgcccccgagggcgactggggagcagaggcgcggcccccgccgtccccctgcgcggtgcgcccgcccgtccagtgccctctcagaggcgcgttccggccgcggtcccgccctcccggccgggcgattgggccgctccgggggtgtgcgggaggggcggggcgcgcgcgggggaagctgcggcggtggtacggtccatccgcggggtttccgacccccgcccgcggccggctcccggcggttcaagtttctgcgcccggaggacgcggccttagccaatcccagggctacagggcgcttttaaaatgcaggtacggctgcggggagggggacggtgggaaaggtagggccgggcttcccttaaaggcgacgcgcgaaaatagcagtcgagccccctccccggcccgcgtccccggtcctcttccctctccccagataaacaaatacccacgatccgggcgacggcgccccttctccctcccgggggcaccagagttcagggcagtcggagacacagcgaacaataggactgtgacatgggggtcgctcttccccgcagcagggcggctctttgtccccttccctgcccccaggctcctccgcccccgtccccacccgggtcccctgccggagcacgcggcggggctgcgtctccactcctagcccagggctgagctaaacgctggcgtccgcgcccctgcagggccagggccttgccagccgcgtcccgcagcgcggtcagtactctctgccccgatggggcgagagctccgggaacctgccccctgcccggagcggcgctcggagccccgctccacctccgctcactcgaccgctaaatccctgggattcgggagataatctgcaattcgcggggtggaaaccactgggaagggtgggaaggtctcccactggggcctgaacgccggggtccgggggcgccgagccggccacagaactccccaccggcggcctcgcgggacccccgggcttcccactgcctgtaagtctgtctcgttatcctccggtccccaaagcgcatttacggcgcgtctaccgccagcaggcggggcggggcggggcgggggggggtccctcccccggaacctgcaacgagatcaaatccgcgcacgcgacagtgagcggcccacggcctggagcgcgcgcccgcgcagcagctgatgccccatttacagttgctaagccgttcattcagctgtgtactcagcgcctactcgccgcggggcctgctccagccccgggggattctgcagggcaccgaactgccctctgcgggggacttggcgtcctgggagcaggatggggagaagatagacgagctagatcaggatgagacttgtcttaagtgctgtgcggggcattaagtcgagctgctgtcatagaaagcataatcagttgctttagatccagcggtcagggaggtggggaggcacatctaagctgaagtctgattggcaaggtacaaagataaggggaagggcattccaggcagcaggaacagccagtgccaaggccctagggctggcctgttacagacctgttccaagaaggccagtggggctgggggtgggccagggaagaggcgtgagagctgaggtcagaggtcagaggggccagatcatgtatgat

SEQ ID NO: 61216 - DNA, 610 bp, Homo sapiens
ccttaaaaatgtcaaaggagacccaattcctagccctggcacccttctctgactcttttgtctccctgctctctcacaccccacatgccaaggccccaaatccctcagctctgcctccaggcacaaggcttgctttccttaccacccccgccgcccccgtcctttaggtggttccaggcagaggagcctctcagatcctgcatcagaaatccaggaaccagaggggcagagagagaccctcctcaaaggctgtagggctggtgggagagggtggcgggcaggaatcaggctgcatttcaggaatcagacggcaggctgtgggaggagagagactggcatttgttcacaccctgaggacagagtccatgctctggattagaaatgtcctgggaaagagtaagcctccagccctggtgctattccagcagaggctgagcgtgcagccggtaggctgttataggggatttatgccctggagctcttagaatcctgggggcatggagtgggcagggaagctgcaggccacacagtaggtgcatggtgaatggccgcctgttactatcgttgctgttcatacctgcctcactgtagagaaaaggcaccctcaggg

SEQ ID NO: 61217 - DNA, 1994 bp, Homo sapiens
acagtgcgatgcactgtgtaatctcagggagccgttccacaaactggatactaaatgtgatgccgtcacatttcttttctagctaaccaccccaacccaccttccagtgcgcaggaatccacaccctccttcttgcagcctcatcctccctccaaattgccctcaagccccggagctttcacagcccacaggggacctggtggctccgttccacacctcaccccagcagggccagcctgagttaccctgtgggcctgcggctgcctgtcaccgccgccacacgggggcgccatagcaagccaacatccccgagtccaactgggcggccgggccaggcgccggggggatggatgctctgctgcccacctgtccaggctgcggtggccccgagggcagaagtcccgcctcctccgtgctgggcacggctcttaagacttggccgtctccgtcgcccctcagcccacacccctaacagccatgtcccatgtccctaactatacctgggaaggcggtaccaaggtccccttcgttttccaacccccaacctctccaggactggctcaagcgtggggcaggggcattgcctcttctcagaaacccagcagcatctacactccctgggcctctacctccagcccgggggacctttacctgggctaggagtgggcacacctggccttcccctgccacgactttcacgctgggtggtccctcgggataggaattgggaactaaaacgcccagaattggcctcatcttcatacgggatgggcaaggagacgcgggttacgacagagggggaagccctggtcattatttcgaaaataccttctcctccgctacccccgcctccccggcacatttcccgctttccctggagggcggacccagattttcatccctccaactccaactccttcgggcctgagccagcgcctcagatggggcttcgcctggtctaggagggtccgcaggcccccgagtctctgggagaacagcctccggccacgccgtgcgctctcggtcgcagacacaggcgtccctgggtcccgcaggatcctgccaccagcccgcgggccccgctggcggaccacgggcgctaggcgtggactgtccgggcggaggaggcgccccggggcaactggagaacaactttgggggtctggggttccaaggagaagtttgggaacagtcggcgttatgcggacttttgcaggctgggatggggtttccgggcaggtttgggggaaaaaggaaggggcctaagaccgcgcgcggaaagatgccgttatttggaggcgccgaagcgggcggagccagccagcaggacttcgcgccgccgccgggccagagcgctgaggatcggcgttgccagggacaacgcgttctgggcggagctgctgctggggcggacctgagtctgaagaggtgggggcggagcctggggggctgagccagaagcggagttgtgattggtgaagaccacatgctcggggtggggcctgggctggggcggtgtggaggttggggcggagctctggggggcggggcggggcgggggagggcccggagcgccggagccggaggcggagacgtggttggcggggactgtgcgccctgggaggggtcggagtcggcgggggcggagccgagcgggcggggagggtgctgggtcgcgcctggcctggggccgaggcggcgcgcggcgctgacagctgagtcggctcgcggcctcccggccccctcggcgcccggcccgaccctggcctggcctgccctgccccggagccatgagccccgggctgctgctgctcggcagcgccgtcctgctcgccttcggcctctgctgcaccttcgtgcaccgcgctcgcagccgctacgagcacatccccgggccgccgcggcccaggtgagcggggctgggggcggggcctggctggggtgctgggactgggggcctggggacagcgtctaagccggcgtccaggccgggg

SEQ ID NO: 61218 - DNA, 593 bp, Homo sapiens
ccaagaaggggagttgtgctgggtggggtcaccagggtgcccagaagccagctctccaaggtcagcaagtgctgggccccagagaaggaccccaggaggcgactgcaggtggcacatctgatggcatcagggttgggggcactgaccaatgccagtcccttccgacttaagggggtttggtggtgggggcagggtcaggcagcatgacccatactggtcatcgggtggcagccctggctctgccctgctgatgtagcaaggcgggaggcagaggctgaccagcaaggccactccggcctattgctgtgagtcaccgcctggctcaaggcccaggcaaaggccgcgggaggcctctgtctggggttcccacagtgaatggctcatcggttccttggtgttcctggtgggctttggggaaacctttacttcagataacagagtgagtaggtagatggtttggagccatatgacagtctaagcctatacctaaagaatggtggggtcatcgacccaatttctagcacctaaaacctttggcccagtggttctcaaacgctggtgggcactgcagtcgcctggaggtggggaggtgt

SEQ ID NO: 61219 - DNA, 586 bp, Homo sapiens
gactcaagggatctgcccaccttggcctcctcaagtgctgggataacaggtgtaagccactgtgcctggcctgcaaggacattttaaaaagaattagccaagcaaatattgcttttaatttcccacttcagatacttcaaaatatgtaaattcttttgatggagtccaatcattaggaatacttttgggtaaatagcctactgggtttcttagataatagagttgtcatatccatttggactatcaacagattatctgtggaagggtctgaagttcatgattctgcagtgttgacattgtgtaataggataatgaagctggagaggcccttgataaggccgtctttatcacacagtgttgtttctcggccagtgcctctcccccattccagcccatccaggccggatgacacacgggaaaacaaggagctggcttcaccaggctgacaaggtctcaccttcataagataagctgtagaactgcatccctgtgtgaggctcccagccaggggcatggccaaggagctcacagactgagtggaaagacatttccaacagcaggaatctcacaaccaaagccccagggg

SEQ ID NO: 61220 - DNA, 892 bp, Homo sapiens
tgagcccccgtgcgcggaggcggggcctggccaaggggacagcgggcggcagacgcgcccctgcggctcccaggccgcccgggccgcgctccccgcggggaaagaggccgcaggcgcggggaggctcggccccgccccgccacgtccccctcccggcccgggccccgcggccgccgaggccgccccctcgcgggcggagcgggcgctgggctcgcgcggctgcggcggcggcggcgggcccggggttgccatggtaaccggcagcagcagccgccacagcagggccggccccagcgccagcgccggtcgcggtcgggctcagctcagtgtgtggtgagcggcggcggcgcggccgggccggggagcgggcgcggcccggcggcctcagcatggaggacggcttctccagctacagcagcctgtacgacacgtcctcgctgctccagttctgcaacggtgaggggcggccgcgcggggccggggcggcgagcggctggtggcgggcggcggcgacggcgacggcggggaccaagccgaggggccgaggcccggcggccgcgggcgaggccgcgcaaagttgttgcggaggggcgcgcggtccccgttcccgccgccggcgcattgtgttggagccgcggggccgcgcctcgctccgggccgccccgggctccccgccgccaccccggctcccggcactggcgcgcggaccccgccggctccagcacccgcggagcgcgcccgggcggaggcgcgtggggcacagggcggcggggaggcccgggcagcctccgcgttccggggaacgtgttgcttttttgcttcccgacccacatctgtttggaaatgactggatgaagaactcgggaaacaaatcctttaataacaaaaccct

SEQ ID NO: 61221 - DNA, 1083 bp, Homo sapiens
gtggcgtggagtggggaggtgggagcactgtcccagagaggtttgtggggtggcgtcggcagagctcgcaggtggagtggatgtgggcggggctgagtccaaggtccctgactgcttctctggtgggatgacagtgccaagagctaaaatgcagatcactgaccgtctgaaggagggtagtaaggcctggaacaggtgaagcgagttgacatccaactgcaagggcaaagtaggcattcggctttgcaggcccagcacagacatcctgtgggaggtggacacgggaggctctccccggaggctggttttgggagccaaggtgtgcttgagattgtaggttgctcaacccaggccaaaagaggctcccaagccagcttgggggactccagaatccaagggcaggtaagtgggctgccggagaggagcgagagccaggagggccatggtggagcaggagacagtcccacacgtggaggatcttgcgtctgcagcagcagggcagctcgatgcagtgcttgccaggagccagtgtggactctgcactggcttagcaaccggcattccagcatctccatgcgcaggcagtgccaggcaggagatccaggcaaggtggggacagcctcagccacgtagggaagagagaacatgaggccacgggtcgcactgggctgtcagcccagtgggggcggggggtgtggaggtggaggaagcttccaggccggttggaactggggagaggcaaagttcagtggattcttggcattggtagatcttaggtcctggccgccggggtgagagggactccctggcaggggctgtctttgcttcactggaaagcccattctggcatctccccagccccccacatttttttgaatgataactcccacgcccaaaggttggctattccattcattagccatctcttctgtggtttgggaacaggctgctgtcatcctatcttacaggcacaggagcgcataggaaagggtagatggggatggtccaatccacaactagggggacaggttttggtgaaaaggagctagggaacatgcgcttgatgcaaggtgaaaactgact

SEQ ID NO: 61222 - DNA, 770 bp, Homo sapiens
caagcaattctcctgcctctgcctcccgagtagctgggattacaggcacgcaccaccacgcccagctaactttttggtatctttagtagagacaggatttcaccatgttggccaggctggtctcaactcctgacctcgtgatctgcccacctcagcctcccaacgtgctgggattacaggtgtgagtcaccgtgcctggccaagatggagtattttttaaaacaagcctacaggactttgagaccagcctgggcaatataccaagacctcatctttgcaaaaaactaaaaactcagctgaatgtggtagagtgcacctgtagtcccagctacttcaggggctgaagagggaaggtcgcttgaccccaggaggctgcagtgagctgtgattgcgccactgcacttcagcctgggtgacagagcaagactttgtctctaaaaaaaaaaaaaaaaaaaaaaaaaagcaagtctaagccaccatgtcgtttcacctataaatacttcagtctgccgctgtggtgaagacactttgtgtgaggacaccatgacatcatcacagctgacaaacttgatgatttcagtttctcgggctgtcaagcctgatgctgtgtctcagagcctggctgcacaggagcctagaacagctgcctggcctccctgctgagcagttcagggtcgggtgtcgagcgtgcagcccccagttctgaacccttctccagagcccaattcttcccccctgaccccgctgctcgatgcctagtggcatccctg

SEQ ID NO: 61223 - DNA, 386 bp, Homo sapiens
taattcccaacgctttagtactcttatcgtggatgaggatgcccaggaggtgtctcgggaacctcttttgtaactgctgctcatggtctaacagtgcctctggaagacacatctattggatcttggctcctcggctgaacgctcatttcaacatccagttacataaccacaaacattattgcacaagttttttgtacatgtttgcaagaaattatctgggatcctacctggaaatgggactactgattttctggggcatgcattaaatattgccaaaccattctccacagcagctccactggcagcctgggagtctctgttgctccacttcctcatccatattaggaattgtcatttcatctcatctcatacagacccgagaagca

SEQ ID NO: 61224 - DNA, 1652 bp, Homo sapiens
tatgtacaaagagagggaatcagtcgccggtgacctcgacggccctcggatcagggatgccccgagtccgagcgggcagggtgctcagcagggccaggtgatgggaatcatggggccatcgagcacggaccctggctcccccggtggcctctgtgagctctggggtcaggcggggactggaggagcgtccgcgccgggagggagcgcaccgcgccacgtgcccgcccggcgccccgcccccaccccggccacgcccctcgcgcttccctcaaagccccgcccctcagccccgccactctcgtccgccccgcccctcgcagcctcaagctcagcgctcccggaggcgcggacggtggggccccgcgccttttgtgtcgggctttgaccgccgcgcgcgctcattcacctcagcggccgcgggcggaggggcgcacgcgcgcgcagtcccctcggagggcggtggggcgaacagcaacgcgcgtaccctagctcttggctgctgtgctgagactagcccgcgcgcccgcgcgcctctccctcgaggactcggagccgcccgcgcactcgccaggggccgccgccccgagtctcaggcggacgcgcacgcgttcccgccgcccggaccccagccggctcgccccccgcccccccatcccccggcggcggcccccaggcacgcgcccgcgcacacgccggcccgggcacgcgcccgccaagatggcaggggccggggcccagctgtcagtcgccgccgccgcggcccttccccgcagctagcggccccgacgcccacccggagaagatgagcccccgctgccccccgcagcccagtcagacgcggagccgccgcgcccggggccggctcccccgctagcgcccgcgtcccgcgccccgccgccgccgccgccgccgccgggtcgcccctggcccggcgcgcccgtccccggcagcgacaatgaggtgagtcggggccggcgcctcgtgggaggtggcagcggccagcgtcggaggggctgggctgggggcccgcggtgcccccgagggcgggaggggggctccacgggcgcgggggcttccagagaaccgcgggggctctgcagagattcgggggcattcagagcgcgggaatggcttcgcgagagccgtgggggcgtctggagagccgggagggtctgcagggcttgtggggggcagtgttctgcaaggggcaggcggcgctggctttggctgcttgtggggtcctcttaggctccggggggcctgcggcggcctgggaggcagacccccgcgggcaggtgtggccgtgtcccgaccgcgcgaggaccgaagttggcggaagcccctgtgcggtgccttccagcccggaggaggctggcctgaagcccccaggcgttgccgaagcctccccctgccagcgcccagagccgcgtttgggcttttacaggtgtagtttcccctcgacttggagcccgtcaaccccttcgtctcctaattctcaaccccccttttttttcttcttgcacgccagtaaagtgcaaggcccccaaatgtaccgctcgttgatgtatcacccagctcgggagcctgctgattatcaggccaagaaataaaaccttgcttctgccagaagcccggtgccctctcccagtcgc

SEQ ID NO: 61225 - DNA, 698 bp, Homo sapiens
gaagagttttagtggaagaaagaattggagaaataagactttgcatgtcatgaagaggcgtgaaagactttatttcttgagctgtgaggagttagtaatgcagggttaaacagaggcatcaaaatcagaattggtaactggttttccttcttccaccccttctctaaaactcagccagagcaattttcctaaggccagaggctgagtgaggggcgctgagggcacacccaggctgcgtgagcgggtgaggggaaaggggcagcttcaggccaccttttccaggtcgattacagttagtgactgatgacactggggtcaagggagagaaaaaacgtcaagagtgactcatacgtttttatttgagatctgccttgcttatttcacaaagagttgcaacccgaatgctgaagattttccttcatggcgagtctcagaatacaacctcagctcatttgccaaatcttgccagcctgataaacatttttcttttgggggctggcatctcgtttcctccttcttctcttctgaaatgattatagcaatttttgtacttcaaggaattggtgagaaccgggtacctactatatactcgataaatgaataatcaaataaatgagatcactaataaggagtgacatgtaaggtcacgctggtcatggtaaagtggtggacataaaatgcgacttgtgattctgaag

SEQ ID NO: 61226 - DNA, 3980 bp, Homo sapiens
gctgggcttcccagaggagtgagtcctggaacagaataccaacttgggtctctatgtctcctgctgactacttagggtagttgcaaacatatcctcaactatgttggttctgaaaagtcaggcaatgggtcattttggaggtagggatgtgggagggcccttttgatactaggataaccattcattgaacaaatacttccagaacatctactcaatataagccacagtagaaaatgtaaatatgtgtaatccttagtcctgcctccaggaacactgtcctcaagaggtgtggaacagacagaccaaaagcatggagtagcaggtagcaaagataatactaacataggagattgggatagattccatagggatacagataacgtgctgtggccgggaggtggacacagttttgctgtataaaagttaaaagagattttcaggaggaagcatctgtgggagtgagccttggagggtataggattggggtggatgaaaatcaagacaagggctgttagtaggtgtgcgggagctgaggtataggaacagggggacagtgtgctcttagccatgctttagctgattgaggggagagtttttgctgtcttctcagggtataacccaggtccattttgtcctttccctgtgactggtgacttctctgccctgaagttggctactctgcagagataaacattttcacctctggggaataagtagtagtgatgggaaatcctactaggtgttttgccatgctgctagcaccttgacttttcttatcaccttgagcaattacttaagttctctgtgccttggttgccttacctgtaaaatgggactattaccaatctctgacagttactatgctaattaaatgagattacctttttttttttttttgaggtggagtttcgttcttgttgcccaggctggggtacagtggcgcaatctcagctcactgcaacctccgcctcctgggttcagtaattcacctaccgcagcctcccaagtagctgggattacagacatgtgccaccacgcccggctatttttttttttcttttgtatttttagtagagatagagtttctccatgttggtcagcctgctctcaaactcccgacctcaggtgatccgcctgcctcagcctcccaaagggttgggattataggcgtgagccaccgcgcccggccgagattacctctataaagcatttagatactcaataaattaattcttttaatttactgtaagcagcaaagcattttatagacacttatcctggattagaaattgcatgggagccaggaaaaaggctgatacattctccagctagagtacttctagtcttcccctctccctgagcgttcagactcagaatgccagaaatcagtccttggaagataatcatgtttgctactgaaatgtttatgacacagtgaacgaaacatggtgtgactaatcagctgagagcttggatcttggcttggtttgcatgcaaattccctggtctgagagattaataagttccttgcagttgacaaactgggactacagtgttttctggctaactgtgataatacaaccagagcccaccaccaagtgacccctggttctctgagtctgcagtgcttctgtactcaggccacagcccattgcattattcattgttgtacgtttctccgtgtcctatttcattatccttggagcctagtgtgatcagtaagtgtctgttgaactaactaggactacacgggacaactatgacgtatgaggtctcttccgtgtagggaagagtgaattacaagtgagaactcagtgaagagcacccttccaacaattgtagctatgatgtgatacattctggggtggttctcctggacagcaagagaatcaactaaagagctttcaagagtgactttcaacttgggaaatctatgtaatgtttctcaactgggaaggcccattgcaatctaaagacaggtgcccaggccactcctcaaacctcttaagtccaaatatgtgcaggtgaaacccagacatgtgcactgtttaaagttccactgatgattctgatgtacacacctcgttggagttcacgggaagaacctgagcttgggaacctggaaaccctaggttctaatgatgctgcgttagtttatgtaagtcacataacttcattgggataaaataggaataatattttatttgcagagatgttcagagaggagaatggccatgtgtgagctttcataatcaagagcactggaaaatgaaaagtgctataacatgcttttgaattccactggcacctctgaaggcagattgaacctagatgtgttagaagtgtggcttgtacagactacaatgtttgatctagaacttatgctggttcgtggtctttcctgggtttgatactcagtgactagtcactgggctcttcagggcatttcgtaataatttacagacatgaagaattcttttcactccagtcagccagttcagatccttccagatgccagggttgactcacactgcattctttgtgactactctgccccccatcttcatcagcacgagtgctagaagagagaaaagacgatttactttcacttgttgtgtggccctgggagaaacaggaacacttggagctctttcctttttgaaaatcaactctgggtcccatgtgcacagactgcataccagagacaccaaggaagagaaccaggagcaaggaagatgagcgccccctcgcagggctcccctgcctagtttttcggaagttaccactcttattcatttttcactgtatctgctagatcagacaactgtgtatcaagtcaagatagaggcttcctaagagaggtgataaaagagatggataaaagtggtggttggatgtatttttatgagcagggcaatgaaacattctgtgatttaagaagtgcactcagtgatgaaattccttttcctggagagaggatgcatgcaaatcaaatgtaccttggagcacttccaaagccacagaatgaagattgtgtacttttattctccacctttttggggagtgaaggaatagagattcctaaggaagagaaggttgacacgttttgctacagttgataaaattcttgtttgttgtcctgggctgcttggttggggcattcatgattatcagatccctggtatgaacaaaatactaatcaattcatccctacccatgaccgaatgcttaaacacagcttgcttcatagaaaggtgggatgagaggatggtatcccagtactttgtggatataaaattctgtccattgccaggacggcttttcattgttttctacaggtggagccctccatggtctggctgcggtctcttgaagcttggctccttccgctccaaaaaaatgatttagtctggatctgcactcaccactttgcttccccatttccaaacctttttttctttccatgaaatcctctaaaacccagccctgtgcatgcagtatttcttcaggaagccttttctgacctctacagcccacaaaatttctcttttttctgaactctcctataacacttaaggtatataataaacaatctgatatttaatttcctctatcttatcctcttaactagattgagggttacttgaaggcatctgtcacagttgagcagagctggacacatgttggcttctcagcactctttgtttattcatttttattacctttttttttttaacctcctgcattatccttgtcatgtcacaggccctagaagaggaaatggcagtaaagaggacagttgctgcctttttgatgtctgttcatttctaagcatgaaggcttttggggattttgatggaagtgctgaatccagtgagcaacatctgtttgtggatgggaaagatcagccggaaagactaaaagggccgaatggtagattttcaaagctgtagggattgacaaaagggtttgagttagta

SEQ ID NO: 61227 - DNA, 732 bp, Homo sapiens
ttggaccggccacatttcaagtgctcggtagtcacacatggcttgaggctaccaaaggctaccaaattggatgtctagagccctgatgaactgagacagaaagtaactaagacagagaatctcggttacattgttgcatttagcaaatgggtttaaaagtgccaggccaaatagaatttccagacttacgtgatattctttgctctgtattagatttgcattgatacaggaagtttcaaaatactctctaaattgctcctcatttctctgttactgacaagcgcacagtggagacgctgcctccttaaactcccccatctctgggccctgggcccagcgacctctggccagggtgagcatgccgtgagggtgcttcagtagcattcactgtgcccagggccagttcatatgctttttttggtaggaagatttctttttggagaccaggagttactttgaggaattaatggtagttattagcacattctcctgaaaaagtataatatgcttaagctacaacgtttgtggaggctaaagccactccatttgggatgctaatctgccatgttgaattctgattgaccccagttccgggaatgcctctgagatttctacttttatatactcaccagcattgatgttattgtaaatacatacttaccataaaccctgcccttagtcaagttttctgaggtatataagccctgagtctggtggataacagtgtgggga

SEQ ID NO: 61228 - DNA, 1888 bp, Homo sapiens
ggtctagggcttaagtccagatgcggatgggctcagggcggggtgggagaagtcaggggaaaaaaaaaaagaaaagaaaaaaaagataaagaaataaatttcttctgccagataccttaattaatcaaggtcggccttccatcaaggtcggcttctcggctccccagcccccgcgcctcacggggacctcaggcctcggcagggtcctctccctttgcatctcctactagtcagctgtcggtggtgatggcccgtgccaagttcacggtctcagcctgacgaaaggcggcctttaccagcctcaggacccccaacgaacctggggccatggctggggagggggctctgcccaggctctgcgttctgggacaggggtccccagatggccatgcgtcaaggcccagggacctgtttgtgggcccgagagcacgggggtcaggggtggggctcgagtctcgtcccagggctccgggacaagcttcctggaggaggcagcgtgagctctgggaggtagaggtcaagacctcaaaaaatggggggacatgggcggagggggcattttgtaactcctacgtccctgcagaagcccagaccctcagagactaggaactgaggcctggcagagtggggtgggccagcaatcacgcgccaggccacacgaggagagcccactgccccggggatgtcagacgcggggcggcctcggcgaccgcacacgccatagaaaggtcaccgaacttggccgcccggccgtcccggaaatcgctactgcccggcagccctggggcctccacaaccgcgtcccggcggctcaagttgccctttgtcgccccctgccgaccagtctccctgcggctcccgcgcgggacaatcaggcgggccgggctcggaaatagtgggcatgggtccctgaggcgcggggattggccgctctgtgtcatgtgtcctcggctcgggccaaccagcgagggaggcaaagtcccatcccgcgcgtcccgtagcccttcagcgagctgtgggcggggcgtcaggcctgacacctcggccagagggcggggccggagacctgagcggcgccgcttccgctctttcgcccaggtgccttggagccgctgctctcgcctcccttctccacctagcggcggtgtttcacaccccggagtggctttttggggataaaggcacaaatctttgccagacctcccgccaggccccctggcctgccacgtgctccttgccggcctagactcacccaggctgtgccctctgctcagaacgacctttccccccttcctctccccctcgcttgctccgactgttctttgcaatcccggctggggttgggttaagggccttctggggcttcttcataccctgtgcatcttcctcctactggcaccgaccaccccacactgggctgccatctgcttgtctacacccactgacttttcatctctgtatctccccagtaagcaggagtggctcacagaaggcacgttaatacctgtgtgttaatataaaccaaggagcgggacgatagctaggaagtaacatccctgggcatcatctgagtaccaggccccctgccaggtactttagaggctacttgatgttcaggcccatggcagccctgggagggaggcacaaaggctcttttgttcctggggagtcagtggaggcccctagaggctgaatgactgtctgggtcccccagctggactgtttggggacaggcctggggagctgagggcaccctcataccaggcagccttgcgcctgaagctctgctggtgaaaactgatgggcagggccctggaagggagagtcagcgcctgcgggggcgggggtgggggtgggggtgggaaggcaagcggaggggaaaggtgag

SEQ ID NO: 61229 - DNA, 721 bp, Homo sapiens
tttattattatgaaattaaataattcaaacttaaagctattggaactttgaattattattattatagagacagggtctcactctgttgcccaggctggaatgcagaggtgtgatcatagctcactgcaaccttgaactcctgggctcaagctatcctcccaccttggcctccaaaagcattgggattacagggtgaggcacggcacccagccaaaactattttgagccttgagaggaatgtggctatgtggcctgagtcaggtagcagcttcaacagcctctgccttttcctataaatgattagaaaaagcactgtggctccagaaatagatccctttgaatcagcacccctcctcacagaatattaaagcaatcttccttggaatgtgacaagccataaccaatcaaattgctaaagcatatgtactgaccttgcatggaaaatgttgcaatcctgtgaactgcgtatgtaaacaaaaccttcccttctccactttggaagctgacctgacccattcattcttctgaagtcagtgttccccaggtggacggcctcaagctttgagctggagtaaactttttttttttttcttttgagacagaatctcactctgtcgccaggctggagtgcagtggtgtgatcttggcttactgcaacctctacctcccgggttcaagtgattcttctgcctcagtctcccaggtagctgggactacaggc

SEQ ID NO: 61230 - DNA, 1449 bp, Homo sapiens
cggctcactgcagccttgacttcccaggcttaagggatcctcctgcctcagctcccgagtagctgggccctcagatgtgctccaccacgcccggctaattaaaaaaaaaagtttttgtagagacggtctcactatgttggccaggctggtctccaactcctaggctcaagcgatcctcccgcctcggcctcccaaattgttgggaaaaccggcgtgagccccgcgaccagccaactatttaccatagtagccttccttcctaatcttgttattttattcatctaaaaatattttgagaggggctttgtaggcttccccaggctgcgtcagggtcgggatctagagcgaggaccaggctggggcgagggcgccgtgttctcaactgcagggcctgaagcggggcgggagggtaagggcgcacactacccaggcagggacagggaccccgcagagcctgccaaggggcagccacgcggcccacggagccggagatgagggaggagcctggcccgcgcccggcccccgctcgggtcggtgtagcccagccccagcctcccaactgctgaggatgagagcagggccgcggccttcgcccggcgcagcgcctgcgttcccgccgcccttcccagtgccgcgaggaagctgcggcaggaagaagggcggaggtgccccgggcgcctgagacgcccggcaatggccccgctactctcgccgcgcacacgcaaagccgcttcccaggcagttgcggcgttcggggcccgcttcctctcgggccgggccttcgccggccgcctgcccgtacaggtgtcccccggctccgtgactgcgactctcccagcggagagggtctcccaggaagcaggggcgaggagccctcgaaggtctcgggcggcagcggctctcggcgcagagggcggagggtacgaccgcgacacaggcggggcggcagctagctcgcgaggtgcacccggcacaggccccgccccgcgcttccggctctcagggccctcgtgccccgccccgccctcctccccggggcccctcgtcccccgcgcccgcctagccccgccccggctgtgctggatcctcgacgcccatcgccaggggtggaatcccagccccgcctaacacaggtggaaagaggcgcagagaggcctagtgacgagctgggatcacagggagttgatggcagcgccgggagagcccaggctccgaactcccgggctgggttctgcccctacagcccgaaaagaaagcaagggagccggtgagggtgacacccagataggggcgagatgcacatttcgtgttcccaaggtggtgtctgtagtaagataagtgaaactcgaggcccaaacgaggacagagctcaacacacattctattttttcaagaaggcagggaggctccgagtcaacctgctgagtcaaaatccagaccccaagcatt

SEQ ID NO: 61231 - DNA, 3795 bp, Homo sapiens
agttgaacaaattcacagaggcgttaaatcggccaaacgagtacaacaaagacacacctttccaactcttcaatttgtcatagtttccttaaaaatcaggaaatctttgttttgctttaaggcaaattgtcaggtcgaccaaaaggacagataagagcagaaacacttcgctgcaatgtaactcattcaggaaggtttaacttgccgctaatccgtgccacaaaaaaaaatctaggctctgttgcaggtacaatggaggacacggctgaaaaaatttggaattttaaatgagacaaatgcaaaacctggtgggcgtaaaaaggagcacctatgaaagtgacaaatagggggaaagggtgggcaagggaaacaatggctgactggagagcaaagaaggggaagctcaggagaaaattttagaaagccgccaggaccctgtagttctaagatctacggggaaacaggcacccaacggctgcgtctcaggtttccgcgggtcactaaagaataacggacatcctcccaacggtggccctggggctccgcgggcgcttccgccgagctcgcgccgaccccgcgctcggccccgcaccccgccgggcgctcgcggcgagataccggacgctgcccgcgtcgcccgattttgtccgttcggtcctccacactcaccccgcggccatcgctcgcccgaagccaggcgacaagaacaaacacctcccgacgcgaaaaaggaagcacaggcgattctcgtcaaagcagactttattggggcgacagggccgccccgcacgcgccagccgctccccgcgcggcccccgggccgcccacccgcctcaaccccgctcccggccggcccctccctcccttctcctcaggctcccgcccccgtggtgcccggggccgcgcggaccgctcaccggctcccaaggcagcggctgtagcggcgacgccccgttcccgagtgcggccccggcccgaggcggcgggttttgtggctgttgcaccgcgaagggcggcagccgcgcgacaccgggaagcgggaggcggtggcggcggcggcggcgcgctgacgtcacgcgccgcgggccagccagggcgcgtgcgagccgccccgcccccggtcccatcggccccaatccgggaggagcccggcgagtgggcggggccgcggaggccagcggacagatcgattggccgagaggagaatcgagagggcgaacgggcgagtggcagcgaggcggggcgggctgaggccagcgcggaagtctcgcgaggccgggcccgagcagagtgtggcggcggcggcgagatctgggctcgggttgaggagttggtatttgtgtggaaggaggcggaggcgcaggaggaagggggaagcggagcgccggcccggagggcgggaggaggcgcggccagggcgggcggttgcggcgaggcgaggcgaggcggggagccgagacgagcagcggccgagcgagcgcgggcgcgggcgcaccgaggcgagggaggcggggaagccccgccgccgccgcggcgcccgccccttcccccgccgcccgccccctctccccccgcccgctcgccgccttcctccctctgccttccttccccacggccggccgcctcctcgcccgcccgcccgcagccgaggagccgaggccgccgcggccgtggcggcggagccctcagccatggcctcgggcgacaccctctacatcgccacggacggctcggagatgccggccgagatcgtggagctgcacgagatcgaggtggagaccatcccggtggagaccatcgagaccacagtggtgggcgaggaggaggaggaggacgacgacgacgaggacggcggcggtggcgaccacggcggcgggggcggccacgggcacgccggccaccaccaccaccaccatcaccaccaccaccacccgcccatgatcgctctgcagccgctggtcaccgacgacccgacccaggtgcaccaccaccaggaggtgatcctggtgcagacgcgcgaggaggtggtgggcggcgacgactcggacgggctgcgcgccgaggacggcttcgaggatcagattctcatcccggtgcccgcgccggccggcggcgacgacgactacattgaacaaacgctggtcaccgtggcggcggccggcaagagcggcggcggcggctcgtcgtcgtcgggaggcggccgcgtcaagaagggcggcggcaagaagagcggcaagaagagttacctcagcggcggggccggcgcggcgggcggcggcggcgccgacccgggcaacaagaagtgggagcagaagcaggtgcagatcaagaccctggagggcgagttctcggtcaccatgtggtcctcaggtgagcgccggccgcgcgccccggccccgggatgtttttgttttgaagggaagccatgttttatgtgtgtgatgggcgccgccatcttcttcgccagggcaagtatggcggccccaaaagatggcgggccgtgcggcggcgggggcgcggcggcggcggcgggcggcgggccgcgaagatggcggcaggccgcgggggggaggggccggcgccgcccggctaggccgcaatggcgtagtttctccgagagggggaagcgccgcgcggggcggagacggccgggggaggggccggcgcgctcgctccccgacgccctcgctccccgcgcccgcatcaacgggcgcgcccgccggcccgttgtggcggcagctgcgcgcccccggcccgggcgggacgcgggaggtcgttggcggggctgcgccgcggcctcgcgggccagggattgctgcctccgggacgcgcgcccccgcccccgcccggcgctgccgttaccccatcggccgctggagggcgccgcgggcgcttgccccgcccgcccccaacttccccggactcccaactgctccccggtggcaccttccagaaggagggggcttggcactcgtgggcgccctccggcctccttgctccccgcccacccagcgccgggctggaccctgccccggcggtcacgctcgcccaagtcgtcgtttgctgcggggcgggacttggggctgcacgtagggctcgcgtgtgcgggctccgagcgtcagtcggagcctgtcaccgccgttgccagcgaattcctggccttttcgccttcctgcggtacctagtggaaagggcctgtgaatgttagcgaataattcttagtcacttacgttttgggaaagctttttttttttccctcaagtatttagctcttctgaataggttgggttagtttactcaactgtggacatttgccagtaaataaaatcgggtagtttaattttaagcctttatggtttttactttgtagaaaggtatctattttccccatgaaaagaacgataatagaaagcgggtttttttgagttttgttttactgttttaatactacttttaacgaaggcctgaaaaccatctagagcaaaaggatcttatctgcctgtgtaaaatctgtttttacttcaaaggcaattattaattcaatgctggttttttaggtcagtatcctattagtatattcatatgctacctagctaaattgctgagatactaaatagactgagaataatcctgccatcgtagttaatctaatgcctgtgatgattacgtttagtactccatataagcggtggaacctcttccctataagtactttaaagcttcataaattctcagaactgaatggagactcaaaatatggtgacctttgagtattaaaagatcgttaaaattcgg

SEQ ID NO: 61232 - DNA, 1184 bp, Homo sapiens
gtctgagcacgcccctcaggtgtttgcatggcttcttcttggcctgccacgtgcgtctgtaccggaccctaggaatatcccgggagctggtggccagccctagcccctgcccgcctggcctttggccagcacttagcgcgggcagccctgcccgcccccagacccttctggggacttgggccgcgcctttgtcccagcccttccctgccaccctgcagtgctccagggcctgtcccccacgctgctctggcgggcggccccgggggcttctagacctgcgcctgggcccccacccgcagggtgcgccgccgccgccggccgcaggagggcactgtgccagcgggccccggggctgggccgcgtccgctgtggggaggggctgcgcgtgcgcagcgcggagcggcccggacctcgcggggacccgaggcgcggtgggggctgtccagaatccctgagtgtggggtccccgcgagccgccgccgcttacgagcgtcccccgcgcggagtgagcccagggccacgggggcgcggagattcagagcccgagaaacgcggaaggaggctgcgtgcaccccacctgcccgaggcctcgggcggaggagactcccgccgccagggccacagggacacggggcagggcggtgcggcggcgacgcccgaggagggaggggccacataccagggggccccagctaagcaaggccctgggacgcccccccttccccccggtggagcagcgccccctggagggcggggtgggagaggctgcggtcctgggattagggggcgggcccgggaagcggggagacagggccttggggtgccggcccaaagggacgtcctggagccctccaagctggggatgcttttcctctccccacggagagctccaccacgggcgtggcgggggctcctaccatcaccctgcctgtaggttctggagccactccggccgccccagcccctctccagcccatcaccgcttcaccctctgcccccaagcgtgttctggcctcacagtgtacattccgtcttccctggcccgtctctgtattgcctggcaaaacccaacctggccctgtactcagcagcctctgctctcacccattcattcactcattcattcagcatgctgactttgcacccctggccctcatggagctaaggtagaggttggggagata

SEQ ID NO: 61233 - DNA, 1977 bp, Homo sapiens
ctcaaggtaaaagcagagaagccagaggcccaacagggaagtgccgtgcccgacgcccacggtcggggcatgggagagcctggactgcacgcccgcccgggccctcccggggacaactgcatgggaggaaccccagagccgcgaccgcgcctcggagaaggtgccccacaccggctcgcccgacccacccaccaccccccttccgcccccaacagctcacaaaaccgcgtaggaaggggcggcgttccaaggcgtgactcggcgccagagtggttcagtgccctccaaggccagccgagtagggggtcggctccgtagccccaaccccgctggatggctgcgcgggacggggtggagtcagtcccgaaatatacggccgggggaggggaccctgctcccagtgcgcaacggatggggatgggggaggggaaggagatgagcccgggacctcggcgcggggggcagtggggcatcctcccggcagtcctggcctccgctcagccacggtgctgccccggcgccccagacctcccgtccgagcgtgcccagagagaataaagacacctgccctcgcggacagcccgggcctgaagtcaatttacgcccacgagacccgcccgaggcaagagaactgtggtccccattcacagacgcggcgacccccgccagcgggaagccgcgaggccagggcgtgctggtgggccgacctccctccccggacgcctcgccccggcccggcccggcccgccgcctccttaccccccgcgcatccagccaagaagtccagcgccatggccgggtccccggcgaggccgcctttcctcctcgtcctccccctgaggcccctcgccgggctgggcgccgtcggggtccccgagcgcgcggtgccggggctgggcctggccgctcctcctggcgcggagcccgggcaggcgcggtcagggatggtggggatggcggcagcagctagacccgcgctggtccctcggcggcagctgactcgctggatcccctccggcccgcggtccctcacctcgggccgcgcgccccgcccctcgtgcctgccggcagggcccgggtgggggcgccgagtgaggccaatgggcgggcacggcgcggacaacaccccgggcactgcgcttcgccgccgcgcctcattggccgggcgtgcgcgggaggcggggcgcgggggacgtggtgggcgcgcgggcggggcgcggggacgcctcagacaaagagcgcgctgggtgcgcaggtccggcgggaggggacgcgcggggtggcggggttgagccgaggactcccccacccggagtacgcggggtggctctggtctggaccgggtcgggaaccggaccctgggttcggagtccggcgccgccgcagaacctcagcgccctagtctgtgccgtgcggaccctgccgcgaaaacggccgtggagcgccgggacgttccgaggcccgcagactgggacgccgctagttgcgaaactccgcgagcgggaatcgcccgtggggagcctctgcccgtcccgcctgcgcgcccgcggcggcggtggcctccggggcttccggactcctggccgaacccgccgggttctgggggtcggacgcgcacgggcgcttcctgcggagcctgaggctgggatttgggcggagagcagggaaccttaaaagggaaaggggccatgggcaaagggcgcagcaggccttcgggccacagctccttcccgaggactgcgggtcgcgggagccgcggaaggttgtggagagagggaggttcctggactgggctgcagagtggagtcgggccagatcgcagcgcctccgtcagcggcggccggacggggcgagaccggaggggctcggtaggggccgcgctcaggcgctgaagtcggagggtgcttggctctgggtcaccagggtatccatgggctgcggggatgaatgagagccgagtctgactcggccccccag

SEQ ID NO: 61234 - DNA, 584 bp, Homo sapiens
ctgcccatctctccctcctccgtttgtcttccatccatccatctgtctgcccagccctcctccatccgtccctccatccctctgtccatccatccatccttccatctgttcactgactcattttctcacatacttatttacgtggtctccccagggtgcccacctattctgggtgccatgggtgtggagacaaacccagcaccaccctgcctgcctgaagcccacagctgagtggggaaatgtttagacctgcacgaagcagcctaaatggtggggtggcctgttttctatttctgcctcagagaagagggtcaagttagggcatgtttgttcaggagacaaagggcaggtaaaacttggctgcgatgactgagaacatgcttgtctcaaatgtcaccttctggggcctccctaacacctcctgcaagtctccctctccccgacaccttatttctctcctggcacttgccgccattgcgggtactctgtattttggctattcatctgttggctggctgtcctcctccctgaacataattatggtccaccagggcaagggctttttttttttgggacacagagtc

SEQ ID NO: 61235 - DNA, 3798 bp, Homo sapiens
gggcagggggacttggtggaggcagccttggccttcgcctctgggtccagggagacacattcccatggagcagagagcagggaaccggggcagcgggaagggtgagagcagatggtgggtgctgttcctgggttcaggcctgtccttgccaccccctccctccctgccaactggagctccttgaggacagggactggctctcatttgcctgggtgtagcatcagcaaagtaagtgttttttgagtgagtaagagagggagctttgcaggtttcccaggcaggggtcctgagcaaatccaggggagtcgggaaagcccaggggacacagtgaaggcctgggcttggacctggagggcgagagctgtcacagccccatctctggaccttcccaggaggtgtttggatgtgatggggcagtgcccctgctctctggtgcctgtcacctcccgtgctctctcctgtgttttcctgacacctgggtcccgagggcactgggacaagggtcccgggggcagggagggagtccagctgtgtgccgcgtggcctcagcaggctctgcttccggtcccctcccctgccgcaggtatttaaggtctgagaggggccagctgggagctgttgaggccaccctggtggcaccaaagccctctcaggcaggcagacccagggcctccccgccacaccttgttcatggattttgtcgctggagccatcggaggtaacagacaggatggtgggctgtgcagacactgctgctcctgggggtagcaggaggaactgaggtccaggaaggtgctgggcagcagggtgggctttgaggagcccctcaccccccaggatctgccaggagcagagagcaggttcctgggaggctaaggctgggtgaggggtgctgcagggcctggggggctgcactggcctgggaggctcagacaggaggctgagggcaggctggggatggggctgtggtctaggcatgggggccgctcgggaggcagagtcagggaggctgggagtccttggtgtggggaggggtgattgagtcactggaagggaaagaagaccccaggagaggatcgagagggtggggagatgggtagggaagatgggcctggtcctgcagcagggactggaaggggcgggcagaggacggtaaggggcctggcgaggtggctccacctgccctgctgggtgtgtgcacctggctaggcctccagagcctgcttctcaggccagactctgctggagaaaccgttctccctcctggggaagggctcctggtgaaagactgattcagggagataaccaggccctgggacacgggctcagctccatcccgtgggctgtgggggctgttctgagtgggcactcctgcccttgctggtcttgtgaaacatcggtgggtggcgtcagtacttctggaaacagcatgggggttgggagagcggcccagctctggccctgggagaaggcagagtacctgccccattaacaggctttttcttttttttttcccttgagatggagtcttgttctgtcgcctaggctgaaatgcactggcgtgatcttggctcactgcaacctctgcctcctgggttcaagtgattctcctgcctcagccgcccaagtagctgggattacagacatgcaccacaatgtctggctaatttttgggtttttagtagaggcagggttttaccatgttggtcaggctggtctcaaactcctgacctcaagcgatccgcacgcctcagcctcccaaagtgctgggattacaggcgtgagccactgcgcccggcctccattagcagcctttctcagccccagctaggtgccagcctggggccagccgctcccttcctcagggaagctactggacttgcctgacatcacacagctggaaagggctcctgagtctggcatctttcctccggagccatgaggaggcctaggtaaagggctctcactctgtgcctggccctgggtcatggggtgtcagccctcggccgtgtccttggagaactccagttctggaggtggcggtggcatacaacagcaaggccatatgacaagggctctgctcaacatgttccaggcacagaggcagcccagagtacagaggccagagagggctccagagaggaggtagtgtcgtggcagggctttgatggatgagtaggagcctggtgaggtgtgtgaggtgtatgggagggttaagaagggtcgttctctccaagccacttggtcttttgccttacatttattcacttcattctttcatcccacatatttactgagtcctgggctacagtgaatagggtacagtccccatgtgcctattttcttccattggcctttaccacctcccctcaggggagagaatggtcctcccagggaccaccctgtttcccctctgacttccctgtggcagtgctggggcttggatgttgaggcctggcacccgaggcctctctgcaaggtgtggactcccggccctctctcttccacacacgcttgtggttccaggcagtcctggctcttcacgaaccccggtgtgggcttcggcttccctcctcctggcctttgcccaggctgtgcctccccctccttccacccacgcagccaaaacacagttaccgcctggctcacaggcaaaccctccatgggctgacggcttgagggcaaggtctgcctggctcagagacagggcccagctagggtaggatcaaacgttctctcagagcatgacgcccgtggggaggccggggcatgtcggcatgtctttggcccaaggcagcgaggacgaggcagtcccgggccaggactcagggaaggggaacttgcttgcaaagggtagaagacactcggaggctcaatttcctcatctctaaaacgggggtgccctcaggattgatgagacctggtgcagaccagaagggccaaatgtgggtctgcccttgggggagcccagtcagcgtgcgctctgcttctgcttccctgcaatggggttgaactgctcgccggccccactctcctcaccgtgggcctcttctttccttgcaggcgtctgcggtgttgctgtgggctaccccctggacacggtgaaggtgcggcaatagccagccccccaaccatcctaaggcccctgcacctgtccacggccaggagacttttctagaatgctaaacagacccacccctttcctacccaaatgccttcaatggctccccatagcccctgggactatgtcagtcccactttctcacccctgtgccccaggtttctcgtctaacacaaggctccctgtccctgctgtgccaccgtccagcatggctgggacaatcaagagtgtgactctgccccttccccagggcctgctggccttgccctaggcctggagccgctcgtgcctgaagcccacttctcctgcaggtcaggatccagacggagccaaagtacacaggcatctggcactgcgtccgggatacgtatcaccgagagcgcgtaggtctggggccaggggctgggtagggagacagggaggggatgctgggcctgcctccgctgcccagcaggtgatgccaggctccccgctgggtctcagctctctcaccttccacatgggaatagttctgccaatctcatgggttcctctgaggtctggagccaggacatctggcagctagaggggcctcagaaggaggttcccacctccagcagagggtctagaggtagcgttcaggtctttgaaagtcggaggagggacccatgcactgcatttctgtctcctccaggcca

SEQ ID NO: 61236 - DNA, 2338 bp, Homo sapiens
agggtggtagttggaataaagttagataacacaggcttactgtgtgcaggtggcaggtactcactcagcaaagccacctgagtcgtcagcactgtgctactattttgatttttttaatttgagagatggggcctcactgtgccaccccagctggggtgcagtggctattcacaggcacaatagtagctcactgcagccttgaatccctgggctcaagccatcctcctgagtagctgggactacaggcacgtgccactgccctgcctgaacctgttatttttaggaggctggagcagatgtgccctctcttttctagtgtggagattctgattttggagctgaagtcgggcacggggatttagagtgagggcctgggcgggccctgttctgccccacaagaagcctgcaggcccagtgaccgtctgtaggcctctgtttttcctgacctcatgctaactgctcacctcgagggctctactggtccctaagtgaatgataaatgtcccagatccataaacaagtttttcttttttcttttctttttttttttttttgagctggagtctcactctgttgcccaggctggagaacagtggtgcgatctcggctcactgcaacccctgtcttccagggtcaaacaattctcctgcctcagcctcccgagtagctgggattataggtgcctgccaccaagcctggttaatttttgtatttttagtagagacaggagtttcaccatgttggccacgctggtctcgaactcctgacctcaggtgatccacctgcctcggcctctcaaagtgctggaattataggtgtgagctatcgcacctggccataaacaactttttccaaacaacttctcagaagcaaaataaaacagtggacttttccaatggcgcttccctccccactctgcaccctgtgctccggaagttttggccagaagtgaaagggaaagaaaagtcttcaattataccagcttccaactgagtggggagagttggtggagggcatgtcttaggaagttttgatatgaaaggcttccccattgtcaaccagaacctgcttgggactttccagaacggtcaggggcagtgactcagagggcatgtgacatgcctcaaatacagttcccagcattcccactgcaatcttctagcctgcaaacacacacttgattccaaagaaaatgtcaactgctttgtgtaacagtgaggcaattatatatacactggctgttgaggaaccaggcaacagaactggggccatgcaaaataaggaagctcaaactaacttctccttttagtttctctagtgatttgtcaaatgtttgctgaatgcctgctgcatgcatccctcctggggccagcaggactgtcccgtggatggacgtttctccgttctatgtctctcagtgagaacgctctctgggagaagaccagctcataacccctgcttggtaatggctgctcagggccaggagagcagtgctgctgattcctggtggtggaaacttggtcaagtggctgggcttctctaagcctcatcatctcatctttaaagggaatagcaccaccacctcccagtgagaatgaaacatgagaaaacataaataaggcaccgggtccagccgctggaacacagctgatgatgagaaatatacacaaatcttttccattatttaataacatccacactaattataactttaaggaaattgccatgactttgcctgcagaacagtgctgataagaaaagcagaaaaggaaaaaaagaaaaaaaattcaaaattttacctaaatgaaaggacacaaaacaaattcacctgattcatgtgggaaggacaggctgccttgagttctgcagggagcaaagttggcaatcctggagttcagcattgctacggtggctgggtggctgaggcccaaagcactgcgcagtggtgtgtgtgtgcgtgtgccccccagggcatgtttctgatcccgctggctgccctctgcctgggccactgctcaccttggttttgatctgcttggccgtgtcggtgaggaagatggaggagttggggtcgctggcactcattttggtctgggcgccctgcagggctgggaagaaggtggagtgcagcagggctggtttaggatagccgatcctgggggcgacgtcccttgtcattctaaagtaaggatcctgtggggagagtaaggaccctgatgagggcggccagaaaacatgccagctttcagccatgagcagtccctgtgagcatcttcccagaaggctctcatgcttccaaccaaagaaattcactccctcctccccttcatcttttcct

SEQ ID NO: 61237 - DNA, 2215 bp, Homo sapiens
atgacggtgctgagaggcaagctacggatccaagcccgcgactgctcagccaggatctctgttccctatgggagcagtgaatcacctgaactttgggtcaatggaagaagtaaaatgcataacaccctaatcctaagacacaagtcctgaccccctaaaccaaggttttcagcactttgctaaaaacacgaacaagctctaagcctggcaaagatggcaatacatacccaggttgtggaagacactgcagaggtggccactggtcacgctgggcagttgagctgctgagagtgccctgcccagccagaaatggtctttaatactcttcccctctttctttcagtttcccttctgaaaaaagatgcttttgtctttcgttctccccaccctgcattcagctaagggtttcttataaatcacccagattctcagaaacacttgagctcttgaccaaccttcttgatgagactgtccaatcaggggtgggttgcctggggggccaggttgagaccaatgaaaccctcttgagaatcgagccattagctggtcattgcatcagccacccctcaccccccgctggcctccaaataacctccccaccctcttcccgttccccaccctcagcgtcagtgtgactgattttgtgtagtcgtgggcggtggaaagagaaactgtaaattccccgcatctgttcaccgaggcggcacagtgcagtggaaagatcaggagttctggggtcacagacgcctgggtttcaatcccagcttggacttattcgaaaccttgggcaagggtcgcattacttttctgcttccccttcggtttcctcatctgtggaatgggcatggagaagcctgctaacattaccgttgaggggactaagtgcaacactacgcaaagcctctggcacatggcaggcgctaaataaaaatgggggcctctctcctcgggaaaagcgaacaggcggagacgatgaagggtgccagtgggaaagggagacggggtgggtcggcggcgctcagaggaaaggggcgaggggtcggtggcaggctccgcgcctcacagtgccagaacgcggcgggcagcaagccgggctctaaggatactcccgggagggccaggccactgggcgccgcgccagcgtccctccatcactccctcccttgtttcctcactccgccccggccttactcccctcgcttaccctgcccagccgggccagtcagcgctcccggctcagcaaccggctgtctcctgggcgtccgtggaaacgccgtccggacggaacaacttccggcccgacggcgccgtcattggctgttcgcgcgggggcggggcagaggccgccactgattggctggcggccgcggcgtcgcgtcggaacgtgactggatggtagtgtgctggccggtctgcctccgggagaaccgagcgcttccggtgcgtgtggtgagcggcgggccccgggctggaggggccgggactgggcagcgcctaaagcgccccgtgccgcttaacgcggtctctcatagccgctcgccttcctttcacttcctgttccttcagaaagcgctgtgccttggaccaaccttacttcttactattgacagctcagctaactcctattcatccttcaaaacccatctctggtcgtatcttgtttgttgctttcatcgctctggggcctccggggggatctgtgttttgtgtttgatttccacccacaccagacccagcatagggcttgacaaagagtacgtaatcaggaaatgtttgttgaatgggaatatcctatttcttttacttcctagcatctccccctcccacccgtttgcattccagaaatatttttagacgctgggcattgaatagtgaacaaaacacagaaagtcctgtcctcatggggctgacttgctgatagtgactgtcagagtcactcgctccttccttagactcttctccagtgtccctgccttcccttccatcttactgtctgttcctcttcgtttaatccctcatctccttccagagggagcacgggcaccctggtggtgggaatctgggtgcatggtgggtggtgcctgggcagaggagttgagagtggcctcgggaccaggcttagcatttagagaacagaaatgccaaattatttgcagtgcacggttccattagtttataattagtctttcatattatattagttccattggagatg

SEQ ID NO: 61238 - DNA, 579 bp, Homo sapiens
aggaggctgactacagacatttatggaatgatgacctgacttgtagaccagtggaaccctcaggcgaatgatgccacttgggggaaaggtgtggaagaggttgggtggttgattccaggggacatagaaacccattgtctagaagaagagatgggtaataggctgtctggaatgacttagaaaaggacttggagggaatctgttgatgctgacctgactccacctgttgggggatggaggcggagcttggcgtgtttgattaaggttgggtgcactgggttttcttggaagtcggtctattgcctgagcgttctgtgctgttccaccgcgccctctgctgtcctaggagtgcctagcacccttctttttctctggattgtgcttggtgctaacagcacagaagtaaaaaattaccaaagcacttctttctgggaactaattgataaccatgtattgtgtatgatggttcagaatttcagaaagattttttttttttttgagacgaagtttcactcttgtcgcccaggctggggtgcaatggcgcgatcttggctcactgcaacctctgcctcctgggtt

SEQ ID NO: 61239 - DNA, 552 bp, Homo sapiens
tttcttttgtctattctcccagatgaacacagctctcatgcggacccctcatatactggggggagtggagcaagccgggggacagaagccctgaggggcagtcagaaggtacatgtgagtgagaccaactgtgtcagcccaggatagctggaagcctgccttcacctggcctcccctctggcaggcttcctgaagtttcctgaacttggcagaggacagcgtaccttgatcttctacgtggaatactgtgatactggctgaaatgcagggaggaccagaagggctttagaaacctacaaccaaagcggccctagaactctgctttgccagggcttgtggggctgttccaggcctgcctttcctcgccaggattggggcactggggagctcggcccccccatagaacgagggccatacagagatgagcggcaccctctggggctgctgctgctgaaggtcgttgactttgcaactctgattgcttgggcatcctggatgtccctggattgagcgtctcggtttctcctctttatttcttggcctttctgtttt

SEQ ID NO: 61240 - DNA, 1354 bp, Homo sapiens
agatgaatatagcctttctggaaaggctcctggctcattgaaagaaacaggtggacagatcattatagcgcagcatcatgactgctctgaagggtgttgggtaaggtgctctggggcataaagaacagcctgggaggggcagtgtcagcaagtcacaggagtcctagaggatgggtagccattgctcagcagcaaagcgatagaaaagcattccaggccaagggaacagagtgtgcaaaggcagggaggtgtacaagagcatgctgccatcagcaaactgcaaggtagctggacgaggctgggcattggatgcataaggcatgaggagcaagacaggctggagaaaactttttttgtttttgagacggagtcttgctctgtcgcctaggctggagtgcagtggtgtggtcttggctcactgcaacctctgcctcgcaggctcaagcaattctcctgcctcagcctcctgagtagctgggattacaggtgtgcaccaccacacctggctaatttttgtatttttggtagagacagagtttcaccatgttggccaggctatctccaactccttacctcaagtgatccacccgccttggcctcccaaagtgctgggattacaggcatgaaccaccacacccggcctggagaagacttctgatcaggagtggggagtgtgaagaggttgcaatacatgctcttcgaagtgcattccatttccgcctgacagagccttgcttcttgacatgcagaggcatgtcactccttttgttcttgcttcagagggaagggacactgctaacacgctggagtttaataatttacttttgctgcaggagtatggccttccttgtaatgtttcagccagcattccagtaaaattttatgatagttaagccctatcggagcattggttttatatgaaaaagataaatcattgttagaaaaacaggagtcttaacttttaaacaccccttgttatttttcttgtaaaactttaaaaaataatttcagatttatggaagagttataaaaataatacagagagttcctatgtacccttcacccaacttcttcgaatggtaacatcttgcataacctggtgcatttatcaaactaagaaattaacattggtacaactctgttaattaaactatggactttatttgcatttcaccaggttttccactaatgtcctttttccgtttcaggatccaatctaggatgccatattgcatttagagagctcttgctatttaataagtaatttgtttttttggggggtggactgggcagtaaggaatggactggagcttgtcctggccactaattttgagttccctgttctgagcaaacc

SEQ ID NO: 61241 - DNA, 1089 bp, Homo sapiens
tgtgcataggcttttgagtttctcaggtgcctacatggggctcaaaatgatgatgcaatcaatccgtttcttgacttttgggcctgggtccagctcagaatggaggtgtgctccatgggcttgccttcggagaagatggttagcagggctgtgggaagggatgtgtggtggacagaggtacaggctccccaaggcttagaggcttcagaagcccatgtcaggcacgtggggcccaggttcaaagcagaggatggagaagggagggttaaagccttccttctgacgttgatatgtgtgtctcagcactgggacctggagcagtcggcttcggaggcccgttggactgttgaatattgatggtgtgggtttggctgaggagcataggcaggtgtgtttgccattcttatgtactcaggaggggtatgaagggcaagtcagtggcacaattcaagcaaagtgctgctgttactcgagcatttgctgtgtgccaggatcttcacacggacagcctcagttttcataggagtcacttttaggcattttatctccattttgcagttgaagcaattgatacttaagatggtagtatctttgtttagtgtgaagagccaggaattgagtggggaatgcccttatggcagcaagacagtggcaccaagtcctgcctaggtggcttgtccaatgatcagagtccaaggccacattgctaccaagtggcagagctggaatcagcgctactcagcctcacacattttgctccctgtgcctcttcagaacttcggcctgtcacatgtgtgcagctgtgggagcccagattgtgagttgatcaaggtcagggccacaccctgcacttcctgcctgacacagagtaggtgctggacagacatttgtgttgtgaaagagtgagtgagtgaatgaaagacacaccatggggatagaaaaataaggggcaggccccagggcggttggcagatgtgaaatgtggtttaaagacttggcagtaaatctgtggctaggccccccttctcctttcattcccttcttccttccttcttgggattcagaattgctctctgggcagagggctgc

SEQ ID NO: 61242 - DNA, 2565 bp, Homo sapiens
agtcaaattgaattgaatgagcttttattgaacgcccactctgtgccagacaccagctccttaacccttgcactgccctgtaggtggctatggggagctgagccagaggaggttttgccccatgctcacgatcattcagctggcaaacctgggaggtgggatttgaagttaggtttgattctctggctttttcatccaaagctgattataggcagacttgattaaggagaagagagaggttgagtggctttcatgttatttcattgaatcttgtttagtcttctcagccaccctgtgaggttcattacattttccctattgtatatctgaggaaagtaaggctcagagaggtacagtgatatgctcagggtcacacagctggtaagaggcagagctgggatttgaactcagaactgcctggctgcaaggccagagttccttctagaacccctctaggggtctgcacttcctttagcacatggccaattgaccacctgcccacaaaaaatggcctggccctggtggctagggcaccctcctgcagatggaggcaaggagcagtagggagtggggctgggcatcagttgcccaggtacttcctagctctatgccctgggcaagtgaagtcctcctttctgaccctccctgcacccactggtgactggtggcagaataccctcctgggttattgttaggatcacagacaacatgtgtgaggcacctggcacttggtgggcactcaggaagtgaaggaccctgccctttggcatctgttgcttgtcagaatgcgtggtggatggctctggcctcggtgacgaagctgctgttgcttcagcccccggactcctgtgcatcacagagctgattcagtgcagacaggtgactcatctgatggcattttgtgtggcgttgtgcagttcagcctggtacagcacggcccgcccacagcaggtattcaagagccgttagtgtttatgaaggtgataaaattgcctagatggagggaagccgtcaaaataagagcctttgcctgtcttgtgaaagttaacttgcaaacctaatgcctgtggggctgctgaaaaagcgtcacctggatttctccttggagacagaactctctggaaggacagctgggcagcccctgcttgccatgtgggggtggacgctttttatgtgacagtgagttggagaaactaacagtggtcttcaaggcattgtgctcagcttaactctttgaattgccatagctttaaaatgaatactagaaacagttatatatttttcacactctccatattttctccattcaatataataaatgttatcttgaatgtttgagggttttatagcaaaaattcctcccatttgtaaagcatgctgcagtggatgggagtgaactagctggcagcgctctcgtgtgacgtggcagaggctgagggagttgcccaaaccccacttccagttggaggaagcctgggccctgacttccagtgcatgttcaggtccacttgtcaaggaaaggatccattgttaagaaacaaacatgggaaactgtcatgtgagcgtccctaaaagcagcatagtcattttcgagtcactctctgataaagatagaacacttcatttaggcacatttcaggatttcagaacatttggagtagtcctggggtggaaagcagcgttttcctttttcaatttcaacctgactccattcctctctttatgtgtgtcagtcatagcaggggagtgttttcctcttggatgcgtttgcacctggcaaatgaatgtgcaggaattctttgattgcaaaatagctactctcaaaatgcagacaggcagccacagtcagggagcccttcggccacggcagcggggtggcgccagacacctggctttgagtcccgtggaggcatgccacttagtctgttctgagcggctgtttacaggcggatagaaagggctgtaggatgggaccctcaaggttttggggcatgggaggggctggccgtcatgattcagcatgctagctctctggaggctgtgctgagcactgagggacactgggagaaaaacacaggctcctgctttgtccatgtggaaggagcccaggctgccctggctgctatacgcatccttccaggcaaccttcaccttctggtctatttagtctcattccctgtttttattcccttcttttatttagggagagccagagcagcaattctcaggtcaggattatttgggagatccatattacttctgattatttacgaagggacaggccgggggaggtaaccacctcgataaattcgtcagcgaggcagctggagggatgtgtgacaaacataccaggctgtcatttggccagagattgtctgcactgggattgttcccccaggatagtcctgatgacaaatgtaattgacattttttattaaccctgaaatgattaaagatgctgctgctgaatttgtgtcaaagtacccggtccctggcattttgagaaagggattctctgtggagccaataaacagcctgtgttttcttcctgttcatcactttaat

SEQ ID NO: 61243 - DNA, 698 bp, Homo sapiens
ttcccaaatggcctcccgtaggcgccacctccacctcactttggctgtctgtacagtgggagacccagctgcctagagggtccctggaaattgcattgatgaatgtcctcaggctccagcaagggaagctggccagggggcctgggtcttgcccaaggtgacactgtcaactggtggcagagcccaaccctgcgctgccctgccgagagctgaggagaaacatacatggatgtgtgggcgggtggcggatgtgcagacagggcctccctgacggcaaggcaggatctcagtgcagggagagggcaggggtggagcagggaaccctgtgccaaggccggctgcctgggtagatggggactgtccaggacttcccgttcagctgtggggacagtccaagtgcagaaggtcgaagggcagatccagagggaaactgccagctccagagctcagccccttgggagccccacaggagcactgaacagtttctagaactctccagctgtcacagatctgtgccttttcatggctgtgttccatttgcctaaaatacctgttgaactcctattcatccttcaacacccattgtgatcctctcctctgacccctttcattcgtcctcctggagcagtgagggccctcccctctgagaggcccacaggccctgtgttctggaagccctgagctgagtgttacactgt

SEQ ID NO: 61244 - DNA, 461 bp, Homo sapiens
ggaagcttttgactggggtctcccaggtagatgattgacggtagaggccccagagaagatcctgagctgaatgccaaagcttgggcgagcttccctagttgacaaaaccccatgtcacaggaagtaacactgtccatgaccccatggggagaagacaacgggaagccccgtgtctggaactttcctgaactctgccccatgtacctcctccctcagcagagtctaatctgtccctttcataagctcactgtgagcatagcagctttcagtgagttctgtgagtccttccatcaaattttgaaaacgaagcatggtcttgggaacctccaaaccctcagctggtgtcagaagtgagggtgaacttgtggactgtcccttatgtcacagcgactctctgattggcagatgtccatgcagaacggagtgctggatatgttgactgtcaccttggtgagcaggat

SEQ ID NO: 61245 - DNA, 1582 bp, Homo sapiens
attggaagaagaactgttttgggccacacataaaatgcactaacactaaccattgctgatgtactaaaaaaaattgcaaaaaaaaaaaaaatctcataatgtcttaggaaagtttatgaatttgtgttgggcttcaaagctgtcctgggccacatgaggcccatgggccatgggttggacaagcttgatctgaacagaagccagaacctgttgtccaaaatgatggaagaattggggtctgtcctttccctcacaggcccagagtactaggccctggagggcagaatgatatcaaaggaggggccaccgccactgccatactgtatggcagcttccatttccctccatgcattccattgctgagctccttatccaccccagctgtggcttctgcaggccctagtgtggcatacactgtgcccagcaaagctgtagaggcttggctgcctccctctagatttcaaaggatgccccaaggggcctcagggcccagagagagaaacactgcagggacaagaccatcatagacagcccctaccagaataatacccaccatagccaggggtgggaccatctccacaaacccagatcagcagagccattggaatgtgattctaacctgggagtgtcacaggcatgaaatcccaacctgtgagacctgtagtatggggtgtgcccagcacagccatgggggcagggccaccaccactgtgtgtccaacaggcaggatccccaccccagtgagtctggagggcagatcaccaagccaaagcagattatttctgagccttaaggtttctggtcttggccgggacctgtcactccttccttctttcctatttttccgtttgggaatgggaatgtctagcctatgcctgttctaccattgtatttaggaagcacataacatgtttgatatcacaggctcccagctggagagcaatttgcctcagaatgaatcataccttgggtctcatccatatctgatacagatgatatttacatgagactttgaactttagacttttgagttgatgctggaacaagttaagatgttttgggcaattgggatggaatgaatgcattttgcatgcaaaaagcacattaaatttgggaggccaagagaaaaatgctatgaagtgaatgtttatgtccctccaaaattcatatgctgaaatcttagcccccatggtggcggtgttaggtgatgagacctttgggagatgctatggtttaaatgtgtctcccaaagtttgtgtcttgggaacttaatacccaatacaacaatgttgggagacagtgtctgataaaaggtgatgaggtcatgaggactctgccttcatgaatggattaatgtcattattgtgggagtgagttagctatcatgagagtgggtgtgttataaaagtgagtttggatccccttcctccctcactcttgcccttgctcttctgcgttccaccatgggatgacacagcacgaaggccatcaccagatgctggcgccatgctgttgggcttctcagcctttagaaccttgagccaaatacctttctgtttataataaattacccagtctgtga

SEQ ID NO: 61246 - DNA, 987 bp, Homo sapiens
gcaacatctggcagagagtgaactgtaaatggtgaacacgctggcgaggcagcgactccaattaggaaacaactagatttctctaagtatgatgggaaagtaattctctggccaacagagtttaatcagaatgttttatgcaagacgtatccctgaccctgacaaatcttccccttcttgctggaaattaaacaaatacattgtcagcgcggattccgatgagcgcataaacagatgtgggctggtacaatcatgaaattgaggagtttcaatgactgagacgagcaagaaacaggctggaagctctgctgtgtcctctaggcttttagccattcctgctgtgtgctgggggccccaggaaaacaaagactttctgccttgtctgtggcgtctctccataccccacccccaaagagacatccttttcctccttgtgaccctgtagtctaaatggcatcctgaattcccttcggttccagctcctgccaccctgccctgggagcatttgccccagcatctgtctcccctggcaggccgttctgatgtgtcttcacagccctggcatccgggacaatgcctggcacacagcagaccttgaacaactgtttgcaagaggaagagagggagggcgggagggcgaagtccggggactctgccttccaggaggttccgtgatcaaaagctgacttgcttctgagtctgtggagctgagctgcaactcagccaggctgcaactctgtgtgaggcactgtttactgaccaggaaagtgggcagaatggcaggtggttgctgtgagaattacttaaggcagttgactcatctggcacagaagaggcatgagctggtggtggtggcagtcggtggctcacactccatgggaagcaacactcactgtgccgagtgccttggtggcagtgtcggggcaaagacagaaggaaggcgggagaaagaccaatggttccatcccagaggagggtgctactggg

SEQ ID NO: 61247 - DNA, 1452 bp, Homo sapiens
atccaggacactgcagagacccctctcatccctttgacctttccagaaaaggacctgcaagagataaagtagtttccgaaaggcctccaggcaggggaggggcctctgataatactcacagctcaaagttggtttggaacaaagccctcctggtgccatggcactggggcagcaaagcggggcagaaaatgatgggaggggagccgcctcccaaagggctgcaaactggggtgaattgaggctacttaatacattcaatccatcagagtaatgccttgtaattaagattcctggaaatgaagtagtaccggggcactccatggaagatctgccttcaaacggttcaggtcagccttaggctcaagcacggctctaattgacggctccccttgggtctgaaagaaaagatgtaatcagaccacacaaagcacgtcctgtccaattacaaggatcggcatggatgggctgacctgtgacctataaaacaaaattaagatttccaaacatcaccaggaggtagggggagagatggctcgtccgtgctccagccttccaactccccagagtggagacagaacaaaatcgtagccctggaaagaaatgtggtggactttgatcagccattgtgcaacctttcagttggagtctttctggggggtgggagggtcagggggactaatgctcagtttcttgcactggatgtccagatgcgttatcacaaaagagcatttctttgcagttgagccctagagtgccaggaagctagttctcgaaacaagccagaatctccaacagccataggacatgctaattacgtttgggggcagtgtggggatgcacttgatgtcatggtggaaaacacccccatactcacgccttatgggacctgcactctggagcatgaggccgactgcctgggttctggggtgagaacctatcaacagcaattgaggaatgtttatccattcttctgtctcctgactcagggagctgtgtttcatcttccaggaaagaactgggcgggcacattgcacttagcttattcaactatcagggacctccagcggtcgggaggttgaggaagagtcatggggcctcacaaagtctttgcagaaacaggcctttgcctccgcgccgccgagccaggagaacctgcagcgagcaactagctcttctttccttctcttttaaaatcaacacccgtccccagatttgcttttggcaaacattgcttaactgctgctgttttccctgaagtcactgaagagagagttagataatgagctggcatgctcttttgaaatgtttactgtgttccttaaagcaagggacatgctggttcctaaactaatttggggttgctagatcttttctactctttttggagatctccgaagtaaacacatggacttaagtataattatccgagagtcaaataaacagtcatggggc

SEQ ID NO: 61248 - DNA, 799 bp, Homo sapiens
cagatgtctttcaatctgattacctcacatgctggcctgtatcccagatgtgagatccagagaaacgtgatggaatgtgtcactgtcttcttttcacatcctctcccagatttcattaatctgctgataggtactcattaaaatactagtattcgccctgggacacagtttcatgagattacttcacgaccgttacaggacatattacagtaaatgaattttccttcttttagcatggtggattaaaaaaatacataattttgtgccccagtcctcaaagaattaaacatttcagcatatcttacgacaggatattggcaacgttttctgtaatgggtcagatagtaaatattttgggctttgcaggtcacgtggtctctgtcgcaactactcaacagtgctatggcaggacagaagcagccatagatgatgtgtaaatgaacaagcttggctgcattccaataaaactttatttacaaaaacaggctgtgggaaggacttggcccgcaaccctggtttgcctacctctgtcttacaacatagatttcctgaaaataatgcatctaggcagaaagaataggggaaagttcagagtaagacgttgtaaaatatcggcaagagttctcatcgtcttacaagaagtagcctgtgtacaacttaatatcaatccaaggaggaccaagaggcatgccgaaatgagatttaaaggttaaacagaaatctggagggaaaggaagaattgcaaccacactggccaatgatctagtgttgttactctcatttatttgctaagtttccc

SEQ ID NO: 61249 - DNA, 545 bp, Homo sapiens
atatcctttaatttttgcctaaggacttggctgaatccaagttagatccacatgtaacctttttaaggaaggctaaattgagacagaaaggccaagatttttctccgagtagaaatggatatttattacttaagaaattgcctaaatgttgctatcgaggctttataaagactcacttggtgtactggggaaaaaacacacaaagcaaaactagtccactgattctgtaccaattacaatgtttgccttaggtgaattgccaatctatgagtcatatttgtctatatcactctgcccagggtcaagagaagtgtctcaaataagcaggatgtggaaaagcgtttgatcacggtggcgatgccgaggtggggaaaattccagtgataacctctgaggaaaataagccatttcttacaactaaatcctttctgtcatttctaaaatgaaaattaggagcttatcaaaatgtaacatagcttaactatcaagatcaattagagatggaaataattgggtagctagtgttctctacagaaagccagtgt

SEQ ID NO: 61250 - DNA, 567 bp, Homo sapiens
atatccctagctggagaaatatcaaaagaatctgaatatcaccatctggaagttgtgccatggactccagtgggcaggattcgagctgggattctcttcttcctctagcagtgtatttcttctgcttaaaatgagcacaaacacatctaattccctaatggaccaactcagacctaaaagtctcttattctttgcccgccttcctctacccacatggattcctgggattctctaaatgcagatggcaatggggagggctggggattcccatcaaggatatttgatcatcggtgacttcacttaaccaataaatcaaacgtgttgaaatacacacatgtcagaaatgtggtatgctgttactcactcaaaagtctgttggtctgtcttggttgcgattgggcaatgaagccctagggacttatttcggcttcaatagtctgtaaccctcaatcaatatttcgttaagtgtcagtattcattcctagtatttccccaagtttaacttgttccttttgaaacgactggtattcttatgagccagaagactgttatttgaaaatgtttcct

SEQ ID NO: 61251 - DNA, 2082 bp, Homo sapiens
cccccatcagggtgcccagctccccagtctccctgtctcaccaccaccccaacctgggctcagccgcccccgttcagggcaggcaggacttgtcctggcctcggggaggggccggggaagaggagagaagaccccagtggggccccccaggcccgcacatgccgcccgactacctgtgggcttggggagggctccagatcactcctgccctcagagacggcgatgctgagaagtgttatttttattcctccccaagccttgccagattacattgtcaaggccagcactttggagatatttccttggtttcgcaattcacacagtgactaacacatgttacattttgaaaacttctctgggtaaaaatttaagctgaattgtaaatacataaaagtctcaacgttaatggggtacatgatatctcagtgactattgtgtaacaccaagattcggaaaggatgtggaattccatatagtcgggtgaggatgccgtcccagagccgccctgtgaaagcatcattgtgagcagcaaccttgcctttctctgcggttatgtaagttacaaaaccctttgcctcttggcctcgtgaggcatcaggaccctcaggaggctggaactgcagagctccgcccgcgatgatgaatcccctccagggggcatgtgcacacgtgcccggcacaccctgccaggggcttcatgcttgtgacctccttggcaccatgaggcactgggctacaggtgacaaaactgaggcacatgcatgttaagggacttgcctaaggacatcccctgacagaggcaagcaggactcaatcccagatggaatgctcactgctatgcccatcaccccctcagcccctggtgctgggcagctatgagccatgctgtgccgtgtcatgcacactgcaccccccccccaatgatggcacaggatggcccccaccaggacaggcgatgcatgggcggtcacctggggtcactgtcagagcatctggactacgaaatgaaggggatgggccacttggcagtgtccctacgcaagccagagctacaggagcacctgggcataggtgtgggaaggaggcagggagagaaggaaggaagcagagaagccaagagtggttggggagtggctgtgttgggagccagtccccccactgcccaggctcctgcccagccgagtgcccagagccctgcccatctgcagcagccctgcccagccctcccgagcctccacctgcctgttcattgctttgctggatgacgcttatcagcctctacttggccagttttctgtttcatttccccgttcaacattgatctccacacaggactgtagactccatgcaggcagcacactgtctgccgggctcctggccgcatcaccagagcctggccccaggactgggcatggtgggcattgagtagttatttgttgaatgtatgcacctccgaaagaaagagggagccaccatcctcgcctcgctgctgtggctcactgagtggctttaccacctaagatgcctgctgcctttctcctgctccttctgtgacctcagacaggcagtgcaggggaggggtaggcagggcagctctctcctcagcagagctcaccttgggccactcaggggccaggaagtggcagtgcaactcgagacgtttatgacacaatcaactccctgctgaatattgatttttcttcaaagctcagggcctatctgtctgggctcctcccagcgccacccccagccctgcctggcgagcctggagactccagcagcaaggcttcatgctcccagacgctgcaggtccccctactccgccctggtcagggccctccccaccgacatcctggtaacttagacattgcaagccacagctgccgcagtgtgccagaaaacgtccctccaaagacacaggatttatgaaggactgttctctgctgtgtcaggaagggtattcacacaggttgggaagcatctcatgtgctcctttattgactgtgctgggaaatactgaagtgggcaaatgccgtccatctgagctctcaggacacgtaggggataaaggggagttgaggc

SEQ ID NO: 61252 - DNA, 1686 bp, Homo sapiens
aagcaaagttagagagatgttcttgggcccctaaaggtatcaggttgagacagacatcctcgccctgggcctgcggagcttaatggacaggccgggtccccgggccacacttaccagttaagtgacctggggcaagttacttaaccaccccatcttcaatccctcatctgcaaaacagggataatgatacctgctctgcagagcttttatgaggattgcttaagctaattggtgtaaaagcattaattccagcctggcccccaggaggcgatcaataaagaagcattactcttgtgaaatactctagccatcagagcaggcaacaatgtttctgtcttctaaaacgttcccaagagagcctcggctttactctacaaataagacctcttgattttattctgcgagcttaaatatctttgactctctcattacctgaaactcaaggtccttaaataggtctgaggcccctaaacgttcctctaagtgccctgtagagccatcacttagtggctgagacacactcgctggctttcccatcgacagatgcctcggtggccctttctggatcatctaatccctgctccaggccactggctcaagttccctcattgtaataagtgcaagggagggtgtttatgaaggaaagcgggtttgactgaagtccaggctgaactcggaatttccctgtttgctttctcttcctccccgggcgtgctgatggaccagacctgcgggagctaactcaacaggcctccagctgccagagatttgagatgttagtcagggctcaggggcggggggctccgggagcagggagcagggagctggagccctgaaaagacctcagcgtctccttgtcaggactgaacttccaccttgggtcctcgctgagtcttattttgctaatgagatcagacaggcttgtaattttaggtaactgcaattgctaagactggaagagagactcattctctggcattcccacaaattcttcccagtttgtttagcttaggaaattaggcaagagcaggtagaaaaacggcaggtcaaacacaagccattgcaagaaactgactcatgctttaccaacagcgttattcatcccccccgttcctctccctggctatgtatttattcgtttattcagcaaacattgattgagcacctaacatgtgtctctgccttttcacaccctcaggcccttgcccaggctgcatcctccgccatgtcctcccgttgacccactgtgtatccttctagaccaggtcaaaggctacctcctctgggaagcctgccccaaagttccatgccagacccaatccctgcctctctgtaggaaggagactaccatggctcccaagaggagcactggctgccgagtcagaagaggttggctgagaagcacggctccaggacatccctgatgtgtggcttgggcaaggtactgaggctttctgctttctttcctcttctataaagtgtgaatactaatacctcccaaaactaagtgcccagggtgctacataaaatacactacacatcactttccacgtggaactgagcttacaagaaaggcaaggagtttcccagaggccaaaggcaggggaaagccaagagcgagagtgataagtcggtgctggcatgaagccacctcaggtgtcaggcagtcccagtggctttcagtgg

SEQ ID NO: 61253 - DNA, 1355 bp, Homo sapiens
ctagctttggggtgcatcctcagaggtgggggggggcttgctgaaaagacaggtgtatggtcccacctcaggcctgctgaacagaagctctggagcaggctcaggagtttcttttctaacaggctccccgagagatcctagcaaatgtttgcacaacactcacttggaagctatgtgaccaaaaccatgatcacagggttgtccctgaacacggtggggaaataacctctcccttaaatctcccctgcgtggtgacttaggggaggagccggaagagagcagtgcttcacaataaaaggaagaattgcttgaacggaggcgtttcaggcatgagtcacaggccgggtgtggaagaggaaagtgtgaagcaaggtaggcttcccagcacccctccatgcacagcaggggctggccagcctcagccaggccagatggagccctggagggtggggctggctgcccagctagagtgtctccttttacttccagcaggaaaaaaaggcctcctgtcaatagcagaatcatctacgttttccctgccttcctcacttaaatgctttcgaggagtgggaggaagaaattggaggctggaatgaataccctttgccctcctctgaaagcagcctgggaggggtgacggggtgtaggagcagagacttcaagtggcccccacctgccaaaccattctcagggacaggtaccagctgggatgttggcagcagccgctcccctgcaaggagaacctcccacttcctgtcccgcacacctgcctcattggaaagtgacgcacccactgtttggcctcggcagcctgatgtttctcatcacacaggaagacggtcatgctacaggaagacctcggactttgcatccagcagatgtgagttcaaattccagctttgtaatttgcaagctcagaggtggatttgctgggaagctaaacaagcttacctgcagagcccccagcttgcatgggcccctcccaagaccttaacctcattttgtattcataattttgtagtcttttcccttcaaaaggcagcccaaatttaaaagcattaagccccacaagacctgagtccacctaggaggtgggagatatcccttgcagcatgagaataataattaccacctcgtagggttgttctagagattgtcagaccgagaccacgccacacacccagaaggcacccaagtcacagagcctgatattgttcctggagcgccattgcatcatccttgaccacaagatctgcgtcattggatttgtctcaaaaacttgggactctggagataaaacctcattgcaaggctacctttgccactgtatcttagcagcttttgaagcaaagcat

SEQ ID NO: 61254 - DNA, 922 bp, Homo sapiens
ccgccgccgccgccgccgccgtggctgccgcagcctctgggagtctggaaaaggggaagcgagagcaagcgaaagactcagtccccgggcggcggcggcggcggcggccgcgggggcgcgacggccggggcgggggcgctgctgctgcgggggcaggcggcggcaggggcggcggcggcggcggcggcccgctccagccatgccgaataaaaacaagaaggagaaagtgagtccgggcccggccgcgggacggagggagcagggagggactgccgggggagggcgcgacggcaccggggtcctgcgcccgggccccggctcagttccccgcctgacgccgcgggcttcgcgtccccgagggcggccgagccaggcatccccgggcttctctcggcctcatgcccggtgggggcggggagcccggggatcgcgccggagccgcggggcgcaggcccgggccgctgggaccttcgtgatgggccggggctgggcgtggagggagggcgcggcccggggagggggtcggaggggcgcccgtttccgacagcgcgccgtgggcttgggcgggcaggtgcggccgccgagggggttcgcagcctcgcaggctcccggaaaggagcttcagggatgggggctgtagacgcctggggagggacccctgtacgggggaaagggagcgagaagggaccccgctgagagctggtaaggaattctctgccgccccggagggacgctctggggctctcgaacactattattatcctgggtggcggcggcggtgagggctgcgagcaagggtgctgcgtttgcattcgggggggcgggtatgtttctgcttcaggtggagctctgtagcgtttcattatcaccccagaaatcctcactcatagggtttagggtgggagggtagaaagggatgtga

SEQ ID NO: 61255 - DNA, 2245 bp, Homo sapiens
aatatctttaattttaaatttaaacaaaatatctaaaacttaaaaggtatttaatatgtcagcatatttgcaatacaaaaataaacatgctccatttcatttttttgctttcttactcccacggccaggtgatataaatatttcaatttgtgtcactttctagctatcgaatttataaagcggctttcattttctacgtaagtttttaagcttaattttttcagggaaaaaatagatctcaagaaaaaaagtgtttgggatcataagttaataactcatcctattggtaagggaagttgaataagagtccaaactaatggattagaattgtgtaatatttgcttaaccatttgttaaaaaaaaaaaacaaaaaaaaaacactgggttgccagaatcctacctaagatgcagatattaattagaactagcaagtcgaagttgcacaggtgggtataaaatgaatttgggatccctcactgggaaatgctaaagttcacacagacatatacacacacttttttttttttttttttttttttttggtggctccctcgaaatcatttgtttacagtctggccaaggttgtggcctccagtattccccctaagagatgggatctttgcctaaaagttactgagaaacgaaggctgcaaaaagccggaaaatatcccagcttttaaggcacactgacagccaaacagaacgctctttccgtttgcagtttttttagtgtcattttaagttgcagcttccggccaatcagcgagcttcatgcctgctgacatcacgaaccagccagttccctccagctgcagagagcttcagtttgtctttttttttttaaactaaaatggaggctggtttcttgccttaaggagcccattgcctttcccgctgaagtctagatgttgacatgtaataaagcgggcagcaggatggtggtggatgcggccaactccaatgggcctttccagcccgtggtccttctccatattcgaggtaagttattgtgtgtttcactgaatcggaaccttccgtgggtagttaataaatggctattgtgcttcagataagaaaagcaggaagtcctttctagcagaattcaccccatttcgctgcagacttaaccagaggaggttgggtgtgtcactgcagtttggcattttacgaactacttacagaatttgaggcttgaaagaggccttgcatgcatagttcaaagctggtttttctgctttctgctcgctctcccatccccctttcaaagctgtgctgatgtcaaaggatgtgaagtcactgcccagggaaggtattgggtgggggtaggaaggagaggcgggcctgtcgcgcctggccaagttgttcgtacgcagagtttctgttacatatgtgtggcttaatgctgcaaaggttttgtcgaggacacatctcagaattaaagatgaattgcagtcagaaaatatgcacaattgattggaaaagaacttcctttaaaaggattgttttcattcttgccgtggagcctgagagagaaatatgctccactttgaaatattgaaatctatcgtgggtcatcatttttgaaatgttagcgttttcgtggaatattaggaaatattttgcatttaaataggctctgtgttgccagttggcttttaaaattttaaatggcaacaagttttcaaggtatatagagatcactgttttaataattagtttgcttctttttatgcatattttggtttcaaaacttagcctaaaagcacaactactctagtaattaatagcggttatattgaactacaggcatcagggtagtagcctacttattcttggtattttaagatatatgaatttttttttggtcataattgggtgaaatagaaaaatgattttaagcttcatcagatcactttagaatttatagtatcagagctgtgccccaacaaaactgtttctcagaatctcttttaaggaagggtgggagcaagatttctaggtgactaataatctctatgactaaaacgccaggccagacttttcagatcctagggtgtacccaggcacatgcagactcaatctactggaataaaatgggtggtgcttttctctccaaactatctttcatgaaggtggaaatcagcattcaatgaccaaattgtaggacaggctgtgaatttattgtttttgtagtgcacccagtaaaaagcaaaggttgcctacaggtaacattcaggtattttag

SEQ ID NO: 61256 - DNA, 2521 bp, Homo sapiens
gcttgaacctgggaggcggaggttgcagtaagccgagatggcgccactgcactccagcctgggcgacagagcaagactccgtctcaagaaaaaaaaaaaaagaaaaaaaccactagccgggcgtggtgacgcaggcctgtagtcccagctgttcgggaggctgaggcaggagggtcgcttgagcccgtgagccgagatcgcgccactgcactccagcctgggcgacagagcgagaccctgtctcaaaaattaaataaataaataaataaataaataaaggtgtgtgcaggtaacagcaagtagtcttaaaagagtagaccgaggtgtgtgcagagggcaacagttgggatatttgcctctgtctaattagcacctttggacatttgcgtcaggctctgtgctgacaaagagcgcactgacgaccacagtagggccctgccagtcctgtgatggcacccagcatttaagtgtgacagaagccacccacaacaagctacatactgcatataatttaagggggtcacggccccggaagcccagccatggaccacggtttaagtacccctagtccagctggaacaataaacatgaaatgagtgcctggcttggaatgcaagccaggccgtgacagaaatgaggaaggagccgatggtttcagaggctgtcgcgaggagagggccttagaggcaggcgggggacgacagcggacctaaacttctgggcccaggagaagttcgttctttcctccaggatacctggagccgagtgcaggatctcagcgagaaatgccccaatctcaagggcggcaccgagaggtgacgcaagcggcgcgcgaggttgcgtcaatgcaggaccgccccgcctccggcctgtgcattgtgggacctaagggcacctgtcagacgcccaatctcgcgagtgagcgagattcacgcggaacgcagaggtgagaacggggaaggccctcctcagcaggagtcccgccccctgaagggcatgggccaatcacaatgcctctccttcctggccgctgggattggtccgagggtgcacatgaccggactgcgggacatgtgaccgtgccgatctaggtcgtgtgacccgtctggtgtagtcctggaacaagggttttgctgcggagggaaacggccagagacctcgatctaagaccggggtttggagactggcgggcctcggaacagcagagctagcggacttccggtctggccctctgctcacggccgagggcaaggcgggttaggtcacttgctgaggaaagagctcaatatgtcacgtgttcctctcccaatgacgtggacctcagttccctctccagtgaagtgggcacagtgttgcccgaaaaagggtgctctggggcttgcctgagacgggacgcgtggaaatgccctgccgaatatgaatggggcgatggcctcgcgggacggagcagcccaggaaagctgaccgtgggctgggttgtggagcggagccccagggcctcggctgacttagcggccagtcgtacatagtgggtatgcggcgggcccgacgccagtcgttgtggaccactgacttgtaatctttacgacctcagtgagggtcagaagtgtccgcgagccctgtaggcgaggagaggcctggctgagggcgcacagcctggaaggggagaaactagagctggactctgcttgacccacagaccctccgccaggttgcctttgcgaggcaagaagcgaaggttggcgagccagctgggagtacccaccccctccatgcctggtggagtcacccaagccccagcgacaccccggcctgcccaaggtactggtgaccctggaggccggggccctggcttctcagtcagggtctcctccccatggcggcagagctgtctggcgttttgagccctttacaccaggggcaagagggctgcaggccagagccagcaaaagagaagaagcagagggaatgagaaacctagaaggtggaacgggaaggagggagtgaaatgggcaaaggcctccaaaaaaaacaacttccgcctcctaagtttagtgcatttaactctataaatatctattgaacacctactggatgccaggcacttttctaggcactgggcagctagcattaaacagaaggcagaaacccctgccttcaacaaaatctatgctgtgttgaataagtgatacagggaaaagctaaagatggggagagaggtgggaagggtatagaggatgggaagaaatttacaaaagaggcagggagggctttactgagaaggtgacgatgaaggaagtgaaggaagggcattgcaggccaggggctcatcgtgtgcaagggccctggggtggaagggatcatgcagtggcgtgagtgtgggtttgagcagcaggtgatggtcagaggtaatacgtggccaccaaaaggactctggcggccgggcgcagtggctcacgcctgtaatcccagcactttgggaggccgaggcgggcggatcacgaggtcaggagatcgagac

SEQ ID NO: 61257 - DNA, 1874 bp, Homo sapiens
tctggctgtgtgctattcgctgcgtccacagcagtgaagaagacagacgcagcccctgaccaacctcgccaagcccgggcgccgagccaggacgttgagccaagtccccatctcctaggactcgcagtgcggaggctgcgggccccgaccagcgccgagactacaagtcccagaagggcgcgcggcgacatcgccgggcccgccccccgcgcacgcgcggcgccgtgacgctaaggccgcgagcgagcgcgggtggctgcggcggctgcggccggcggggcggggcggggccacctggcagtggctgcctttagggcggagccggctcccgctctcctcagtctgcggtgggctagcggacggtccggcttccggcggccgtttctgtctcttgctggctgtctcgctgagtcgcggccgccttctcatcgctcctggaaggtcccgagcgcgacaccatgtcggagcccgggggcggcggcggcgaggacggctcggccggattggaagtgtcggccgtgcagaatgtggcggacgtgtcggtgctgcagaagcacctgcgcaagctggtgccgctgctgctggaggacggcggcgaggcgccggccgcgctggaggcggcgctggaggagaagagcgccctggagcagatgcgcaagttcctttcggacccgcaggtccacacggtgctggtggagcgctccacgctcaaaggtgcggggccgcggagggcagggtcgccagagccaggcctcgcggaatgcagggcctgccaggtcctccggggtcgcagatgtccccgggatgggaggagcccggcagctgcagatgacccctggatgggcagagcccggcggccgcagacgtcccgccggccgggtccccagggccgcagacgccccgcagaggccggcgcggcgcccggggctcgccctcgccacacccactgcccggcccggagcccccagggcgccccgctcctggtcgcggggaggggaaaggggtccccgtctgccgtcacccaaaacaatggggtcgctttgtctgctcgggcctctcaagatggccgagttgggtggagacagcgtctccctgggctgagagcgggcgaggccgcatccctgcctccagtgtcacatgagcttttcggtttcgatttgtgtccaagccaagtggccttcgggagggatgtgtcgggggcagacccgcggagctgggggcagccggggttctggttcgggaggaggtcgggcgggtgtcccagccctgccttgtggggacccagaggccgaggcccacagagcgacggtgccagccccgggcctgcgagcatcactgttgtaggtggatgctctcacagcatccttgctgaacgggtgtatcctgattttacacctgaggaaactgaggctcaggttaagtgatttcacccaaggtcaccagctaatcttagtcctgagactagactcagtgtctcagctccccatccactgcttgttttcactgatcatacctcatatttgtttaatgcttcgatgatgttaatgataaccctgtaatatttgagtctaattttacagattaaaaaaaaaaaaaaagattcaggttaggcacctagtagggggaagaggctagagttagcgtgttccagctgtctcctcaaataatgatcgcccaccagcaaggttacattcatctaagtctggggcttgcctgcaggcaggctttctcatggattcattacaaccactttgtagcccattacaaccactttgggtgtggcgtgtccatctaagaacctaaggatgatgtccaaggttagcctctagggattggagattgtctaaaaatatttgccaacaagcttcttaaaa

SEQ ID NO: 61258 - DNA, 1947 bp, Homo sapiens
aaaaaaaataaaacagatgtaatgcttacctaattcatagtttaatgatacaaattactagtagtttgaaatacattaaactagtctttgaataaaagtatacacacgttagtgctaaatgccattttgaacatctctagaaattcaataaactctcaaaagttaaccaaggaagtgttcacaagttgttgtaatgtgtgtcagtatagcttgcagggaaggaactcatgaagcaggcccagtactttgattctttgaatgcatggacatatagtacagtattggtctgttacattttaacagtaactttgtattaactagtaactttgccaagcataaggaaatggattcaaattttactgaaagtggtattacttaatcaaacgtgcagattgtgtttgtagtaagcttataaatataacagggctaatagcctctttgttattaagaattaataatcaagtgtccttcctcctctggacaactatttaaaaaaaaaaaaaagaaagaaaagtagaatgtcagattattatttgatggcagtttttgaaacagtgtcctaaattgtgtgactgtaaatgggagtcagacatactcaactgtgtttgatccgtgtctttatagggaatatgcacagaaagactagtccaagatgttttctgtgactggttcgtagtgacttccataagttattatcaagagaagttagaatttagcaaagcagcagggaatatctatttgcattatcgttgtttgaggattatgtcattgggtgtgccttcctgagctgaagcagcattctactgcattgcagtattcccagggcagagctggagcgctcaccacacagcggtgactcatctcttggaatggcacctagttcccctaacccggtttgcattaggaagtgtaggccacatgctcatatgctgtgtccggactgcgcaatttctgtgtgattttatttgtatcaatgatgactctttatggggggtagaaatgattcagagttaacaagccatatttttagttgcgtcagtgatttcctttgatcattatagaatgttaattttattttctgtatattgtttcggtgttattttgatggcatattttatataaatggtagaacaatatggaaaattcagaaaattgagggagaaaatcatcgcagtactttgacagctgtttcagtttggagatagttctttattctctatgcttacattttacaggttgtaatcgtgtgtggctgctttcaggcagtgtgatttctcttgtggtctagctacatttgagtggttagaaaaattggttgctttctttagtttttttaatagtcgttttaaaaaatagcaagtatctggcatactagaatgttctgccgcctactccttcctcttcctaaaattatatccaaatatacccaaaacaataatttggaagaattattgtctctcgatagatacactaattttttttttttttttgagatcaatctcagctcactgcaacctccacctcccaggttgaagcaattctcttaccccaacctcccaaataactgaaattacaggtgccaaccaccacacccagctaatttttttaatttttagtaggtatagggtttcaccatgttggccaggctggtattgaactcctgacttgaagtgatctgcccgcctcggcctcccaaagtgctgagattacaggcatgagccaccgcgcctggccagatagactaatattttatactctttagtgtgaattttgtatttgtctcatcttaaaactaaggaagcaggggttgggcgcaatgactcatgcctgtagtgccaggccgaggcatgaggatctcttgagccccaggagtttgacaccagcctgagcaacatagagagaccccatctctaaaaaatgttttaaaaatccactgaaggtggtggc

SEQ ID NO: 61259 - DNA, 1418 bp, Homo sapiens
aggttgaagacccaacatttcttaatcagttacaatctggagttaaccgctggatccgagaaattcaaaaagtaagagcacaggattgaaagttatgtaaaatatgttactctttaatatctttgggaaaactgatctggattttgtaagtgaggtaaattatgtgataacttgttagtggtgccgcctcttggtcctgggactgtccagtgcaggactagccttggtctgggtggaatggtcaggggacagtgtgagattgcttgagtagtcaccctgatagagcattaatctcagcagtcgtatacctttgatttcaaatcaagccacttttgatttacagggaaggaaatctacttgaaatataaaaattgagttgtaatgcatgtgttttgttaacgatatctattctaccttgtttaaatagtgaatacccttgggtgttattttattttcaaaggtgaccaaactggatcgagatcctgcatcaggaactgccttacaggaaattagtttttggctaaacttggaacgtgcgttataccgcatccaggagaaacgggagagcccggaagttctcctgactctggatatcttgaaacatggcaagcgcttccatgccaccgtcagttttgacactgacacaggtaacaactagaactaataatctgatcagtaagttattgatctggcttttacgagatcttacttgataatttaaatgaaaactatagttttcacagatgtactgtcgtttttaaccatttcctttcttacatcacatcttatctttccctcagttccaagtaatgaaaattattctcctacacacttagctttcccctttcccttcaggggatttaagaacatgaaacagtctctaggtatgagcacagattccttcttgtttccccactgctgggctccatgagtcatctccacgagtcggctgtacaattggcacaaagtcaggtatgcttttgacaggccaggcaagaaggtggtttaagtgaagcagttctatttgcccagagggttgtggaaaaagaactggtcagtaccactttctcttcctctttttacttgcccctttctcttctttgtcttcctccctattctgacaagtggccaaaatgaatttagttttctgagtggagaacagtgccagtgatgttgttttttgttttgttttgttttgtttttttctttttaaaatttttaaaatttattttttttaagagatgggatctcactttgtttcccaggctggaatgtggtggcataatcatagctcactgctgcctggagttcccaggctcaagccatcctctcacctcagccacccaagtagctgggactacagggatgtaccaccatgtccaactaatttttgaatttttgtagaaatggggacttgc

SEQ ID NO: 61260 - DNA, 348 bp, Homo sapiens
tctgtggctgtgaagaggaggaaaggtaacggccttgcctttcagttccgtacagatattgccaggacggaatacctttccaatgctgatgagcgtcttcgctggcaggccagctccttgcctgctgatgacctttgcacagaaaatgccatcatgctgaaacgattcaataggtatgagctcgggtgccaaggagaggcatgggaggaatgtgggtggtgatcttgaatttttttcaaaatacacccttgtttgaagagaggaatagaaaatggggcgtgggcatacagtgctggcagcttggtgctcctctgatggtggggcgtgtgctgttctcgttattgtcaa

SEQ ID NO: 61261 - DNA, 2528 bp, Homo sapiens
gtgagagttcgatcttgtttgttcggtataaggttaatatgcagctctttcccagagtctaatttactgggatctgtcaagctttcataccggattttgtccaatgcctgttaacaaaaaatattaatttaagcatacagcacccccaagaagttcacactgaaaccaaaatccgattctgggttaataagtgacttacatctgatgaatttgaaatgagctctctcagaaagatctctttgttcgagtagaaagtattgatgatcaatgacatcaactgggcaatttctgcctgaaaggcgaacgtctcaacctcctcctcctccatcggttggtcttgggtctgggtttcctcaggcatctggaacgacaccgcgccggtttaaaaccttgcaggacgtctacagaggcaacacgaaattccatcgcgttctccaaatatttttaaagccgaattggagatttgcgaagtttaagtaaaccgaaaatagaagggcggctgacaaaggatgacctcatttcggagcgcggcaactaccacgagcgtgtgcgcgcttccgggaggccgccgcaggcccgggcccagtcccccgccgcggtccccaacgaacaccccgggtgccctcccgcgcgggctgcggctccgccacggcggcctcctccgcctgcgcccccagcggggccgggcgggggacccccgcggcggggccgctctgttcgcgtgcggcgccagctctggcgctgctgcagagcctcggggagcccgcggccgcccggcccattcctgaagcggggtgcggaaaccgcagcggtcccgaggcctccggaatagaaagcgcggccgcccgggagcgcggccctggctgcttcagggatctggtccggcccccacagcctccgccccgcgccagccgcccccagtcccggtccccagtccacctccacaggcccccacaaccacccgtcaccttggctaagtgaccgcacaggaccaacggcacagccacaccgggacgctgaagcaactgacgcgccacccccgcgcctgccttatatagcgacgggcccgcccagcgcgcggcgctttttccagaagcctcccgaaccttccggaagaaccctccccagccgccgccgcggccgcgcgcctacgcatgcgccgttgccgcggcaccccgcccccgcgccttcctgcgggcgcgcgcaggccctgctcgtggcccggcccgggcaaccttccctcaatcgccgccgcgcgcctctcgcacgcccccgcgccggcctcaatgcgcctgcgcggcccggaattctcgggaaggtccgggcgccttctggggccgcccgcgccctccgccctgcacccccacctgccgcgggcgggcggagggcacgcccgggcgtgggggcctttgaagtgaggtgtagttggtcacccgggctgagcggaacgcggggccggggtgggaggcgcgcctggagggagggtcgtgcgtggacggagagcggcccgggtctcacgcgcccgggagacttccggagccgtcgtcctgactggcgccgcgcccgctgccaaagaatccagccgcaagcggcgccgggatcgcggggctctgccctctgggggctgttagcctcaggctgctgcgcactggggaggctgtcccgcggcctgcgcgctcggggattctccagacccaccgctggctcgggagcgctccctacttttgggttccccgaaagccatgtgcttcatacttaagggtcccttagcttgggaatcggggacttggtgaacaaattcatgcttacccagctacacccggcatgattttgaaaagcccatcgttttgccgaccgatttgcggtctccaaattaagtatctaacactttggtgattaacttgccctaaaaggtttttttttttttttttttcttttttttttttttggacaggctctcgctttgtcgcccaggctggggtgccgcggcggaatctcggctcactgcagcctcgaccctcccgggctcaggtgatcctcccgcctcagctttcccagtagctgggacgagcgtgggcagaggaccacaggcgcggacaccacacctgtctagtttttgtatttatttgtagagtcggggtttcaccatgttgcccaggctggaaaagccagtttctacatgggaattttcggatattttggccaaggccagctgtgggaaccttggaggcattggggttccttcgacctggcttccctgcctagtccatgtcctcttcctctttgtctctggcgcctcccatgattgggccgcctcctgcctagactcatagccaggccctcggaataatctgaaagctccttgccgtgtaaagaaacgatggaactacctccgcttcctggtctttagggaaacgcaacttgctcaggagcaggggttttcagactgcggcctgggacccccttaagagcgtgtgaaatcaacataaagcgtcttgcctggcattacaaagcgggggaagtggaag

SEQ ID NO: 61262 - DNA, 1975 bp, Homo sapiens
agattcagtccccggttcccaaagcgcttccccgccccgtgtttctgaacagctggagaggacaaacctccgctaagaagcggaggccgccagtgctcatcacacgcaggaattaggatatctggcttgagaacacctatgctgtaccacattcttctctccccctaccccgcctgaaataaaacatagtgaagcgtaaatcttgagtcccttggtaccttctcagaaacggcggcgaggaggcttcagaggggcttcctgggcggggatccagacggtcgcgcgggtattcagcactctgggcgggacagtccctgtcccgaagggagggcccaggaggggtggagccgtccccgcccgaacacgggggcatccgcgctccccgtagggtaccccgcgtgctggctccgaagcggtggccgtcggggtggcgctcttcctccgctctttggggtcccggcgcccctcagggcagggcgggagaccgctgaggaggcaccctcaagttcacctcaggctcatgacaccagccccgccgcggttccccctgaccggctttccgctggccctggcggctgcggaacggtcaactagaccccactagctgaagccggcatcacctgggaagcagccatgccgcccggaggccacacccgggggaggagcctgcggacgcccagtcgggtggagcacgccaggtgagcacgcctgcgcagtcgggccgtaaacaagcccaccccttccctttggcccgccctcgcagggctggcccgcgggtgggaggggcgagaaggaagaggcagggggtgggggaagagggagcaccaggaacagcgcctgcgcggtgggcgtgatccgggcacttagggcaggatgaacgctgctttccaagatggcgacggagggaggagggaaggagatgaacgagattaagacccaattcaccacccgggaaggtctgtacaagctgctgccgcactcggagtacagccggcccaaccgggtgcccttcaactcgcagggatccaaccctgtccgcgtctccttcgtaaacctcaacgaccagtctggcaacggcgaccgcctctgcttcaatgtgggccgggagctgtacttctatatctacaagggggtccgcaaggtaccgacccgggcgtcaccggagccagccagcggcgtaggcagaggccgggagcagggcggtgacagtggggccagggtgaccgagaggggtggccgtcgctcttacttttgagtgggccggtaactccactggggtactcctgaggagaggggattcaggagtaaggagggtggtggcggtggcgtttcgaaggggtgggggcagtggaaagggaccgtggggcgcgggggttctggctgggaggctcccgggggagccggctgcgtcccctccagcctggtccatcaggctctgacatggccagggagcgggcctgcgagtccccggaagaggtgaggtggccgtcttgtctgcttcgattgcctcgcctccctggagggttggaagtctcgccctgggttagagaacagggacgcaagacggcttaacaagatctctgtaaggcggaaccggggccgggaagcggagcattgagactaggtcagaaagaacctgctcggcacgcagggctactccacctgctgccgcactgacacttcctaggagcctctcctggtgttaacatttctatttccaaaaacatccgcgggaggacggctgtcactgtctccgccgtggggaccttctgaaagattgttaaggagagtcatcttgtcccttgtagtatgcgaagggctgagtactacagttgaaatgatgtttccagtgaactaagctggttcagaggggttgtgtgagagtgcccagattaatcttgtccaacaagtcagactgtgtcccaaacagggagtgatatgctttaaaagctgctttaaagggaccatccttctt

SEQ ID NO: 61263 - DNA, 951 bp, Homo sapiens
ctgtctcaaaaaaaaaagtgttgactagacagaaggtgatattgctgttggggaggatggggctgaaccctggagggcaggggtgctaggtactttttcctacattgacttgatagaaattaggaggccacaggccaggtgtggtggctcacgcctgtaatcccagcactttgggaggctgaggcgggcagatcacttgaggtcaggagttcgagaccagcatggccaacatggtaaaaccctgtctctactgaaaatacaaaaattagccgggcatgttggtgcatgcctgtaatcccagctgctgaggaggctgaggcacaagaattgcttgaacctggaaagtggaggttacagtgagctgaagtcatgccagtgcactgtagccttggcaacagagcgagactctatctcaaaaaaaaaaaaaaagaaaaaaattaggagacattttgattagagataagatgtggctggaattaatgaataatggtagctacccaaatacttctgtgtgctctgtgctttctgttatctgcagccttcaccattgccttgcaggggaggggtgggcctttgatctcctattagtgagaggaaacttgcactttgcccaaggccacttggctaccaagagggaaggcaggatttgaacttaggcttgcctggtctgggctctttctctcgctaccagactgcccctgcctgggaagccatctgccaggggctgatgaccccatggggaagaggaatagctggcttgggtggttactcctgctcctaaaaaggtatgtgagctcagagtgcatgttggcagacaccccatcccccgccccccagaagaggaggaaataggatggtcacttatcagtggaaattgagttagaactcagtgattaatggaaagaggacaggcgagtgggagacggttgtgcttggacatgaaggcaggca

SEQ ID NO: 61264 - DNA, 530 bp, Homo sapiens
atataccagaaaagatacaaaacgactcagttctgttgaggcctcaggcaagtaactaacttccttatccctaactaagtccttgagtgactcaaaaggcaaacaatgctcaggagtgaaagtgccctccctgccacagtactaatccattatgtgtatttttttacctttctttaacttcatattaactaagattactgcaaaagccatccgtttctatttgaattaaagcataggaaaggagcagaagtaatactggagggggtaggggtcagaggctccaaataccaacctcatgctgcccaagtgactcagtatgactttctgctactaatgcttcacattcctcacaccacccacacaactgtgcaaggtgactctggggattcacttacacaatgataagcaagcagaaacggatttttgcgtgtgtgcggttacctaacggacatggtttcctggtggtgaggtacatcctggatctgctttctgccaaatccctcgcataccaaaagtgcctggtccagcgg

SEQ ID NO: 61265 - DNA, 1076 bp, Homo sapiens
actactattaaaaagtggttcctataaaacactactgcttgacccaaaaaataaaataaagcacacagcccagctttcctctcaattggtcactaaaccagtatcatgaaaaggcagggagccacgctgtaagcgctcccccgttttctgccgaatgttcaggaaaagagtgtcaggttcaagccagcatttaaaataaaataaaatgaatcacagtcaactccctaaactccaatgtaagaaccacgcacctgcaccaaaatatgcctgagcgggaactcgagtcggctctccgagaccccaaagttcccaacctagccccaacccctcaagcttcccccaggggcaccggcttctcacagccgagggggattcggggcccacatgcggagcctcccgggcctgtcgagccacggcagaaggcgacgacgcccggccccacaggcccctcaagctcctcaagctcccccagtccctccctcccccgccactcgctctccagtccctgcccctttccccggccccactcactcttcatcttggatgcggaagccggtgacaaccccttgccgacactggacggaaaagaaagaagcaggaaggttgtccccctgctttccacttccctgaggcggggtcccgcactaggatctccgtggtggtccctcgaaggagagcgttagagatcccgccgccatgttgtgtccctgtcaccctagcaaccgtcaggccctgaacgccatgagctgtcgcctgcgcatgcgcaagatgccccgcccatgtacgcgtgcgcagtgcagcccgtcccctcagcccggttgctaagcagcctttcctccgcttccatgtaaatactgtgcaaatccccgcctttgacacaggcgaccttcgctcggctcgctctccctgctggcctgggaacttagcgatttggaacccactacgtggacgatagccttgagctttaattgggcttgggagcttctacaggaatttttttttttttttgagacagagtgtcgctctgttacccaggttggggtgcaatggcgtgatctcggctcactgcaacctcc

SEQ ID NO: 61266 - DNA, 899 bp, Homo sapiens
ccaggagacagcctggggcggtctccgtgggagcctccgaaggaagcgaccttcccgacaccctgactttggacgtctgcctactagaactgtgaggccatatattctgttgtgtggccacctaccttataatactctgctgtggccgacctgggaaactaacacagcgggtcgttactgtcagaccaaaggttccaacttataaacagaatgaaacatttcgtaagttgagtttaaagaaaatggattatttaaaatgcacatgggccccccgccccacattaaaaaaacaaaaaacaaatacaaggcggaggttgcagtgagccgaaatcgcgccactgcgctccagtctgggcgacaagagcgagactccgtctcaaaaacaaaaacaaaagcaagaaaacaagcccgaatggtattctctaccacttaattctgaaagtatgtagattcgtgttttcgtcactcagagaatgaaaattagcgtttgtttgtctaagagctctaagacggggtgagaagtggaggaagaggtccagaggaggaaagaaaactgctcgcccgcgcccgccctgcagctgcacgtgggtcgccctaagcctgggttcggagctgatggcgcaggtcccaggtgccctctagcggctgacgtcagtcacggcgccccggccccggcgcgccccgtccactctgcccactcgggacgcgtggcttgaagtcccgggaatgccacggttgcacccacaagggtcgatcaactcggcttccttcaggagacctggactgaccacccgctgtgtgccaagcactgtttaggtgctggtaaaatagagcccactgctcctggagttcgctctagcggtgggaggccgacgattagcagcgggaataagcgatgg

SEQ ID NO: 61267 - DNA, 1489 bp, Homo sapiens
ctcaaaaaaaagactgcttcatacaaggctttggattccgtgtgtgtgtgtgtgtgtgtgtgtgtgtataaatacacgtgtactgtaggaaaaaaaaccagcaggaaggaagccaagaccccagcggcccttgtttattgggcgatagggaattcggtggttcttttgtccggttttctgtattttccaagcttgatttaaccatgctaaaggcctctgttacacgaagtttccacgctgcaggattctcggagataaaaacaacactgagttggcatgtttgaaaaccttctcactgcggagctaagcctcccatgtgcaatttgcatttttcctgtgaaaaaaagccgccttcgctgtagggagtcgcctcccttctccttgaagtcccctaagtcttagtttctgcatcgggccaatggggatgactgtgaagaggtcggaagtcgcggctgtggcgaagcggaatgcagccagcggcgccggcccggcagggagtcgctagggggcgggcgcgggcttggagccctcttaggcgctcccgtgggggcccaacgtcaggcggccggttagctcagttggttagagcgtggtgctaataacgccaaggtcgcgggttcgatccccgtacgggccaggctaactttttttttttttttttggtccccgcaatgttcctttctgatactgtaaccggcgtgcaggcaggagagaactgcggaatcttttggactggcccagaggttatccaaggctacctgctggggagagcgggaggaactcagagcgcgctggggcggtggctcctcaccccgagtccccgcgccgccacctgaagggtctgttttagaatgccattggttaggccttttacttttgtcgttttaaaggacactctggacatccaaccgatgcacatcccacgcccccaccccccacgtttcctgaggctgcgtctggcctggaggaaccgcccagtgaagacaggtgctcgcagatatcaccgcctagtgttccctgggcccacttgcggggaagtcttggaggtgaaaatccaggtctggaatgaatgcattccacagatgcatatggagagctactgcatgcccagcaccattcctaggctgggagcaaaacggtgagacacaaaccccaacccgctggagacagtgaccagccactagatgactgccatgtttttagtgaggcattcaggttgtggaagcctctggaaaccttctcttgctttttgtcccccctcttttcttttcggagacatcttaggcttcacatttcttcctcttggttctacattttgaagccagagcaagtggatgaatttctcactcggttcgtttctagggtggtcaggtgtgctcagctgaacaaaagccggttgtataaggttgatgccattttatgtcaggatccggcaagggctccacctgtttttgaaaattctacagtggaaacagctactagttctgac

SEQ ID NO: 61268 - DNA, 1942 bp, Homo sapiens
acacctgcagctacaagattcggagggcgcacagagcctcaaccgtaagaaggagaggcgatcaggctgaggaagatggggcagtggagctggatggatagagagagggtgggttcattcattcgttcactcattcgtttattcatattcatccatccatcattcatgccctgagcgtgcgttgtgttctgggcagggcctgtgctgggcaccgattgtgtaatatatcatctctcccttcaaggtgcacccaatctgggtgggtgggtagagagaagctacggtgacaaggcaaaaatttgggaaacactctcgttaacaattcaaactgtggtcccctcccagatgtataaatccaaatgtttaggggtgggcacagtactctgcatctccagacagcatcctccgctgattcggatgcatgatgacgtcagaacacttggatattgtggtaacttttgggccaggggctctgaaaccccgaagacctccccctgggagatccgggacagctcccagagaaggtgagtcttaaacacatccgtgacaggcaataaggaaaataaggggggtccgctctgctgatcagccctaagagccgcggcggttgtcggctggggcggggcactccacgactttcccggccagacacggtcgccttcctaggtgtcttggcctgcgaggcactcgtagcccgcccctctcctaggtgacgtacattggagacgccgtcgctcagcgacccgggttcgagtccccgcctcggccgccatggcggatgcggagccggaggctgggggcggcagcgaggatggcggcggcggcggcggcccggctcctccgggccagagcggcagcgtcgcacgtgtggccccgctgggccccgagcagctgcggcaggtcctggagcaggtgacgaaggcgcagccgccgccgccgccgccccccttcgtgctgcgggacgcggcgcggcggctgcgggacgcggcccaacaggccgccctgcagcggggccggggcaccgagcccccgcgcctgccgcgcctgctcccgccccaggtgaggcgtcgggagggacgtggggaaactgaggcccgaagggggccgacgccccgcggcggggtagctgcttgtccggggaggccagtatccgcccgggttaagactcagggcgtccccaggctgagcttcttagggacggcgttcggcccccacctgtcaccaccctggcattttcaccccaggagcctcactctaggagcggttgctcacgctgggccctgtgcctggaacgccctcgtgccttctctgccttcacagccctgctgggggcttttgcgtgctccctagctcttcttacaggcctttcaccgctggttcagcctttgtggagcacttagagaccgtgttcccagcactccccactatgtgcaggaggtgaagccttgaacacacttgctgaagaacgaacataaggcaggttctgggattgacgggggctgctttagagtgggtggtcccgtaggccagacactggagctgaaacataaatgaattaaaaggaaccaacttagcttttcagttgtaaggtgccaaggcccaggcttggaacaaagtcaagcacaatacactagttcgctgcaggacttaacatcctgggtgatagtgactgatttgtaaccgcagtacccagcacagtgcctgatacacaatgtttggaatatgtgaaagcactctgtatactacaaaacatcctttcccagtgggtttatttcctgggccacacaccttttggttgctaggggggtgataactagaagacggtcgcccaactccggagggtgaagcatagcgcctgaagccagagggcctacacggcatctgtaaaattccaccccatttcagcgctggggttgtaaacaaaattagtctcaccccaaaa

SEQ ID NO: 61269 - DNA, 2121 bp, Homo sapiens
atattccctgctaaactggaaattcgactagggtaggaactatgtctcgttctctttcaaaccttccacacataggaggctttgcataaaatgaggtaaatggaggaatagctcttaccacctgttctataattgtctaagggttttccccccaacaggagattctgagggcaggatcacatctgattcatggtcagcctgactcatacggggcacatatttaggaaccaaaaacataactgacttcaagaaactcaagggctggtaaagacagaccagtcatcagcgtcacaggacagggtagggtgagggcacagtggctaagttacttatcccctctgagcctcgattccccatctgcaaaatggggttgacattacttcatgggaccactgtgaggttcaaatgagatgatccacttaaagtgcttggagcagtactcagcaaactgagcactaggcgaaagccagctttcattacaagcagaatgttctgactgagggcagttcagagaggagtttctggacgagatgagcatgcaaggcttggtacccagtgaactctgttagtactaatttatagtgacaataattacaatttggatgtcggatctgctgacactcatttgcgtatatcgtcccgttcatctgtcactgcacatgtgaaaaaacggaggctcggcaaaactgtctcccgagcagctcgcagaggctgcgaggggcctgcgggctaggctggggtaagacagaggacctccatttaacctcatgtaatccggggagctcctgagcttctggtccaacctgcggcctaagcagtaacattcacagccaccccaccccgggaaaggaaccgatctcacgcaccttccataaggtccacagatatccgtagaaggagacgcgaagccccgcccaccccaccggaaacgcatttgcgtcacgtccgccccgcccgctgccacttgtggctctgccgctctagcccccggcggagccagctgctgctcttcggtgctggccccggtgccggccccgttgcccagggaacaggctcccggcagcccccgcggcccggagtccatcccgcctcctccggcccggcggggccgacgagtccggaggggctgccgcgggaggtgagtccggcgacgccgcaagcggccccgacgcccccgacgcccccgacgcctggccccgagcccctcctcggcctcccccgggccactcttcccttgcctcagccccgcagggtctccatgcccgtccgccccgtctccctcgcccgcggtctcgcccgcgcggagtggcggacactaaatgccacaacacacggagcgcctggctcgccgcccgcagaatccggcggtccgcagcggggaacaggggccgcccgcccctcctcaggcctccgctgcgcgtcccgcgccctcggcccccggccccaccctgcatcccggctgccggtctggccgcgggctctgctccttcgccttaagattgacgtcgtgttctgtcccccactcgcagcccgcgtcccttacatccgcccaccggcgcctggccccaggccttgacactcatccagttggtgttcagtgttcgatgagtggataagtgaatgactcctttcccaatcctatttgaaggcatgggaggcagaataggtagtaagtgttaaaggatggggtgtcctggagtcagagccgggcaggtcccagcggccccttcctagctctgtgctggggcaagtgccctacctcactccgctccagtttcatcaccagtggaatggagatgagaatagtttctacctctggcttggtaagaggattaaatgggtcagtgcatgtaaagttaagcacggtgcctgccgctgtacatttcagtaaaggggagcccctgctgtcatctgtgctagcctgcgttctcgccctctagtcccttctgatatgtctctgacttctcatgactttagtttctccttctctacctccatttctcttccctgcacttttttcttcctctcttattgggattcaggaattttattctgttctgtgacttatgttccatgtgttggcagaatgtgggataccagcctgggtgcatccttttctca

SEQ ID NO: 61270 - DNA, 603 bp, Homo sapiens
tgagccagcgtcgcttgtatgcatgatactgcaagacttccttcccagctggcctgcacgcaggtgccttggagaggcattgggcagatggcatgtggccatttccagcagtggggcgcagtgctcagggagactgcagcatcctggagccctgccagccaggagggactgttcccattgcgggcagaatctgttacttgcaatcagaagaacttcaactaatacttgttttttgcctgtagattcaattgaccttgggaatgttgcttaaactcgcctttcactttcattttcctatcagtaaagtgaagggtcatatccacattagagccatcagaggagcttattaaaaatgtccaggcctcggccctccctggagatatgaattcagcaggtctggggtgaggcccaggcatcttggttggtttttttttttttttttttattgatttatttgagacggagtcttgctctgtcgcccaggctggagtgcagtggcatgatctcggctcactgcaagctccacctcccgggttcacgccattctcctgcctcagcctcccgagtagctgggactacaggcgcccaccaccacacctggct

SEQ ID NO: 61271 - DNA, 1439 bp, Homo sapiens
tcagaggcatgatccagactcagacctacctggttcctgcaccgcgatcacctagttccggggatgtgggtatatcacagtccctggccgagcctcagctttatctgtaagaaaggggaggggtggacgacggctgtgcgggcggggtgagcctggggcgtggcaccagccctctatccaaacatgtttgcttacacgttagctcctgggaggagataggagggtgaaaacaacctggagaccggtgtgcaccgcactgcacagtctgccatcctcttcaggtcccatacctctcttgatctccccgactactagatgaagcgggtactgccatcccactttccagcagggcacaagcttctccaattctccaaggtcagcaagccacggcagagccaggcctagaactcaggtcccctgcgtctcagtttgggctcattccagaattggtggggacccccaacccacaggcaatcgagcttaggccctgaccctgccctctgagtccccagccccgacctgagcctaggcgtctgacctctggctccgtcccaacctccctactgccttctttcaagggtaagcccttggtcacaaggggcctgggacagaaggcaggccgcgtccacacacactgactgggtcactatcactggcagtaactgagttaaagagagcggcgcggtgcgggtaggctgtggcccgtgggcaacaccgtgactggagccccttccccaagcctgggcctccgggccccagatatgccctgtgccggcacgcgtggggcgccgggcgggttacgtaaagttcggcctccccacgtcaccgggcagagtcacggccgcggctcgtgaataagggggttgggccatcgaaggcagcgccgcgcccggggccacccgccacctcctacccgtcccctcccggcctgcacggccagacgtcgggcggcggagggtcgcggggccgagcggggcgtccgcgcgcaggtggccggcgcagcgagggctgcacctgcgtgcgcgtgtgccggaggaggagggggcggcggccgcgggcgcggcgcgggggacggggactcaccatggggggcgcgggggccacaggccgggcgtccccgcccctgccgcggaccggagcgcgcgctgtcccccgcgggcgagcgggcaaaggtcccacgacggacgcacgggagggagccaccgccgcccgcgcccgccgcagccgcgctctgagccgccgcggccggatcgcagggcggcggtgccgtcgccggcggcgggcggcgggcggcgggcggcgggcggcgcagtgcggccccggccaggcaggacagcgggaccgtccgccgccgccattggcccgcgccgccggcccccgccaccacccattggccgccgcgctgcaccattgttacgtcactggccggcgggcggggc

SEQ ID NO: 61272 - DNA, 1388 bp, Homo sapiens
agccttatatttcatgtctatttcattattaaagctttgaagagaatacaagtgcataccaagtactagggagatagagtcactgctgcatctttaataaggaaaacctggaaactacctaggtgaccatcagaaggggtatggctgacatggtcatggcgaagcctgctgtgactttgctgcagcttgaagagcagtgagtcagaaggggcaacggagaccggagggcctggcccggcccaggtcgcacagtgcagggcagtcccaagggtgacagcggccagtgcgcgggcgcgccctctacccacatgccccgacccgccgggtccctgcgtccgcaagatcactttccgggcccgaggcggggaaggggccgggacatgggttggggactgagcgccgctgaactgcgccatggtcggagagagtttgcaggggcggaggtgttccctggtcggaccctgccgaccgccctcggggagaggcgaggccctggcccgtgacggctgggtccgggcctcagtatccccatccgctcaggggaaagcgggcggcagcccggagcccgaccccagcgcccagcgcggcccgacaccgccccctggcggccgcggacgtcactgcgacccgcagcctccgccgaagccgggcgagggacccccgacccgggcgcaccaggctgcgggtgcgggggcggggacgcccagcgccctggccccgggggcggggttcgcgggctgagtgcccactccgctctcccctcgccccgcggcctcggcgggccccccgcccaccagggtctccacctccccccgggtgaaatggccacagtcccgccatccgcgccgccgccactgcgcctgcccccggctgggccgatcggaggtcccggcggggcgggcgaggcaggtggtccggcgggccccttccgggttcccctcccccagccggagtccgcggaccgcgctgggcgcagggagggggctgtgcgcgcctccgcttcccggccttcccagcggggacgagcgccgacccccgcccagtcgggagacgccctcaaggtcccaggctctgcttctgcccgcccgcggcccgcggactgcgggtgacagggtccccggtccgagccccatctccctaggagagcggaccccagcgctcctgtaccctccacctggtggccgtccacgcagcccggcctgctcgcgcgtcccaactgccacttcccttgccttccccagccgcacgtctaccaggctcctgtgtgtctgcctggctgggacttccgcatactccaggcccactttacaggtgcagatgctgaggccagagcgcctcaggagctggatgcaggggagagcgtgcgggcagtgtggggagagactcgg

SEQ ID NO: 61273 - DNA, 1597 bp, Homo sapiens
tccctgagtgatgaaaggggggctgggagaaggcagaggctgcccgggagagaagagcagctttggggggttctgggtccccgcaccccaccccgcactaaccaactcccccagccccagatagaaggggagctgggcaggttctggggggtcagccccaggcaggaccgctccccaacacccttcccttggttaccctcaggtatggagtccagagtggagtcagccatgctcagaccttgaccccctttttttaaatttaatttttagtagagatagggggtctcactatgttgcccaggctagcctcaaactcccaatctcaagcgatcctccccccttggcttccaaagtgctgagattacggatctgagcctccacgcctgccctgagcctcgccctgcggctgcctgggctcctccccgcctccgccccggaccaccagggggcgctgtgaagcctgagactggccgggcttcaccttggacccgccaggagtccctgcaggagttgggagccccgccagccacagctacttccccgaccctcccggcttcccaccgctgattggaccaggcatgggcatctgactgaggggagcctatccataggctggccagtgatctatcagggctggcctagtgagaacacggccaatcagatgctttcctggaacccggggccaaagctgccccaggggagtgtggtagccgcaggcagaagggctagcccggagacaggagggggaggtccgaggaggggatcccggcgagggagacgcggggcgagtggcctgggctcctccttggcttgacccagcttagactttctcaaaccgaagtcattctcgctggctcctggcgactctcatcctgtccgctgtcaccctttcgtgattgacctgaaatcacttcgtcactgcagccgcaccctaagcattcatctcatatctgtgatgtttgctgtgctccttatgtttgctctaatatgggttaaaccaaattcaacaccatcaaaataatgttcttccatttgcacacccactttcacagtagcagcgttcccaacagccaaaaggtgggagcagcccacgggtccacggacgggtgaaggggtgagcaaacagtctatacggacagtggagagctctttaaccgcagaaagaaggaaattctgcatatgctgcaacatggatgaaaggtgaaccctgacattatgcggagtgcaataagctagtcacaaaaagacaaatactgtaggattccacttacattctgtgtccagagtagtcaaattcagagagacaggaagtagaatagtggttgccaggggctgggaggagccgtgaatggggaggtattgtttaatgggtatggagtttcggcttagattgaactgtacgctttttttttccttccttccttccttccttccttccttccttccttccttccttccttcctccctccctgcctcctttcttctttccttccttctttcttttccttccttccttcctctttttctctttccctctttccctcctttttctctttctctttccttcctttctttctttttctttctttcttccttt

SEQ ID NO: 61274 - DNA, 1385 bp, Homo sapiens
attgcactccagcctgggggacaagagcgaaactctgtctcacaaaaaaaaaaaaaaaaaaaaaaaaaggaagaaaggaaggaaggaaagagagagaaagaaactacagggactcttgttaaaaaattattaagaatttcaagatggcaacagcagcatattaaaaccaagtgtggtctcttctaggctcaggaccctatgggattgcacaggtcgcagcccaagcgcagtacttgcgcacaggtcccagccccttccctctctgggacttgtcttctggcccctcactcctgcgatgagcttttctttcagctggtgaaaggccgcagacttcgaacctctgggcctttgtccaggacgttccctcagcgctcagtgcccttcctggtggcctcctacatcttcagatcccggctgagctctgcttaaatccgggaccgggtagtcactggggcagccacttggctggggcgaggccacctcgctttgggtcttgtcgcgcccaggccagcgccagcccaggcttgccatggactggctcctgggcgttagatgaatgaatcgactcaacccgggccgccacgttgtgttcagaacaccgacagtcgctcccaggcaaccagcacctgctgcgccccgtttccagcgacctccccaaccgcgtggactcgcatccacgtgcccggcggggccgcagcagaaaggctcggaccccccaggacgatcggccggtgggggccggtggggccgcagactcggggggcggggggcgccaggcttccgggtcctgcccccgccccgtggggaacagcaggacggcgccgaggccgtttcgctttcctccgcgcccatttgccgggaggggaccccgtgctccgacctgaaggtgacggcagagcctgcgggaggcctaggccggtcccgccctacgggtcccgggggcgaccctcgcgctgacattggcgtccaggccgcggcccctgcctccgcgcccacccacgccgggcctggccctcgctcccccgggaaaagccccgccggcggccgcgagagcgcggaagcgcagccgtagtgaccgcgagacaaagacccggcggcgggggaggcggcggagagaccccgccagcgcggagaccccagggaagcttctctggaagacctggtgctggtccgctctcccgggacctcattttccttatgtggacaacgggggcggggtcacagcagcccctcgggcttatagccgggttgttctttccttaaatctcctccctctgccaaaataaaaaaccccacagggcaaggcgcggtggctcacgcctgtaatcccagcactttgggaggccgaggcaggtggatcacctgaggtcaggagttcgagacca

SEQ ID NO: 61275 - DNA, 2866 bp, Homo sapiens
aggcagaagtgaacgtggtctcttcaataaagttaataatggttcatgctgcagaaaatgttcaagacaaaaccctgcttatttactcaggctttaaaaccataaaactcccaaattctccctgtagctatttatatccagagctagtccccaaattaagctcaggtttgaagtaacttaaaagaaaaatagccttccctgctttaaaaagattttccgtatagacctccactggtctaattacgaagggcgcgtagtttcagggttggctgggggtagggcaccgggacctccaaggcagttacactcctcagcctcctaacagctgtacggctgcccggtggtccctctccaaggcagcggctctcaggctagcctcagcctaccccacccgcccgcaccccgtgttctccctcgtgggggtgccggggggagtagggaggcggggcgggcggcaggtccggaaaagtggctgccctcgccccgaaagaagttgaccctcctcccgtgccgagagcttgggatgaaaatagcttcttcctctttacccttcctggacccccgccccaggacgactgggccccttcattcatctttcagcggccacccaggcggcttgggcgtccccacgccgggactctgtgccccggggacccacggggaccctcccttgggcctctgaagccgcggcgcaccccgcacccaagccaccccgggggccccggcctcccccacccaattagcgggcagcaccgcagacccgagtccccacgcagctcgcgccaggggaggcggccgcctgggaagcccgtcccccgcgccgcggcccccgcccccgccagccccgcgtcccctgggaaaggcgggggcgcagcgagtttcccccaattagtttcctctttgtatggagtcttagcgcgcccgtactcctccgcgcagcggaaagtagtcccggccgggcgctccgcggcttcccagcgccagacacattttactttgagaagtcgacgggactctcagcggggtccttcagatggggggccagaggctgcgggaggcgtgcgcgggcagcaagggcaggggccgcggccaagggtagggggcggggagggccgcgaactcctcgccgctgcctggagagatggatcatggggcgtagggagatggcaaacctcaaaccacgtacggcgggcgatacgcgtcaaccgaacctcgccaacggaagcccggagccgcccctccccgctcccccgccccgccgccccggacggacgggcgcgcggagccaaccccgctgccgctggctgtccaaatcccaccagagccaatgggagcgcgagggggggcggagccatctcgcgtcagttgggctgcgcgcccccctcccccggcgcccctgcaggccccgcccctgcctcctcccctctccgctcgctgctcccggagtagttggtgccagtgaagtgagggcggcgatgagagcgaaagttgcgctcggctcgtcgctgggggcttgaagcggctccgcgctctgcccgtttgggcctcccccgactcggactcgcgcccgtgggctcccgccgcgcccgcccggccccgcgccggccccgcgccccctcccccgtctcggcgccccctcctcaggagccgcgggtccccgccactttcgcacggccccggcccccgccgatgccggccatggtggagaagggccccgaggtctcagggaagcggagagggaggaacaacgcggccgcctccgcctccgccgccgccgcctccgccgccgcctcggccgcctgcgcctcgccagccgccactgccgcctcgggcgccgccgcctcctcagcctcggccgccgccgcctcagccgccgccgcccccaataatggccagaataaaagtttggcggcggcggcgcccaatggcaacagcagcagcaactcctgggaggaaggcagctcgggctcgtccagcgacgaggagcacggtaggtggcagccgcccccgcggccccgggccccgcgccccgcgccgcgctgaccgccgtattctgcttcccccgcaggtggcggtggcatgagggtcggaccccagtaccaggcggtggtgcccgacttcgaccccggtgagtagcggccccggccggccggcggcggggatgagcgggagccccgggtccccggcgagcccgagggggcgggagcccgccgacaactttctttttgtgcgttcgccctgccgtccgtggggagaacagcagggcgaggacgaggaggcgcacacgcacacgagtgttctgcaaacgtgcctctgcacccgggggaggccaggtcgcccccagcagggccggcgccgctgcccccttgcgcctccgaggactgcgggtggcgtcggaggtggccacacctggcctgggggcgctgggggtccctgcgtccaggtgagctgcgcctcggccaggggtaagggtggcagtgccggagagttagtgtcctgcgagcgccccggacttaggaggtccccagagacccctttctcggaacccttcccaaaggctgctccccacgcctttgctcctcctctcagcctctgggctcttgctggctcctgactgccctcccatccagaaggcgagtagaagaacgaccccccaaaaccagtcaataaaagaagtgtgttttccagagggcgcctgcctggggaagagagtctcgcgtgtggcagttggattttaggacctatttgtaaatgtgtgtatttccttttttttggaggaagagattgtgaaattgagaagcatcagaagctttagcctaacaaatgcttttcacctacaagaaagccctacaccctagaatggaac

SEQ ID NO: 61276 - DNA, 515 bp, Homo sapiens
agagccgctgtgaatgactgcataggttgaacacaacaacacagtgaccctaatccttccgataccttggcttcttagttccttgacctctattcctgggatcctgttctctgccctacctcagccacccattcctttgagttactgttacctgaaattcatacccttttatctctgtttcagacttagcactctacatcctcctgatctttccagctgatgcccttccagcatccctgtgatctttgactccatcatgacgtcagttcattgattataccaccttttcccttgatgtttcttacgcttttgttcagcttaaattccagtcattagaacacaacctctcctcctattcctttgtcttcttgtttcattagttcttttggctatgccacaacctgtgttttactctcattccccggaaaatagagcatacaacaaagcttttactgggctaatactttacttgaagttagaatgaaggggaaaatagaaagtgagacaggaaagga

SEQ ID NO: 61277 - DNA, 1133 bp, Homo sapiens
agaaaaaaaatatagaattggtatcttggccacacctctttccctgtggttgagttttttttttttttttttttcctgttcttttcctttttttttgagacaagatctcttcgtcacctaggctggagtgcagtgacatgatcaaggcttgctgcagtgtcagtctcctgggcttaaaggatcctcctgtctcagtctcccaagtagctgggactggaggtaggtgacactagcctggctcactttaaaaacattttttgtagagataaggtcttgccatgttgcccagggtggtctcaaactcctggcctcaagccatcctccctcctcagcctcccaaagtgctggggtctctggcattcaccaccgcggacaacctttttttttttttttttttttttttaagctaaattttgttgaatatttggataggcaatacaggcatatggtacaaaattaaaagatgcaaaagggttatgcacaagagaagtacatttcttaggcattcctggccttccattttcccttcctggaggcagttttctgatttattttctacaaggattctgtttaaatactggagaatatctgacctgttgtactttactttagaatggcaggaagctgaatgactcatgggcatttttccctttgtgaagctcattgacattccttcctctcaataccttaactatggcatgttttataatttgcttttgtttttgctttatcacagtattttcctatgttttttatagtcttaatttttaagcactgctttaggtatctattaatagttcagaaagttgcgaagattacaagctcatatttgtgaaagtgtctggcacataataggtgatcaataaatatttccttctagcttgtctgtcccctatctcccactggttgtatgtatgaaacaaaaaaatgaaggagaaggctgagcatagtggctcatacctgtaatcctagcactttgggaggctgaggcgagcgaattgcctgaggtcaggagttaaagaccagcctggccaacatggtgaaaccccgtctctactaaaaatacaaaaattagccgggtgtggtcacaggcgtctgtaatcccagctactcaggaggctgaggcaagagaa

SEQ ID NO: 61278 - DNA, 1966 bp, Homo sapiens
gtcacttttcctattgtattgcttattggagtctttggagtcagaatttaattttaatgttatcttatttttcatagacctagaagaaaagggcagaatatgtaaagttaattgatttttaaacagtggtgttgcctataaaataaatttacagttttattgtaagccctgattacaatcgttttaagtttaaagttggttaaaactttaaactttaaaaaaactaacctgtccactgaggctcccagtggacagcgagctcggcttgtggctgagacacacttgagccaggccagaggcataggaggaccaaatttgacagatatcaatacacgattcttactgaggcctttgaaacggacccttgtcctggaattactgtcagaaaagaaccggccagaaaaacagactcccgagccacgagtccaggtttggtttcagaattggagaggtggagcacggaaaagaagccagagcagcgccagcgtggaggccacctgggcgcaggtccccccgatcccagaccctggtcagcctggggtgctgacccctactgttccaccagcggggcttccccgggggtcccaagcaatgtgggcaacttctcttgggaatcggaggatgctttgggccaagctctcctctgggggcgcgctgatgttccgtgcgcgaatgtggcccccgctgacctggagatggcagccagtgcgctcggccacgcttagggagatgtcccttgatctccgccctcgggcccagtgctgcttccgggtccctcttgccaccagcccttcccacagctggaagctggcagtgctgggcctcaagttcatcccggggcacccggcctgctccccatacaccagtccctagctctgcgggggctggggctgcaccctcctgctgtggagcagcagccgaggtggggctggcagctgggggaggcgcctgggtgcgccgtgacctgggagcagccctctccgccccagcccccgcagctctgaccgtatcccgcctctctgcctctttcctggccatagtcacagccacagccatcgcaggacccggctgagcgctaggaacaggttccttgtcttcctccagaatccaactcgcacgggaggccccagcacccctgcccccaacccgctgcggagtctgaacctcaagcggctgcatagcaaacccgtggaaatgacctgtcagtgtcaggcagtggaagacagatgaactaagcaagggctcatcggtagtgttcacgttatgaaaattgaagagaaatatcaagatttatttactttgtcacggaagggcttccagacatacctttcagggaaatcgagttgttagggtggaagggccttggggtgcatgagacctaggggttttccttagatggcataaaaaaggattgactttatagaatacatctgtctttccatttattaaccgagtaaacacggagcactgagagtgaacaaagtccactagcgagaaggcaggatgaggacggctttgtagaaatgcattattttctatcaggaaagagcaatgatttctactctgggaaaaaaacaaaacaaacacttacctaaaagtaatatttacatattgttgaaagttcatagataaaagtataaagaataaaaaaaattcacctattattccatcacccagaggtgataatcgttaaacattttggggtatttcttccaattttttttgtatgtatttatataagtgagatgatagattatctgtgtgtgtgtatgtgtgtattgtcttcctgagcatcggacctaagcagtttccacgttgttaaaactgcttataaaggttttaaataactaggtgtaatactttattacatggatatgtcagtatgtttaacaattactctattgaaaatttaggtgtctcagttttggaagaatatggaagtcttggttgtccagcatttattctg

SEQ ID NO: 61279 - DNA, 663 bp, Homo sapiens
tcttgaagaatgaggatttcacattctgtctttaagtgatattatgaggaagcccataactcattcacctatgctctccataatggtaaaacgcagtggatggattcttgtgcttctgactgacagattggaatgtcggccaggttgcacaggcaggcctgctttgcgcaccctgtacactggggaagggtgatgggtgcaaatgcctgggcccatagaaacgtgctggcattttcttgagcagcgtggactttgctcattgtcctgattagcgtttacttcatgagtccctgccctcagtggctcctcacttccagattggtgaatttttaatcgataagggacagaattaagattgttgttgccagagttggaaaagtccccacggatccctcttttctttaagagcagttttttgtaggtagcttgtatttctcctgctcctcttccttcctgtttcatcttttattcactgacttttaagcatctgcttatctttttttttttttttttttttttataagggtagctgggaacacattttattttcttgggttgaaagctttttttttttgcttcagttaaggaaaccacgtgggaggttttgaaaagtgcacttttcattttcattgctgtcctaccagcagctactggtataactct

SEQ ID NO: 61280 - DNA, 2862 bp, Homo sapiens
aacaagcatctgttgggctaatggagccagagacatggtccaatgtctctgatgtccagatagacttccagcagccaggtcggactatctggggttctggaacgttccatgggtgaagctgtaggaggagatgctggacttcctgcctccactcacatgagtcactggagcaatacaagaaggcagactggccttggctactcacactggtctcagctctggggtagggctctttataagccttcttgagaagtgaaaaatgcaaagtcctttctgtcccctcaccactgacttgcaaactccagcgaaggcctcacccctcagctggcccagagcctcccagaagccctcccttcgcttcccacctcgccaggcccagccaggctgggtgctgccttggtgggcctaggtgaatcactgacacaccactgatgcctttggggcagaaggcagaggcctcgggagaaatgcgcaggccccagcggcctggtggagggtgcagggggcgcaggggcagccaggaccgccgaggacgctgggggcacgtggcaaactggctaccctgtccacccgtgagcaagacaccactccgggggcgtgggagggtccaagggagggagaaaggaaagtgccaccaaactaatgtggagccctgccctctgcatgcgaaaaggggctccacggcctgagtcaccctcagccccacctgcgtgtgcgcgagggtgcgtggcctggtacgcgtgcgcacggtgttggtgagcgtgtgtgtgcgtgtccgcttgaggggaatgtgaccgtcgtgtatgcgtccgcgacagtgcggggggccgcatatcggacccgtgcgtgtgcgtaggggtcgcgtgtggccatgggcacacgggcgtgcacgcacgggggctgcgtatgctatgctggcgtggggggtgcgggcgaggtggccgcggggaggagcggcgccagcacctctcggcccccacgcggcctgcgtggctttttgacccggaaaggcggggacgcggggacgcgcggcggcgggggcgcggcgggggcggcgcagagcgaggaggcccgcggggcgcgcggcggggacgggagggaggcggggggcgcccggggccgtccccgccccgcgccgcggcgccgccgttgctaaggccgggcgggcggccgccgggcgctagggcccttagcaacgggtcgcgggcgcgcgcggggggccggcgggcgcgtggggccggcggcgctcgcgggctcctgccgctcccacgcgcgcgggcggcgggggcggggcggcgggcgcgccggggatttccagcgcgcgagaggaagtgcctgcgcggggctgcgtgagggagcgagggagcgagggagcgcggcgcggccgccgcgtgcgcgagccggggttgcagcccagccgggactttccagccggcggcagccgcggcggccgccggctcttccccgccccccgccatggggcagcccggggagcagaacgctgcggaccgcggcggaggacgcgcccggcgcccctgagccggccgagcggcgacggaccgcgaggtaaggggccgcggcgggcgggcgggcctccggcgcgcggccgggcgcctccatccccgtcgcctccatcccgcgccctgggcggcggggcccgggggcctcggggctgcccggcgcgggcccggcgcggcgcaggcccggcccgtcccagcggcgacggcggggcgcggcttcagcctggccccgcgccccagccgggctgcctcccgcctccggacgcctcaacttcggcaaactttgtcccggaggccgggctcggggcccgagggggccggggcgcccgcaccttttcaggaaacggggcgcgcaggcctcgctacggccgtgacccccgctggcgttgaggacccggcaccccgcggggccgcgggtttcacgcggggggacgggcggctcaggggctgcgtggccgagcgcgctgcccgggccggccgggggggcccgggcgttattggaaagttggtcctgagtcattccgcctcagaggcgcctccgaccgcttggcgggcggcgcgggggtccgggtatgggcagagggcgcgaatccccctcgcgcggccgccgagggccggcgactcccggggcaccgggcggctcctggccgcgggctctgcgtcttccccgcgggcgccaggcggctctcggcgggctggccggttccacgccgccagccagccccgtgtggggacttcggtctagtatttggacccgaggagataattctgtgtggaaaattctctcccttcggttggaaacagtaacaaactggaaacggatgaggtgttatggacgtgcttggaaatgcaagaaaccttcagattacgagctgttgacgggaccagttgtatttcacgtttttcgaattaagctcagaatcagttttcagaatgacatgtgatgcgtggtgcgtggtgtgtgtgcctgtgtgtgtgtatggatataattcattcatttttgtggcgtcagaaaggttatgtcgagcgttgtagcggcttcttaatttacattcacggcatacaactgaagaggagccattatttattttttttcctagcatttgctgcgactacacactgccggagcgtttggaaatgttgtttgctgttaccctgtatttgtctataaaattcttactgtagggaatggccaagtggaccatcagttcgtcctgagatcttctcatgtctctcacgtctttgaaaatggcctgtgaacagactgcatcatatgtaggatgtctggcaaaatagtgtacagcgttcttttctcaaatgagaggaaatgtgtaccttttcg

SEQ ID NO: 61281 - DNA, 629 bp, Homo sapiens
ctctgttcttaaaaaaagcttcattgagaaaatataagtaagcctatatatcctaaagttcctttcctttactctagatcattctagtaaatcccctagagacagttctggctgtttatatataaaagtgtggtataatttgacagtgtgtgcagaggtgtgtatggatgtgctctcacatagaaaccctgcctccccagcctgtctcagctgattgttgcaacactgagccgagcaaacatgatgaggtcacagagaagtgagggagtggttttaaataatgaaacaggaaatctctgtctttggctccagtggtgccccagtgttttgggattaatgagggaagagctatgtctgcctgtgttccatgagtgccccttgcttgtacctctatggagaaccccaacaaccctggctggaaagccacctaatcctgtgtttcccaagcataacctccctttgttcccaagtaagtctttcctagacacctgaacttctgtgcaacataggcatgaatgaggagagtgagctactgtggtgttatatatatacacacacatatatacatgatatgtatgcatgatatgtatatatgtgtgtgtgtgtgtgtgtgtgcatagttttcatcc

SEQ ID NO: 61282 - DNA, 728 bp, Homo sapiens
gactgagcccttggctcctctcgctgcttcctgtccagatggcaggactctggtcgtgggccaaaagaggcacagtgtctttgcatataataaggattgaatgaatactttttaaaaatcctaactcttatgaaccaagggatactgacaatgctgggccccaaataactattgttttctcaaaggctttaagaccatgtgttatactgtgatttaatcaggttctttcctaggagtctgcctgagtcacttggtctgtgtgtctctccctccctgtcctaagggggcttttcatgtgtgactgtgttctgcctgcctgtctggtaagaatccagcctcctgttacttgcccaggatgctgactgtgggccctctcccgcagtggaacatttggcatcaggtaccaggaacagagtcagtatgctgaaatgtttgcatgaatgtggattttcagaaagctttcttatcagcagggcacacctgtctgttcgtgatctttgcccttctccctttattggcatcacttggacgatacctttaattgccctgctgggcttgatgttgagctgcttttctccatgtgtgtcgtgttttgtgctttcttgcggcaggagccttttgctttgtttatctgatgcttcccttttttggttttccccgggctttccagctcttggagcacccttttgtcagcagatgtacttttgtttccagtttttaaattctaa

SEQ ID NO: 61283 - DNA, 1429 bp, Homo sapiens
gtgcaaggatgccgcagagaggagggaggatggggtcagcttaaaggactggacaggtccctacccgagcagaaacctaggccgcatgcttactcagcaggcgtgtgtggaacatgcaccgagcccatggcagccctttgctgctgagtgccagtgctggtaccgctggtggatcatgaaggcaggctggagctttactgcagaatagcatcggccagaagagcaccttgattcaccctgcaggcctcatgttttctggcattgtgctgggtgctggggtcgctgcgggatgccctggtcttggccactgccgtcagggcatgtcggcctgggaaggttgccagctcctcctcccacagcactcaagcctgggctgcacccgagccccagcctgggcacagcagccagccccctgccctgtcacctgccttcaccctcccccttctccatgcttccctctgtggtcttacccactcatcccaaatagtcagctaacctttgcccacttgggggcaaaatgacacttgagcttagtgacagcacaggagacacagaacaccgtgtctcctaacacaagagcctggactacacctctgggcccaggagaagcttcccggtggaggaggggctggagcccccatatatggtgggccacaggggagggaggctggtccccctgtgcaggtgccattggccttccaatagacagtgaagccaaatggcctgtggagaagggctggctgcttttacaacgcaggagcaaggctctccaagtaaacaggtactcacactgaagagctgctctgcagacagctagctttggtttctgaaataaaatttcacttttacattaagtggaaggggctttccaagtgggactgaactaaactgttctacttggtaacttccttttgaaaaatcagcattttaaaaaatgtagcccttttctcccatggcttcctatgtaaagtgaatcaccagggcgtcctgaagctctgctggttgctgtgagccactgtgcagacctgaccataaagtgaatgctcccagaatctcctgagtcctctcaagaaagggacttccactctaatgcagtcacttgtgtttccctgcagctcttcaagtccaaaatgtacagcgtgtcaagagagcatcgttaaagataaggtattctggggttttttttaatcattttgtcacatgttttcagctgggtaatacttttcacatagtttgcattcggcactctggcacaacacattctctcagttttggcagctgatgcggcaggctcccaggcaggacactgtgccatgtgatcacctgggcagacagtggattcagatccacttggccacttccctactgtgtgaactctgtgagctacttcaccccctcacctgtaataatcatatcacctgctaagacc

SEQ ID NO: 61284 - DNA, 745 bp, Homo sapiens
agagaagctcgcgacgatggctgagatgtttttttagtatctctgttttgttatgcagaatcattatccctattttttaatgacataagtagctgaagaaaaatggctagttttatcaaagaatcatgaacgagatgcactcaagttgtggaccctcatggagagaatggagctgtctgggccccgggtgacccggatcctcacccgtcagcaggtcatccaggggtgggcgggcctctggtcttcatctgtaaacagagacattttgagtaaatagtctcagatcctttccattccaaagttctgttgactttagtatctcaagtcatgaccttcttttttttttagtcatgtttatgaaagataagctttggctccaaattagtttatttttaactcttaacagctgttgattttatttctctcagcagtccaaaaaggcacattaagctcctgttattccactttcatagagcaacaggcaggagtttcttagaaataacctttggactaagatgttgtagatcgtgttgttagaaagagtgagagggagctgggcatggtgccttatgcctgggatcccaggactttgggaggctgaggcaggtggatcacttgggctcaggagttcgagaccagagtgggcagcatatggagaccccatctctacaaaaatgaaaattaaaaagttacctgggcttggaggcatgcgcctgtagttcaagccactcaggaggctgaggtg

SEQ ID NO: 61285 - DNA, 686 bp, Homo sapiens
agtgagccaagatcgcgccactgcactccagcctgggcgacagaatgagactgtctcaaaaaaaaaaaaaaaaaggaatgggctttgttactgctgtgttagatacacagtagttgaacaggtctgcagcacatggttatccagcaggatggttgtggaccgtggtgtcatctggcagcctttcggggcctaatccctgtggggatttggctccttccttcctgttctgtgctcttttccccactgaaagtgaatggtttgcatcattggaaaccccaggacataccagagcagcctgcccacacacagtgcagcagtttctcactctgtcaatgcctcatgtgtttaaactatctccagccaagtcacgatggaagccccgagagtgcaggatgcataactgtgcacttccctcttggacgttgccaaaggactgatctctcccggactctgtccatcagagcagagtcctcgccctgttgtcaggccagccagctcggctctgcacgttctcattgtgctcacgagaaggtgtatggtgccctttgctaggtccaaaagcaaaggctggacaaacagcagagatatttatgtttacttaaaatgggaatttatttcttattatagaattatttagttggaatttcttaggttattttgttcatctgtcttagaaaatagaatgt

SEQ ID NO: 61286 - DNA, 1315 bp, Homo sapiens
tcttccttctatcatccaaccaccacccacagcccatgggacaggggcactgcgtggagaagtggacacccagttccaatggtgagcagactagctcagccctagcagcacacaggacagagaaaggggtgaattcaaaggtcgtttattccccctcccggcaagacacccattttacagggtaggtcagtctcgccaagcccttcttctttgcccttcttcctgagaacctaaggtgttcaggccctgcaggggcgggtaaggggaggctgagaaggtgcctcccaggggcctgaagagtcggccctgggcgggtctggaggtaaatgtgtaaccgaccctggtgcccccacccgacctgcctggtcacgtgggtccagtggggcaaagtctcctggtggggtgcaaggagccgaggcgagatgggcgtcctgggccgggtcctgctgtggctgcagctctgcggtgagccgggaccacaccggtgcgggcccggacggtagcggtctgtcaggacccagggccgaggtcgctctaggcctggagggtgaagatcttccgaggagtgggcagggagggctttggagggttgggggcgtgaaactcggccctgcctccctcgtctggcgagtgcgcagcccggaagtgcgcggccagtgcatcgggcggtgcgggagaggagaggaggggctccgggaacctcggccagccccggcctccggcggctcctgccctcgcggtttttccgtctgcgaaatgggcgcggtccccagaacctgccgagagcagcgagtgtgcgcctgcggggctcggcagaccgcctcagcttcccggtccccaagggagcactgagccctcctccgccttcacaccaggccggcgcgtgtccctggcgcccccttccctaaacccctcgcggctccctcaggacaaccccacccaccacattcagggccggcctgacctggtcctgccgcccccagccccttcttacttctcataccgggttgcgctctgtcgcagctcttcccggcccaggtaggactcctccgggaagccttcctgattccaaggccgagaagaggtctgtgctgccccatcctcctccatgccccagttgtcactgtccttaacaacgctgtcctctgctccagcgccaggcaaactgggggcagtgccgggaggctatctaggcaggcgtcctgcagggcgcgtttgagcgggctctgcaggtatcagtagaagtccgttggagagcgcccgggcagggcgcccacagtctggccgggagggaccagggtctgggtccgggccc

SEQ ID NO: 61287 - DNA, 433 bp, Homo sapiens
taccctccgcaggccgatggtctgcacccactccatggtgcgcacatcaaagacgtccacgccatactcgctgtacaccgtgacgtgggtggggctgcaacctagcgcagacggagcagggcggggtgagccacagtggctcaggaactcacctgccctcgggccggaggccaagccttggcacttgaacaagtgcagaggcggcagcactgccctcagctggttcacgtcaccaaagacttcatgttcccactctggaattcatcttcatttcaaagtttaaacaaacacaatccaatgtttaaatgctccacaatcacttccgtaactaatattttgaatactacagtacagatgttgaaggtgacttttaaaaagtctggtttttcatttagctctcatgagatgtgattatcctgaaagctactaattc

SEQ ID NO: 61288 - DNA, 676 bp, Homo sapiens
ctgccggtctcggggtccctcctgggacagtggctccagccacggtgtccctgccttccgggctcctcctcgtgcaccaccccgaggctgctgaggctgagccatccctcatcccttcctctcccaagccccgtgcaagtgccaagggctgctgaggaggcacttgcaccctgctgtcccacgggcaccatttctgtggctgacacttagattcaccccacccttatgtggattcctgactgggctcctcccacctggcacctcctgactcctctaccagatcaacctctgccaagtatcgatggcatgggcagccccacgtgtctgccctctccgtcctatacccactactgagctgctgtgcagctggcagaaggcgcacacgtttgctgaaatcacagtatagtgatgacacaattgtcacagattccactagggaggcctacagccagcagcacagggcaagaggctgccctctaccctgctacgtcttccaaaagagttttaatgcccaggtggcatctccgtttaaaagtcaccaggcctggccgagcacggtggctcacacctgaggtcaggagttcaagaccagcctggccaacatgatgaaaccctgtctctactaaaaactagaaaaactagccaggtgtggtggcaggtgcctgtaatcccagct

SEQ ID NO: 61289 - DNA, 724 bp, Homo sapiens
ctgagcctgggaagtcaaggctgcagtgagacatgacagagccactacactccagcctgggtaacagagcaagaccctgtcttggggggaaaaaaaaaaattcttaacagttttccaacctatgactctgcaattttggaggtcagggaaatcatcacctaaattaacactgggaatcaccttacaataggtcccaaatgttctccaaagactctccaatccaaggaccgaatttgaatgaaattatatcattccattcaaatttatgtttgaatttctaattcctaagaaaaacaaaaatccaaagaagttctctattacacatcgattttttgcagttttaatcaaaaaacaattttgttgccactgttacctaccaatcaataaaactaaccaaaaacctaacccccaacacagattgtttaaaatcaaactgaaacttgacctttatctcccagttagtggctagtgtatttggggcgggggggcgggagattactacacgcagttcacattgccaaaacacttctgattttagatttaaggagagggtgtttcctctcatccattctcattagcaagagaggctttctgtgagcttctcacacaaatttaaggtaaccataacataccgtcatcccataacactaagaatctaagaaaaaaacaaacgtggtcaaggactaataggtattatgttatgggttttgggatgagattacat

SEQ ID NO: 61290 - DNA, 2440 bp, Homo sapiens
accaatgattaaaacattatagatccggaacgaactagagaaggcatgcaaaattcagatgagaaagtttctaagtgatagctccagctacccctccaaatatcacaaaggtctagcagaattggaattaaaaaaaaaaagtcctcttgcacggtttatttaaaataaagccttaaccttaaaattcccttgaaggtgttacagcaaagtaggtattcaggctctgaccaacaaggggatgtagacaggctgtcacccaggaggggccgttagagctgggctccctggggatgcaagggggtcccacggggcagtgggcgaggcagatgcagaaagcacacccagctgcccccacaacgcagagaagcgtggggtggggaaagggaactaattccacactgcctccggaccccaaaggcgaggtgcgggggcgggggcgggggcgggggcggatatcccagtgagtgctgcaggaaatgatatccagactcggagggtggatctaggaagccgccagggcgagggcccggcgggggggagggggtgggagtgggaacgtaggatgtggctccaaggggcaggatgagggggcgggacgatcgaacgcggatgtcgagcctagggagggcaaggagggatgaaaagctagcggagggacgagggtgcaaggagcggctggagagagatgggctgcgggcctgggggcgctgccagagcgagaggaggcgaagcccacgagctgggtgggcaggagggcggcagggtctgtccgggcggggatgggcgggcgtggggatgcgcgggctggggcgcgggggtcgcagagccgcaggtccggccctgccggcgcgcacttaccccactcgaggaactcggccacgtacttgtcgcggcgcagggccgagtggctgcactcggtgtacaggcagacgagcacgtcgagcagcgtttccacgctcagggcgctctcgttgcgccagggcccgtccaggagcagctgctccagcttcttgagccgcaccttggccgacatggtgccgcgcggcccgctcccgacgcgccggcctctcaccgccggctcggccagtccgtcagggcgcgccctcgggggctcggcggctgcgagccccggcagcagcggcgcctcctcgccgccccgtccgcgtcgtcgcgccccggcctaggccgacatcttgggctccgtcccgacggcgcagagtctggggcgccgggccccgcgggtccatgggccgctctcctcccctcggcgccgccgccctcccagctcgggcggcccgcccccgccgccctcagccccgcccgcggccgcgccctccccgccgccgccgccgcagactaggagcggcgaggagcctagcgctgcgcaagcccggccggcgcccgagcccgaccccagccccgacccggcggcccagccccgcggcccgcagccaaccagggcgcggccagcaccagcgcagccaaccactacggggccggccgccgccgcgctgacctcagcgcgccgccccgccccgcgcccggctccctgctcccggcgggctcgggcctcgccgcttgccgtagggagccgggatgctgggaaggcagggccgggcctggggagcggcgcggggtgggggtggggggggcggggcggggcgagtgggccgctgagattgcggagcccgcgcatgcgcagagcgcgcctggtgggcgtgtgcgccttcgccctgcggacccggtgccttcagtattcggggtccgaccgcgcgcgtcgcggatcccggggccgaagacgaccccaagtatcggagaggcagagtcgcgatctcaggccgtcgagccccgtcccgcagtccgcgggcccatgttgcctgcggggcctcggacctgcccggccgaggtgggggtcgagggcggcccggcaggcgcagctctgatggcctcggcgggttgtgggctatttaaaacggcttgtcccagctcgaagcggtcctggaagactcgggccctacccctgactttaccgatgagagactgaggcccagacggtgtggggtcagggcccaggcttctgggggatgctgccaaggcgggagccagcgtccccagtgcccggtggattcgtgatggcttgcagagggtttcagtttccactgtccagccctccctgcagaccaatgcctaggtgtgacagtttggtaggaaaggggccggatatttgtctccaggctgggtttgcctagcgagtcgctgcatttactaagattgttggttaatttgggtggctgggggagggaggctgatggagataccccccaaccccaacaaacccttggcgtcaggagaggaggggcttttcctggagcttgcggaaggtcaccgaaatcgtgggggtatctgagagcttctggggcgcgcgggtgcaggggaaggg

SEQ ID NO: 61291 - DNA, 2136 bp, Homo sapiens
cgggttctgcatgatttgcgggcccagcacccatcatgcctgtccgcagggctcagcgcccctggtgcaggaggagagggagggcaacagggctcccctgtgggccgctggccttgggggttcctcccttggctctgggcttctccagctgtggttccagggcaagcctctttccctcccagtctcagtatgtgttcctgtaccgccccagtgctgtcctgggactggaggtctccaggccccagctggggtgtggccagtgtcaatgtagctgcagtgacggggtgtctccccaccccggcaccttcctgcctccggggccccgcagcccagtgcacagtgtcatggtgcactccaggacggagctctcccctcacaagctctgtgaccccaggcaggctcttcagcctctcggtccctggtttcctccctgtaaatgggatactacgccatctttatagggcttccatgattcagtgaagccatctggtttcaggccaattgcctggagagtgcctgctcacaggacatgcggtgtgagctgagctaggattatggcgtagctctccagcacacttgtgcactatacacacacataccatttccgtcttacccaccaccgtactaaggaggactttttaagaaggggcacacactttagagttaatgtttgttacacaaaggtggcccacgacaattagtgctcatttagcacgtgcctggcagcaggaccttgcccacctctgtgaacaggagctgccccttagtgaggtgagactgtgctggccacacggcaggacctggccatccccagagcttcccagctggaggctgccagctgctgccctcagcagtgaggagtcctcagaggctctggaagttacaaccctgaccctccgcctgagacctgagccctgccaggcctgtctgtgtgcacagcaccagggttaaagtggggccaagtagggcaggcgacaagcaaggtcccctgcggtgggcgggctgagggtggggcaggctgaactctgccagcccagggcgggccggatgacctcagctccgggtgacaccggtgggcgtcgggtgtggcctcagacagctcccttcctccccggctggttgccaggtcaacaccgggtgggactagcctctggtgtcggcagtagccccatgctcccggcctttgggttcttgcatgcgccgtccccatcacctggctgcccctctcacttccgtctccacctgtcccgggtcacctgtccttcaagccagaaattaaggacagcaccccctcccagaccgcctggctgcagtcccgggatgggcgctcctagtcgcctagatcgggcccccgctgagcccgatccccctccccgctccgcgccggagccgagctccctgcgccggaccagcaagcgcccgggcctcgacttccccttccgtgcaatgggaagcaagcctcgctttcctatgagcagggtgtcggctccgcgcgggccccggccctggatcctgcttggctttgcctggagcctcattctctccggctgtgccgggggaggctggaggcggcggcgagggggacaggagtgtcgcccggctcctccgcccgcggccgccgagggacgtggtcgggcgttcctctctcgagccgggagggggcgctggagcaccgggaacccggggccgttagcaccgcccctcctgccgacgccccgcctccggccgcgtttccccgggcctggtcccgctccgctccgcggcgcctcctctccgcaactcccactaggagggcagaccctcagccggagccgaggccgcgccccgcagccgcgccccggggctgcccctgtgggtggagcctcttaggacgacatccaaacaccccgggcgggcgcgggactcacgccgggaatcccagcactttgggaggccgaggcgggcggatcacctgaggtcagcagatcgagaccagcctgagcaagatggtgaaaccccgtctctgctaaaaatacaaaattagcctggcgtggtggtgggtgcctgtaatcccagctactcaggaggctgaggcaggagaatcgcttgaacctgggaggcggaggttgcagtgagctgagatcacgccactctgca

SEQ ID NO: 61292 - DNA, 1462 bp, Homo sapiens
ccgtcctcctccagtccttcccatcggtcctgaagccagggagggagaggcttgaccaggctgggggacatgggggtagtgttgtgaaaggggacagacatctcgcaggatgccttgcaggcacgtgggatgtggggtgcagggaggccggcacgtgggtgggcgatgacgccatttactgagatttgatccccaccacacggctccggggtgagaattatgacatctggctcaacacggctgcccgggacccacacagccgagcggccgagctcgggcggagtcccagggcgcccacagcaccccgccagcgcgccccgtccagcagggcagcttttgggcggaggcgacccccaccgcaggtcccaggaccctgcgtgctcttgagccaggggtggagaggcccgaccgcggggggctgccccaccccgccgcccttcaccgcgagccggggcccagaccgcccagccacgcccagagcccgcgggcggagacgccaggggcggtgccagcgaggtcccgtccccggtaccccgtcccgcccccccacacgcggtgacctggggacgccccgcgggagtcgttctgcggctccccctggcgtcggctggggccaccgcccgggctcccacctcaaccctgcaatatggggttggggcagagtggtctgctgcccgctgcccgcagccgcttccggttagggagggagcctgggcctctgggtgctcacgctgcgcttaacgctggtcccggcagcagtgagggtggaagcggccgcctctggcttctacaccccgggtgtgacagcctggcctctcagtgagccccagatcaggcaagcatttggtggtgggggtcctgctccctggccttccctacctgggagccaggtcctcagccaaggtgaacccatttgatcccgacgacaatcccattttctggaggagtaaactggggctcagagattgaggtgcctctccaaggtcgtggggagctgggcttgccctctggtgggtgtccctggctaggcctctccctcctaacggctccccacccggccttctcctgaccccagaccaacctcgtgacccaggcttctttgagataaggctggggtttttccaaagggattttactgagaaacttcgggaaaacatggacatagcatgaaagaaacattgcaacctcatgctgaaaagcgggcacaggctcaggtgcctgtggagagcagatgggagttgaggggacttccaggagcagtccccaggccctgggcaccaccagcttttcaggcacctgtgtattgaatggagcgacccataattggaggtcccaggaccccaacatgccctgggagctggggggcgggtgggagaattagaccgggaagtctccagtccaccaaggcctggctgtatgggaagacccagtccacagagccagagacctaggtcgcagtcct

SEQ ID NO: 61293 - DNA, 1746 bp, Homo sapiens
agccccatcacacaccctggtggccccagcccaggttgggacaggcctggatccgttctccttggattttccctgagttgtttcctaagacgctcgctgcggaatccccctatgcaggggtgaggctgcctcttctgggaagtgtcagtggccctccctgcggcacgttgcccgcctgaccccctggtgtggggagtggggccccgcctccacatctttgcccctgcccaggatgccgtcccttctcacttctgagtgtgtcctgtctgtccctagggccccatccctttctctagctcctgaagcccccaggaatggcatgtggctctcaactgctgcctttgctgtcaccgtgagcttccctgacaggcagggtgcaggggtctcgggatgaactcgatggactggcccagtgctagagcctctgtcctggagggaggggtccttctgggctccggcactgtgggctgagtgtcccccgaggccagcgcctgcttccgctggcctctgagcaaaggagaggttggtggtgttttgggtggcaggcagcgtccaccccctgctgcctcgagaccctgagtgccgagctccgcagccttcccctcccttgttctctgacccttggactgagccctgagctgtctggaatggaaagctggagtgactgcctccggaacgaaaaggaagtgggaacttctctgaaagtgaaagtatggggtcctggtggagggtagggctgtgggtggggccgggtgggcctggcaggcgctgaccatggctgggaagtcccagctgttggtcactcgctcaggctgctctagaggccccatagccagggcccggctctgagggccccacgggccagcttctcagggggctgtgttcttcctgggccaaggctgcgtgctcagcaggtatgttctgggcaggtggagcaggagggcatggggtgctgtgggcgggcttgaggaccattccggctctgcgtgtggccttccaggccaagggcctcactcagagcccaggccgaccaggccagagggccagcgcaaatcacagtggacacacacacacccgatacacaggcagacacactcaggtagaaagcacagatagacagacacagaagacaccaagatgggcatgcaggcacagacacagactcagaagcactggcagaccctctggggacactccagggcagagtcatgcacatacagggagacactctcaggccaacacacagatgtgcaaaaccgacgcccagaaaagtgtgtatatgcccgcgcgctcaagctcaggcatcagattcactttcctggtttccccgggaaagtgccgagtactagccatggctgggggctgagtcaggctcactccctgccttgcgggtctcctggtctccaggctctgtaactgtccctccgtcatggcaggtgtgcccagggctgggatcaggcccacagcaggaggtgccgaacatggtatgggctcagctggtccgggaaggcttcttgggggaggagccatttctgctgagccttcaatgagttgacaactgaagaaggaggggctgaggtcattgtaggcagagaggatggcctgtgcaaaggtgtggaggagaggtgggtacttctgagtgatcagagtgagggaatgagttgggactgaagccagaggggtcattaggagaggccttgaatgccaagctaaggatggagctgtgcttcttccgagggcagcagc

SEQ ID NO: 61294 - DNA, 2748 bp, Homo sapiens
gattcaccgcacagctgcccctccttacccggcgctcgtctgggcttcctgggagagaacctccacatctgaccccactctgggacctgctgacaccttgggtctctccgccgggaggggagcttctgggcggcagttctgagtccctgggggtggagacgtggcaggtcccgcctctgctcccagctccaagcaggctccccagcctgagtgcgcggccaggggcagactctgtccctctgtgagcctcaggttcctcatctgtgaaatgggcaaatgacaacccctaactttgatgtcacagtagctgatctgtgtcaggcatcgagctgggcacacagtaggtgcttactaagtgtgagttctcccaaacaagaaggcggggcctggcttgtccttccccacatccccgcctccgtcctcttgacagcggtggatgcagcatgtgctgaaccgttctcttcacaacacccctgccctgctgggcgccggcccccatgccaagcatgaaggggcaccggggagagagaagcgagtggaggctgggacagatggtgccctgaagtgtgggtcaagtccgaatcaggcagggtccctgaaccctggcgctgggggaagtcgccgacctgtggccagggcggggctgataaagctccatcaatcacttgactgtctctccttcctcgggcctccatccagctgcttagccgcctctgggaacctcaaggaaggtaggtaggctgcagctgggcccagcaggcaccttgctggagggcgagggtgggtgggggtctgggccctgcccactttggtgtcattccaccgcagcaaactggggcctggggaggcacacttcctgcccgatgtcacccaagggttgggtggtgggtcaggcgggtgctttggtcctggcacctgggtggggggccctggggctgggctaggggcaggtccagcccttctttggccccagtttctcccagaggaaagtgaggttttgctggcctaatgccctcccccacccatggcccagcttgtgcaatggggtgggtgggaggcccctcccctctcccaacctaaagccaggaaagcaaacacagctcctaacgctggaagggggtgtgggtggagcctggcaggccacggtgccgagggccctgggggagcaggagcagccgcagctcagccacccccatgtccctgggacaccccctccattccctgtgttggggaggggccagagcatgctatggtggagagggagaggagtggggggaggaggagaggcaatgggtgggaaacagcattgagaacccccccagtccctggttaaatatagacccgaggctcctccttctgccgcccctgtggctgcatggccatgataagccgcagggtggccttggccactgccctcaggccccacacctcctcggcgggctctgtgacacccagggaagggggtgggctcccatgggggtccctgccctccccgttgagccaaagtagtcaggccttttgggctgaaggcgggtgagctgagggacctggagggcagtgaaggagctggtgggggctggggggagggttttaggcctcaggacctaacatctgggaaggcctagatgtggctgctggtcctgccctcgggtgttgtgagctgtggtctggactgggccccagaactgcatgtcagtgccctcctccaattctaatgggagggtctggcctggcagaggccgagtgacggtgggcacctgcggagaccctttttgggggatggtctcaggaaaggctcctgatggaagcagctgtctatatctccgtgcccagctgcggcctggcacactgagggctctcgccaagagagtggcctggtgatgcttccttttgacagcctgagggctgcctcctctggagagccttccttgaccaagcccctgggtgtggccaggccccacagggccacaacaggtttctgcatctgctcctatggccactccttcttgcccccagctctcctgctgccaagatgccatcaccacagacagacactcctgggccggagctgcagagtcccaaggaggctgaggagccacagactccagctcagggctcccggcgaacaagcagcaggaaagagcccaatgcccaccgcaaggatggcacaaggctgggcctgggctccctgaggcaggccttctcccgggccagccagcgggctttgacccaggtctccaaggaagatacgggcctgttccggcgaagctcctgctccctgttccggtccttccggcaagccctgaatgacggcccagctaccggccattcccaggccactcctgaggtgccctcgggggtcatgaatggtgtcagccagcaggcatccactggggcagcgtctgaggaactgaaacccgaggcaggtaagggcctcagaaacaacacgaagcatgaaaggaaacgggccagaggtcagggcagctcagctgaggtttccggaaaggctgtcctccctagctccccaaaccctgcccccgaacatgtgcaattctttatttatttgagacagggtctccactctgtcacccaggctggcatgcagtggtgcaatcacagctcactgcgaccttggcctcctgggctcaagcgatcctcccacctcaactttctgagtagctgggactacaggtgtaagccactgcacccggctaattttttttttttttttttgacactgactctcac

SEQ ID NO: 61295 - DNA, 2813 bp, Homo sapiens
aaaaagaaaagggcaccccgttaggccagacgggcatctgggttcagggtacagcctgcggggagcggccacctcccgctctctgcctgggatgaggatggattgccttccccgcggagcggttcccagccccaccggcaggagcgcccacggaggtgggggaggttgcctgaagtcccgcactccttaaattgctccttaaattgtgtggggtcagacccgtgtccgccctgctgtgggcctccgtgctgcgggttggagggtggccgattcctgagctgtgtttgaggagagggcggagtgccatctgggtagccgtccttcagcgttctgcaggaaggcaggaacccagctgtcagaggcttcccgggagggggtgtggcatggcagcctagaggcgcgcgcgcgtgtgtgtgtgtgtgtgtgtgtgtgtgtgtgtacagatgcccaggttcgggattggcgttagactttgagcctggccagaagaggggcagcggctgccgcatcagagccgctcccgcccccagccccctgccctgtcttccagtcctgacttcctgggcgccccggggctggcgctgcccgccgagccgctgcctccgctcctggcgccggacgtgtgggcccgactggagagcgactacaccagcttcctggaggtcaggccgggcgggtcaggctgggcgggccaggctggagggggcgggccctggggggatgtgcggcgcccaggctatcggcggccagagctggctctggttcaccctgtggcccccggcgcgggcttgtgacccgacagggcggccctcatcccggacggcgcgggacggggtctgggagggtctcaccacggcccatcccttctccccccaggccaagatcgcaagctgcttcgacagcatcttgcagctggagcagagtcactgggcggccgccgaggtccccgaggtgctgcagggcctctaccaggcgccgctgtccatggacgtccatatggtgcggcccgggagcaggggctgagaaggggcgtctgttcaagcctcacgcacacggtggcgatttccagaacgaattcctatccagtcccaaccaacccttccgttagatgggagcctgaggccccacgcggggggaaatcggggacccccggcgcgccgacgggcagggaggctgctggatgggagtttgcgggagttgactctccagttgggcggctgaaagctggaggggccaagactgacaggcacagcggggcgggctggaggcgcagcgggggctaccaggggacccgcggcctcaggtcgggggctgggaggcacgctcagtgcggggcttcgctcgcagctcgtggccgagcacgtgaaggcggccggcgccatctccgcggagctggaggccaccaccctgcgaatctgcacgcgggcgctcggcctcttcgtgcccaggtgcggacgcatcctcagtaggggagcgacctggccgggtgcgctctgcaggtgggagggaggagtctgcgtagggacctgattgggagggtggacccagggtcatcgcgcagctagggagggtccccaaaggctctgtgtatcccgccccaggtttgaaaaggcttttctggcgtcggaggcggtgagcgagccgcacctgggcgcctacatcaacgcctgcgaggagctcaggtagggctcgcccgctcctgtgcgggcgcagcgtggccagcagggggcgcgcgagcgccgggaacctggatggaggggagtgcgcgcgcgtggagggggcagaggtgaggagtgtgtgtgtgtgtttgtgtctgtgtgttggtggatctgaggggtgtgtgtgcgtgtgtgtgtagcagagttggggggtgtgtgtgcgtgtgtgatggagctgagggtgtgtgcctgtgtgtgcatgcgtggagagctgaggctgtgtgtgtgcgtgtttggcagagctgagggctgtgtgtgtgtgtgtgtgtgtgtgttggagctaagaggtgtttatgcatgtgcgtgtaggggtggagctgagtggtgtgtgtgtgtcagagcctagatgcgtgtgtcttgtgtgtgtgtgtccatccgagcaggggccctgggggagtgtggatggctcttcaaggctgagcagaggccgaggggttccagctccctgcctgctgccctgggctccatttttccctcccttcatcccaggcagcatttcttccatcttgggacacctccttctctgggaagcctccctcagcctgcaccctgggctttgctggggtgaggtctgggtctctgtgtccccagaaggcagacgccctccctgtgggctggcagtagctgttggccttccgtgccctcagctccaggccaggcctcagcagatgcggcagcgccagaggcacagactgagcctccccatctgggtttatccttttttaaaagtgtgtaaattttagtgtcccgaagtacttctcatttgtctgacttcaaagaacagctgtgccacctgctggctgtgtgctccgggacaagccacctcccctctgtggctcttttgccacctgtcaaataggatcagagcacctgctccctggggtggtgtgggacctctgtgcctcaggggactcagttcccattggctctttgtgagcacttctcagtgccaggcactttgtgggtgccttccctgcctgacacgtctcatcccaagcgcagtatacccacgcacaggtgcagagcacaggcctggaaaggaggtgccacttgcccgtggccacgtagccaggaagtggtggagctgggacttga

SEQ ID NO: 61296 - DNA, 6058 bp, Homo sapiens
atgccctgagcagatctgactgcacagactcaaaccctgcccctagagcttggggcctgggagaggcattctgggaaagggctcgtgacataacctgtggctaggagagggaatggcaccccaaacccaggagggaaggggtcaggagtggcacactgggcttcgagggaggggttacgttgcgggcgtagtgcacatttgcagactcccagcccctctgtccccagccgctcttcagggttgtgtgcaccagggactggctgacgcaggactggctgcatcccctcatggacaaggtggtgaccttcgccggtcatctccagcgtgtggcccggccgcgggcacaggtaccacaagggggagggccctggcagggctgtgcccaggattggggctgttgaccctgaccctgaccctgaccctgggccgcccaggagactctgcaggaggtgcaccggttcgtggtccgcgagtacctggcgcgggcgctgaggccacgggagcggttccggggcatggagcgcatgcatggctcccagaagatgagcctggatgcccaggccatcagcgacaccttccagggcctggtaggggcggcatgactgcccttcggtgctcgcctctgtgtggggagtggtggcagtgactagggccttagcgccgggagggcttttggcaggagtggttctccccactctggatcaggtggaacagggactggggcgcctgtggggctggggggtggagggaaccaggtgggagggcggcactttgcatacatttgcatacagtttgcaggggtgcggggaaggggcgagggtcacagccccatctcacggtcagggcctttgggaggtgtcccccacctcaggccagagccctcagagtggaggcaccagcgcccctgcacacccctcgtctgccccctagcagtgctttcaggctggcctcggttttcctgtccaagcaggatgggatcggaggggagatgaaggctgtgtagccagcccatgagccctcggtgcccaggcacgctcccgttctgttttgggggaggcagtcccggcaccgagccagagtgactacaggagggctgacgctgcgggagggctgacctcgcactgacctcgcgctcttgcaggagttggagcagcggtggggagagggctgttggggcaggcggtggctctgtctcgcagggttccgaggccacatggttggaccaagccatccagtgcgtggctgagatcctgggcgagacctacaaagatgacatccagcggcacctggagactcttatccggagctaccccgacatcaggtgtgtaccccacctgcttccactagcttcctaccagagcttcagggccaagggggctggtattggagcaaccccagcccagacctgactgcccaggggcctgaagaccagaggcaggaggtaggccttggaccctcagaccctcaaggctggagggggaatggagagagccccttctcctaatctgctcttggccatcctccatcagccccaccaggggtgggcacgcctccagtcctggaatctgagggggaggcggaccccccacccctggggagaaagccctctctgaaagccaggggattctgagacctggtcaggaggaaggaggttttgatcccgggttgtgctggggggtcggtgagtcatccaagcctttggaaatcccagctcgaatctctccaagtccattcttttggagattctgggatgtggagctcacagaaagcccctggttcatccccttccccaggccaccctgccatggggtggggaaggattccccatccccagcaggcctgtcttccaggctgtggctcagagagagtggcccttacatcaccctgggagttcccctccaactactccccaaccccgttggccccgtcacccgcagctgcatcaccccctccctccctctccaccacctgtcccccggtctccctctctccctcgccaccctgtccccatgtctccctccctccctccctctccaccctgtccccgtgtctccctccctccctccctctccaccctgtccccatgtctccctccctccctccctctccaccctgcccccatgtctccctcctccctccctctccaccctgcccccatgtctccctcctccctccctctccaccctgcccccatgtctccctcctccctccctctccaccctgcccccatgtctccctcctccctccctctccaccctgcccccatgtctccctcctccctccctctccaccctgcccccatgtctccctcctccctccctctccaccctgtccccatgtctccctccctccctccctctccaccctgcccccatgtctccctcctccctccctctccaccctgcccccatgtctccctcctccctccctctccaccctgcccccatgtctccctcctccctccctctccaccctgcccccatgtctccctccctccctccctctccaccctgtccctgggtctccctctctctccagcctgggtctctccacccggtccccaggtctccctccacgcctttgcgtgggctctttcccactctgcacacccctctcctgtgccccttcaagcccagctatggtgtcccccaggcccacgccctgccccctcccccagcacagctcttcctggcctcagtcaatctgacctccctgaccatcctggaatgcagagtgactcatactaactcccaagcccgtgggttcgcctcatgctggggctgggggtgttgcggaggtgtaggtctgcagtgagtgcccgcatgtctctgcaggcgggaccacatactggccattctggcgctgcgccgactgggccgccagcggaaccagcatctcttgcagcacactcaagacctgctgagagctgcggccggggcggcgggtgcggaggcccctcggggccgcgtgctcttcgaggagatcaaggtgcccagtgccatggctgtgctgatcacctgcgtctagttctctctggctcgagggggggccggccgctggcagggagctgtggtcagtgggggtcagccaggagcccagggagtcactctgggccctgcccccaactctgacactgcagttagggaatttttgtcgtcagcagccaagcgcagctgtcaggccagaaggagcagccgtgcaggaggcatttcaggcatcgttgaggggagtgttttggggccgcagagctctcaatgctgcctatcgggcgggggggggcctcccgcccgactgtccagcttcaccctccagtctgaaagtgaagagcagagtatttatttaaaaaataaatgtgaattaaaatggtgcctccctaaggagtgggcaggggatgggagacctgggtcccggtgtgctgaagggccaggccggaggctgtctggtgacactatttggtgggtggccctctcatgcctgtggaagccacgggaagactgaggcaggtccagagcagggaaggcccatgcctgtggctgcccccaccacggcccggatccactggccttgtgcctggtcagccttgtcccagccaaagcagactcggggcttcctgggaacaaaaagaggataaggctggttctgcagcttgaagaatttgggttagatgtaggagggacttctcagcagtggaagttgtcaagttactgcagggggtgtgtcacccatggagtgtgtgtccgggggtgaccctgaggtgtcagcaatggaggcaagcgtaaggagactgctccagcgtgcacctgcgtccccgcttctctctgcaaagctgccgctgaaatttggcggcagctgcgggctggggtgctgggaaacctatttgcattggcagccgggctggctggggaggctgaaagttgagatggggagatttccagagagcagctgagacaggtggtgacaggtgcccctcccagccctccacagtgggcccccatagtgtctctgggcctgaccctgaccctggcgggagtggggggcaggtgactgcaggtgggccaaggttccaagagctccacaaacttgggtcgcctgaggacagggtaaggagtctgaaaggctgtggtgccaggcaagcagggggcgtgtctatccccactccctccaggccccctccctgcactgtggacagtcagggggcagttccccgggcagacctgccccggttcctatgccagggctggggcctggagcctgagtcttgctggggcctagagcctgggggttgagtgcctggggcttgtctgtctcttctgggagcaagtgctggggcagtgccctcctccatgggggcaccagggctggaggtcaggagcagggcaggccagggcaagggaatatccagacctcccctggcagggtggggcaggtggggcaggaatgaggaagtgggagggttggggttccccatctccagggctggggtgggggcaggtatgtgatgctggtgccaataagcggtcccgtccctgatgggaaaacaggctggcagatgctcaggatcctcccagccaggggccagaggggcatgtcttttcccaggggaggggtccaagagggggcaggtgattgacaggtcagcctgtcccctgcttgaccccacccctgacctggtggccatgagtgtcccaggcagggtgcatgggaggggagaagggagggcttggcctggtctggtcctggtcaggttctccccaaggagcccctgccacccccttccccacccttctgtctcaagctcctcactgagccacttggctggagccagagggtcctggggcagggctgtggggttaaggagggggttccgtcctggctctgccacttcccacctgtgagaatgcaggcaggttcttttatctcactgcttcattttttttccagctgtgaaatgggggtgctgttagtgcctcctcggctggggagggtgaagtcagagccagccataaggccgggggcctggcctccctgtgaccccatgttcccagaggcccacctacgggaaggccttgggcaccctggggttggggtggtggggtgctgaggctggagcaaaacctgagttgagtggaggtcactgggagtgggaggccccaagagaggctgggaagaggtgctgaaggctgagcggcttgtggcagagggagggggcccggcttagaccctgagggttcctaggcccggagacaggaagtcagggttttcctggcaggaactgtgtgcacatgtgcacctgtatctccatgccaggagggtgtgtatgccatgtgtgcagatcctcctgaacccagcggtggctggggctgggacttcccaggccaagccaggccgagctgggggtgggatggcagctcctagaggatgcagtcagggaggctgggggcagaggcggggctgagaccggggcaccctgggtgcctcagtcctggggtctggccactggcctttctgctctaaggggtggaggctgagcccatgagaccttgcaatgagcctgcagtgcttccttggccatctgttgtccaggccaagcctgcagggtgccggtgggggtggggctggctctcagagaggtacttgggttctcattggccaggtcacctggctgataagtgtgtgtgtgtgtgtgtgtgtgtctgtgcacgtgtacctatgtgcaccagcccctgtcagcacccccaggatggaggcccttgcctagtctcctcactcctctcagaaagcaggacagcctggaaccatcctacttgcccccaagctcagcccccaggccctgcctgccggcccctggcccgcagccttggccagtgcctgttccctgctgcatggcccaggtctcctccctcttcagggccagctgggcttcccccagtgccaccgtggcctggggctcctgcatgtcctggggttccctctggtctctgtccctgagcttgaggtccttgagactgggtctgctctgtgaatcttctggggccccaccccaggcccaactgggagg

SEQ ID NO: 61297 - DNA, 745 bp, Homo sapiens
aattaactgggcatggtggtggacacctgtaatctcagctattcaggaaactgaggcaggagaattgcttgaacccgggaggcggaggttgcagtgaaccgagacagcaccattgcactccagcctccctagcagctgggattacaggtgcccgccaccacgcccagttaatttttttgtgtgggttttcctttcaatatagttctaggaagtaggaacgaaacagccttaggttccctgcctcctattctcctgcctcatcatgagaagctctgctgtttgtggggcgcccaccatgtgctttactctggtggtgtatgatgttcctgctttccctggactcagggctggcatttcgaatcagcttctggactcagacacctctgggctggaatcctagctctgcgccttcctagctgtgtgacctgtgtgagtcactccacctctctgggttccatctccctgtgtaaactggggaggattacacaagaaaatgcaagagttggctggaggagggcctggctctccaagagcatcctcctacctgtggcattcgttgttatttatctgcactacctcctttaagccatccctgccaaccctctgagtgtgccagtgccatctccaggaggtcccaaggaaatgtcactgtcccaagcaatgtatggaaagacacagctctaagcagtggagtaccagggcccaggtggtctccacgcctcagcccacagtgggatgccctcct

SEQ ID NO: 61298 - DNA, 3054 bp, Homo sapiens
agtcagctgtcattgctctggcagacagaagggagggaacatcccatgtgtcgtagcctctgaggccctgggttgcgtgcgaggagctgaccgtggctcctggccaggtgctggcacactcgccttctaggctaaatggagaggtcattgccagtctgctcctgtctgctgccctccccaccaggcagagccccctgctcactgcccctggcctgtgccctggggagctggggaatgggacagccgctggccactggtcacaaacatcgccacccagcatgtgatgctggcttcctgctggggaggagccgtaggctggcctttggctcctctggaagtgcctggcctcttgggaactgctttctgcatctgcgagaagagggtaaggactgctcctgccctatgggccccattggctgtcatcccttgggcctccatgctgccccattttcagaagactttccttgtcttgaggacttcacgtatgttaccattgaccctcatgcctgagcttagagaggggaagtgactggtgcagacacaagtccaaggcagcagcctcgtttcccaatccccagccggtgctctgggcgggccactgccgtcagtgggggacaagggtggcagccccgcctcagccctgcaaagcccgtggagaccaggggctgccttcgaggggacagtggggcctaaggcctgacaacgccctcctggcagatgcagacttcccgagcaatttcccgatctgcttgggaatgggagggggggtgagggggtggggtgggggaacagagtctggcaggagaggcttgtggggattgcacaatgaggccacagcagccagccgtgaaggcagccaccggccagggcccctcagcccgtatcctcatcgcccctgtgtggatgaactccatctgcgcggtgccggtggaaggaccctcccagccccgggacaccgcggctctgtggactcatctgaaaaatgtcatccctggagtcctaggagagaaggggtggggttggcagccttaacgccccatcctgcatcctggcggcctcccgcatccgctcccccacaggttccccagagacaggatgatggatggcaatccgagtgcaaacctggcgcttggccagcactctggaagaggaagttctcagttcccagggcacctgaacccacagccgcccccactccgctggcccccctggtcctggaagacctgttactaggctgcagaaggggtggcggagtgatcagggggcggggaaagaggccaaacaaaagaggggaggagcagaggccccagtgaggcaggagggaagcccctgcccagcgggaaattcctaaatgtctgggtcctttccagagggcaggaattcctagcctagagtgtgaaataaggaaggaagtgaatctccagtgggttcccttcacagcccctttccatcctccccacatgccccacccccacatctcccaaaacaaaccctgagagacggtgtggatggggagacaggcctggaaacggaggcctgcgctgaatgggcaaagccgggttgatgatccagacgaggccctggagtctgggccttgggcccctccccttctgcctgctccggcagcctgtgggtccagccccagccccagagggggaaaggctccagtgggagtcccataggcctggctaggaaccccactccgctacttaaagtggtgtgagccgggtcagccacttcacctttccgcatttacgcatttcaagcaaggcttgacgaccggaggggctcaaggccctgtgcacagccgcgcggccagcactctggccagccttgtagcccccttccccttagggggcctccttcaggaagcccccgtcccctgcctccttgtggccacggtgacaccggaacacttcagaggggcggctggggagttggggtgggacgggctctcccgcagctggagccggtgtgtgacgcgggaacgcggccaagcgcgccccatccaggcggcctatcaggagccgtcgtcggacaatggctccgcgcctgacaaccccgtcgtccccgtgccgtcccccgaactccacataccatgcgacgcgcggccagccccccgcccctgcccggctgctgggaggaagtgacagcgccccgcatcccccgctgggcaggccgggcgcgcccagcccctgggacgcagggacacagccgggccgcgctgggccttggcctccgcccgcgggttttccgcggttgcggcggggcggggaaggaggggcgggcggggcggggctgactctgcgactatttcaggccttgcggaacccgggccaggacagtggcggccaggccgggacacggtaagtgacctccgcttccacacgtccattccccgccgctccgcgcggcttctcgcccgcccctaccccgaggccaggccggattccccgaggaaagagcctgtcgccgcggcggggacaggagggggctggacgcttccagggaaactgaggccctggcgcgcccagcgtccgcgcgtccgggcgcagaggggccaaggctggctgagggcccgggcctgccagaggcagggagggcggggctggggcaggcgcaggggtctcccctccattacagcagaaaggccccaggtccggcgtgactccccggccgggcgacacaggccgagtcacttcctcgcccgtgcccgggtgtcctcatcgggggatgggtgcgccttccacatcctgcccaggactgaaggagccgggcccagcgagctcccgggaggtgtgtggacatcagccctgacggggaaggcgagccaggtcagtggacctgaggagaggccgggcagcaggaggctggggggcgctgttgagccactggctgtgacccctctacgagcctcccagcaggccccttcctgcctcagtgggcccaaccagcggcaaggctcaaaggaacgcccctcctccccttcttcctttctggctgcaccggctcgctgctgcctgcaggacagactcaggacacaggagactcacc

SEQ ID NO: 61299 - DNA, 543 bp, Homo sapiens
gtagtgcttgagtaatttaaaatttcttattttgatatttaatttgaacattttctataagaagtgcttttaaaactagaaaaaaattttttaaagtctatataataaattcctacggctttacttaaataagggtgcctaggatttttcttgagtatgaacctgtcacatggctggttgtgtgctgaggccagagggtgggaccttccctgagggccgggctgggacatctccccacgaggttggtcagtccttctgccagctcatccatgaagagttcaacccaggtcagggccgggccctggcagcctggaggctgagcctggcaggcccttcccttttcaaaggccagcactgtcaggcactttggtccagactccaggcctgcagaggcacagagcgcaccaaggggggcagtgggaggggccagtgtgcgacccccaggacaggctgggaccccaggacaggctcggaccccaggacaggctgggaccccaggacagcctcagaccccaggacaggctcggaccccaggacaggccg

SEQ ID NO: 61300 - DNA, 792 bp, Homo sapiens
gcctgcacccccccacagcctcctgcctgcaccccccacagcctgcacctcaatagcctcctgcctgcaccctgacagcctcctgcctgcattcctgctcacttctccagttccagtggaggcaaagactctgacccgtgagttctccagcactgaaacctgtgctcccagctccctggggaggaggctgtccctgcaatgaccccatcctagctgggctgtgtcattcttacagagggtaatggctctacctgcattcctgaggtttctcaggctcaggacctgtggaaagtgagccatagaatctgctggcattgcagagaggaaagccagacagccagggtcacagccactgtgacgtccaccctcggagtcctctgtctgccactctgaacacagggtagaagcagttattgcaaaacaaatgccactgtcctgtccaaaagtgagatgggtttggttccctacaaaacctcccgcagtgcatgctaggaaattttggaggaaataccaaacgtcctttcattcatggctgagagcctaatcaagggaaaactctattggccaaaaatgaaaaggagctgcaaagcaggcactaagctgacacagatgctacagtggccctggggagatttgctaggccaggtaaccaagacacttccatttcaacggccatattaggatggggaaccaggccttgttctgtgaaaggttagcactgacacccctgaatgaagcccgtaattgtgaagggctctactcacagtggaactggtggattaagagggaaaa

SEQ ID NO: 61301 - DNA, 1896 bp, Homo sapiens
ctcactgcaaccttggcctcccgggttcaagcgattcccctgcctcagcctcccgcatagctggggttacagacacctaccaccattggtcctcccatactctgaccaactggctataaatcaagggttcccacggcccctccccaggttcagtaatttgctgtagggctcacaaaactcaggggtacacttacattgaccagttcattagaaggctgcaactggacagtcagatgaagaagtacatagggtgaggtctgcaggtccctatggcaggggcttctgtccccagggagtcaggtgcaccgccctcctgacacgtggatgtgctctccaaacccctccgtttagggttttcatggagtttccattatgtacatgggcatgattaacttactgaccatcagtacttaactcaaccccagccctctcctctccctggaggtcaggtaggactgaaggttccagccctccaatcacatgggggcctcctctgcagcccccagcctgcagctacctaggggcttcagccaccagtcctcttgttaacagaaattcagctatggctgaaaggggcgtgttataaatgttaatgtaaaaactaaactctgtagaatgttttgcagggatttattctgagccaatatgagtgaccacagccaggagcaaacacaaacccaggaagctttgagtaactgtcccaaggtagtcggattacagtttggtttaacacatttcagggaggcaggagttaccggcgaagacataaatcaacacatggaaggtataggttggcacagcctggaaaggcaggatattttcaagcggtgtcagggtggggatgttataaggcacaggagcattcggagattctttaatttgcagttggctgaaggaacaaaactttgtctaaaaacagagttagcagaaaggaatgtttaaggtaagatgaggatgctgtgtcagagtcagccaccgtataccaggtcaaaaatgacctagttagcaagattgatggcctgcaggagtgacctcatccttgttttgcaagaccttcggtcctgtttgtaatttggtctgttattgcacaaacagtctgctcttcgaatcttatgatctctgttttaacattagcactagtcggttctatctaaactgcaaaagggagaggtttgaaggaggtccgtcccctcctggcaggaaactcagtttttagtttctctggggtctccttggccaagaagaggtctgttcagtcagttgaggggcttgggattttacatttagtttacgtgaatatcaaaagatgctcttctcatccctatcattcaggaaattccaagggttttagatgctcttgggtcaggagccagaatgaagaccaaatatgtgatttcttttctgggaagtatttatacactcctccctcggtatctgtaaaccattggttgcagaacctcccatagttaccaaaatccacagatgctcacgtctggtaaaagaaaaactttaggccgggcgtggtggctcatgcctgtaatcccagcattttgggaggctgaggctggcggatcacaaggtcaggagttcaacctggccaagagaccagcctggccaatatggtgaaaccctgtctctactaaaaatacaaaaattaaccgggcatggttgcgggtgcctgtaatcccagctacttgggaggctgaggcaggagaattgcttgaacccaggaggcggaggttgcagtgagccaaagattgtgccattgcactccagcctggttgacagagtgagactctgactcaaaaaagaaaagaaaagaaaagaaaaactttaggtaaattaaatttaaaaagaaaaactttaggcaaattaaatttatcagtataggctggg

SEQ ID NO: 61302 - DNA, 4927 bp, Homo sapiens
actgggcccagaacaaagacagcacttgactcatatacacacctttgaacgggagtgggctagtttgaaacaagcttacagtggcatgaaagcaaggatacagagacagaacataggcagttaatcaaattgtgacaggtgcataacccagggttacatgtaattcttgctatgcagtccagatggctgttatctaggcttgcttaaaagagccttgcacaggcttatctcataaccttcgctatggggcccagaaggccgcagcccaggcctgctcaggcatgttgtataaccttcactgtgctgcttagataaaacagaatacttgaagtttctagttacagaaaacaagaatctataaattcataaaacttgcagagcaaggtacaatcacatggagggggttggggttcgagggggaactttttcttatccttatgttgagggagtgctgggagagtctccagagcacactcctttgagcctctgcttctttgatgatgttatcaagacttcgtctgggtctgggctttgtctgttactgcctttgggatgagtcagcctaatatagaaagcttatttttctctttttaaaattttattattctttctttccttaatttcctgcctcacagtgagctatgatcacaccactgcactccagcctgggtgacacagcaaggccctgtccaaaaaaaaaaaaaaaaaaaaatctgtgaagtgagaaagatgaaggcccatgggaggaagggggtggggaggccagaacctgaggaccttctttttaagtagggtggccccaagctggctttgcccggcttcccaggttcatgcccactgtcacgtgaatgggcactctctcacttccgaaggtgaccaggtttggatggtgagttttgtcatcactctgctcttaggccatggtgtgaagtcatgactttatcaagtagagagggcttaagtggaggagggatgggtgatttacattttataaagtgccccgggggctggagggagctagagtgaaggcctgggtatgagcgactccagggggacagggaggggagtacccgtcacttaggacctcagtctgaagttccctggcaggtgtccccttcacctgcccttgagcctgggggcctccctgcctggagaggccccagcaacccagccaagcctgaccttgagcaaggcctggaggctggatctgaaatggagaaattccagcatttctcaggttggccaagaagagatcaggttaccttctggtccaaagacagaaagggctccctttggaagggggagcagagccacagcctgatctagggacccagctggtggtcaggcccagtatgggtgacaggccaagcaggcctggcagttccctgggccacccttgagccaggcctgggaccaggagctggcggggctgacccggcaccaggacccccaggagcaaaggcagggcccagacaagaggagtgcaggaggtaagggacttggagcgtgccaggcctagactcccgggatccctgtctcggtggcagtgtggcaggccaggtctcactaacgcaggcctccattacaactgtcccagcactgactgagtagctagattaaacattaaaagctgatagagccagtgcccttatacaaaggctggaaagtaacaaagagcccaccgagagttttgcctaggccttccctgggccttaaagcaggacaaaataacaaattaattcttatcaggacccttttagggttaaacgagtttttttgtgggtctgaagaagctccccacgcctccagaaacaagtttattgagggtctgaaggcactccccaaacctcctgatttagcaggagacaagataaaggtaatccccccagcatctggacccatttagattcagtaaccttattgaggctccagaggaaggtcttcaggactcacagatgaccgtaagttcatcactaatgtcttcagatgcatgcacacttacacgtagacataccgcttagaaggtatgtaagttctggaaaactgtaattttgagttggtccggtgatcatttccaggcctttctccctgtaaccagttgcagaaaataaaaacgctcttcctcctcagttcatctgcatctcgtcattgggccccgagaaatagccgccccactctcagtttggtccgagaacagcgcgacagtggagttggagccgccccgggcgggattaagccgggtggaagcaagtccaggagacgcccgcccctcccccgcgccacaggactcgccagccccgccacgccctgacccctcgtctctcctcccctcccctcctcctcttttctcctctcttgccctcccccatcccctccctcctctcccctccctgcccctgcccggacagtcctggtacgccgttccctgcgctcccaggccccttccccttcctccttcccctccccttcctccctctcctcccctccccgccgcgtcccggacactgcgggctggtcccgcgccccgccagggctgccggggtgtgctgctggggagcgtgacgtgggcaggaccacgctggacacgcagttcgcgtgcggccgctccccgagcagtgcgcggcgtgggcggaggagcggctccgcgaggagatcgaggcaaacgcggcgcccgcgctgctggaaatcgtggacgcggcggacgccgagcacctggtcacgctccaggacctggacatccgccacggcgacggcttcgcggtgctccggggcgtgtgcagcgaggcctcgttcccggccgtgaggccgctgcgcgagcgcctgcgcgggctgtgggaacccggggccgtcctgctggtgctggtgggcacccaggccgaccgggactccgagcgccaggtgctgatggcgcgggcccgcgaggggccctgcccgttcccgggggtcacggccaagatccagcggaggatggaccaggtgttcacgctggcggtgcgcgagacggaggccctgatcccgcccgaggtgcctccccgccaatgcccagcacacgaggctgtcggaaaggttcattggctaatttgccacagttggttttcaatatgtccatcccttttcctgatttccagagctcagtatttctacccagtgcctatttatttatttatttatttattgagacagagtctcactctgtcgcccaggctggagtgcagtggcgcagtgtcggctcactgcaacctctgcctcccgggttcaagcgattctcctgcctcagcctcccgagtagctgggattacaggcgcctgctaccagacgcagctgatttttgtattttaagtacagctggggtttcatcatgttggtcaggctggtctcaaactcctgacctcgtgatccgcccgcctcagcctcctaaagtgctgggattacaggcgtgagccaccttgtccggccctgaagcttatagtttttaatattctataattcctgaagttttcatagtctgcctctttgcttcttatttttcaggaaacaagttagtaactgaggggaaaagcaccacgatctcccggtgcgttgtttgcaagagtgcttcagcagtcagtgtctttcttgttgtttgccagataaagatattttgtctgcatatctgcatagcttaacagtaactcaggtgctgacgtagaagtaaagcatgtgagaatgcttttggatcatacacttttcacataataacaaatttttctcgaattggtttaacagtatcgttttatgctttttaaaatgtatctttgatatgagttgtttgtcatttgcacaagttaatgattttacctccccagctgcaacatatttttcaaatttaggaacccaacttaaccatctgaacatccttcttaaaaaaaataaagaagaaagctcacaactatgcctgtgatctgaactagttgattttgttaacggaatgttatttatatagtgatggttagagaaggctctggtcatttctatttatattgtatgtgatgttttactagaaaaacaagttttaccttaacatgaaaaaaatacattttagaacctaatggcaagttcacctccgaagagggctaggcggggactgtaccctgggttttatctcttcctctccctcctaggacaggttgggggttgggatgcttacttttgaagctggaaacccggctgactcactcccctcctgacctctgtcttctggggtccctcctggcaaagcccttattcatctctctaagggggcatatcaaatgtggggaggggccagtgatgggtggggagcatcttcctggtctcagctgtcgttgtccagagctgccccctcctcctgctggagcagaggagaaacacaagtttgttcactgtctggattgggctgtgcagagaaagcccagggagaagaaacagcctcctgttcccaccaccacgacagcagagagctgggcccccatgactgcaagctgggaattcccttagcccccaccccaacagtcctgcccttctgactctccacctgcttgtgctgaggagggcctctggagaggttttgtgtccttggatcccagtccttctggatatcaggcctcgatccaagaaaacattcccaaatagccgtttctgcccttagattccctggaggaactcagacactcccactcagattcaagttttcagcttagagtgcagtgggtttctggctgactagtcaatgtcagggatggccagagccacatggccagctcctgtgaccttgctttctgagtgagcatggacgcacacaggcacacatgaaattaaagccctacatgctggattgtcctgcttttcctgtgtgtcaaatttctagactttgtatgtcacacacacattgtctcagtccctccagagg

SEQ ID NO: 61303 - DNA, 978 bp, Homo sapiens
tcactaagtataatagtgaaacaaaccaattcccctctatcaccccttaactcccaaactcctatattctggctgtgggaaaaacaccaccatatattaatcactgaataaagattatatcaaaaccgtaagatgggggcctatccattcagggtggtatctcccaactggtgctaagataagtctttggtagcccatccaaccattctatcaggccagctgctcttgggtgattgaacaaaaagcaggatcattgaattccatggccatgagcctaatgcttcacctcttttgcaatgaaatcaattccttgatcaaagaaatgttttatgggatatgatgaaggtccacagggcattctataattctgtggatggtggtgctggcaaaagcattacacgtagagacagcaaatctatatccagaataaattccagtgaggacaaattgcttttccttccgtgatggaagggatctaatgtaatcaagtttccaccaagtggctaattattctcccaggaaatgatgccatatatcagggtctctgttattggttaaatattcaacagtgaagataaccaggtcggacttgtgaggcaaagtccatgctgaggccatgcacagcctcttccctgcctccttggtcactctgtacacaggcccattgagcaaccattctgatggctggggaaagaggctgactgcaatgcacagaaaagactgtcttgcccacctgattattgacagccccctctagaagatgcttttggatgagcattcacatgtgacaaggtaccctcaaagtctgcctatccagagaggtccgtcctttcccagaccacctcaataccaatctcccaacctgatttcttccaagtctctgatgatctagccaaaccattagcctctatactagtccataagccagtatagagccatacttctggccatcttccagtccaggcaaagtataacaaa

SEQ ID NO: 61304 - DNA, 3189 bp, Homo sapiens
cactgtgccagtccctcttaaatatatttgattgatgtctaatgtctccctaaaaatatataaaaccaagctatatgtgccccgaccaccttgtgcacatgttctcaggacctcctgagggctatgctatgggccatggtcactcatatttggcttagaataaaccctgtaacatatttcacagaatttgactcttttcattgacatggataaggatcacattgtacaatttgtggtaacttttaggaagtctagacagtcagctagcctggaaactacagggaaggaaagaaaaagcctttgaacagtgaaccctaggcacagctgctggcatcattgttctctgggcctgataagtttgcaggtctcacattcctcaggctgctctgagccacttctctttcttatttcctcctttggatcaagatcttgctctctgaaagtattgatgatcaatattttattttattttatttattttttggaaacaaatgctcggtgcctcaaagaagaaccagcactgagactaaggatctctcagcaaggcaaatttacttcggcagaagggtatgtgcatctcacatgtgaagtaatggcaaaagcacacagaacaaaggaaagcaggggtttttattatgtctaacacagcttctgcttctgtgtctttcccctattggctagggttggaccacacagtctaaactagtcccagttggctaaacatttaaactttcttagataaggtaggcacgtaagggaggtgagaagggagagaaggggggtcatttacggagggactaggagggtaacctattccctaataaggaaagaaatgtggactggggttgtagcaagttcaggcatgcctaggcatattcagacaagctgcggtgcagcacaggcaagggggtatttggaattgtaggatagagaatgaggaaactggataagctgtttgaagaggaaacctaactgcatctaacattttatttatttattgagacagagtctcactctgttgcccaggcttgagtgcagtggtgtgatctttgctcactgcaacctgtttccagggtgcaagcaattctaatgtctcagcctccggagcagctaggactacaggcatatgccaccatgcctgactaatttttgtatttttggtagagatagggtttcaacatgttgcctaggctggccttgaactaactcctggcctcaagtgatccaccctccttggcctcccaacatgctgggattataggcgtgagcccctgcacctagctgatcaacattttaagtgtaaatttgcccagcatcactgggaaggctcattcccatggggggggggggggtaagaggagaggtgctctggctcatgaactcggtgaggtctccaggcagaagatattggcagcacaacgggacagagcagcgggatcccaggccgcctgcttggagagaagctgtggtgtcgcggatcattcctaagtgttctagctatcatgattttcgtttttattcttgactttagacatctagaaatacaaagcctaatcaagtgaagaataaaaaatatgatgcaaataaaatcccaatctggaaagcattcctattcctaaaggtaatcaatcatgtaaatcacgtgaggggtctgtttttctaccatcttgcagccattttgccttttttttttttttttttttttgagacagagcatcactctgttgctcaggctggagtgcactggcgtgatctcagctcactgcaacctctgcctcctgggctctagtgatactcctgcctcagcctcccaagttgctgggattacagatgtgtaccaccatacttggcaaattttttttattttttatttttttttatttttagtagagatggtgtttcgccattttggccaggctggtctcgaacacctgacctcaagggatccaccagccttggcctcccaaagtgctgggattacaggtgtgagccaccgcacccagcccatttaactttttgagtgatttctaattaatttcccacttctcgtcctggtctgaagaataaggtaactggctgcagatcagcttcagctggggatctccaggtggaaggtacccatgcatgcaggactgcctttttatttattttttttaattttacgttaagttctgggatacacatgcagaacgtgcaggtttgtcgcatagtatacatgtgccgtggtggtttgctgcacctatcaacccagcatctaggttttaagccccacatgtattaggtatttgtcctagtgctctccctccccttgccctttaccccctaacagggccacggtgtgtgtttttcccctccctgtgtccttgtgttcttattgttcagctcccacttatgagtgagaacatgcggtgtttggttttctgttcctgtgttagtttgctgagaatgatgccttccagcttcatccatgtccctgcaaaggacatgacctcattcttttttatggctgcgaggactgcctttttaaaatgagaaatgtgaatgcatgagtcagtgcctttgagtttagctgcacaaggaattggtaaacaatccccaacatgggcccttctggtgagctggagggagtcccttatttgatagaaagagtccttgatttgatgtcttttccaagaatcaaaacctcctagttgcaggccatgacctctgatgtcttcgtctcctgggtgctgactcttcaaagaatctttaatttagagtttttagtgagaagctgtataaggccttgcaatcatgaagaatgtcacctttagggtgagctggttcactgggctccttcctccaggcacatggggcttcctgcagttatttcaaagggagaaagctgaggttttccaaacaggtagaaggtaatttaagcaataccaatggaagagccttaggcaagacaaggttcaaagtttctgtaaactttgccatttgttcttgtatccattgtggcaggaaaataaggtctggaggcagggaacataaggccaattcacacttcagctataacaggaaatatcctctccatatggcatcactttacgtcatcctcttcatttacacagggtgtaccccaagtagagggtatttaaactcacataaactcacaaaaactctgtaacagggcctttgagcccctat

SEQ ID NO: 61305 - DNA, 1401 bp, Homo sapiens
tattaggatattcatcgtctcaaatgtttgtcacttttttttttgagatggagtcttgctctgtcacccaggctggagtgcggtggcacgatctcagctactgcaacctctgcctcccagattcaagtgattcccctgcctcagtttcccaagtagctggaactacaggtgcgcgccaccatgcccagctaatttttgtgtttttagtggagacaggggtctcgccgcattggccagactggtctcaaacacttgacctcaagtgatccacccgccttggcctcccaaagtgctgggattataggtgtgagccatgtggaggaaaagttaaatattaaatttgaactccattgaacttgaacacaaggaatggttatgtgccagtaaatagcctctgggcatctgcctgggagctaataacctatactgattgttctggtaaggtacattttctaccttaaggcaaacaaacaacagaatctacagaataggctaaccttcctgtattccctgagtccagtcatgaagggccctcgtgcctggggctcaggccaaaaaaggaatactacaaaagggtgagggtcccagaccccgccgaagctccgcaagaactctcctcgtctgtgcgcggacgggcggccgactctggagcccaggctgctgcttccctgtctggtgatgcttcctccatagtccagtgggtgtaaatatatacagatatatcttttcttgtccctttcccactgtgatttgcttattatatttgtgttgccatatacttgggatgaaggctgtttgcccttaaaagtatcgtgtgtgccttttcttcaccccccgggcatttcccacacagaaacttttggtatcaggaacaggattcgaaaacgaaagtatgccactttccagtcgcagggactgggctggaggctcggggacttcccacatcccgggatgggaacttccccagttctccccctcggcgactgaatagtccaggggaactggcttttgtgaaaattgggaatctaagttagtgcattttgaactgttggctgtgtgtgaggtgctgcaggaaattctagtttgataaggggatgccgagggaatttcctggcatggatgctgcttgcttactgcttataagttaatgtgtcaagatagggaccggttgctacaaaagaaatgtaagctggaaaaggaaaatgctaatttgacttccagactggccctggcccaatgccaggcctatgtcttgactgatcaagctcaaagctagtaatgcttcctccatagtctggtgggtgtaaatatatatagacatagctcttcttctccctttcccactgcgatttgcttattatgtctgtattgccatatacttggaataaaggtgtttaccct

SEQ ID NO: 61306 - DNA, 1272 bp, Homo sapiens
gaatctcagcaaccctgaggccgaatcgctcctgctgttacttgatttggttgtgtaaaccaaaactaaaattctaagccacccgacggactgaatggacccacggacccccttcttggccaaagggactcaaagaaacctgaaaaattagttcagaccatgatgggaagggaggggtcagacacgcctcgttataagccctcctgcctttggagttcaggcacagctgaccagcattacattaaaacggagaccttaagatggacaaacagactctttgcagcaataagataccaaaattccaacctgactctaatatagtgtcacatgacagatagcagaccctgaaggaaatcaaagtatttaccccaaaatatgtttttgacatggtcctgcacagctgcctcttgtgggggaaatttgcctttttagagaaactctttcccttactgggtcttttccagagagcctgataatctttgaaaggtctcaacaggaagtatttgccatctattgcctctaagggcagccacctatgagactcatctacataataaaaaccttggtcttcacaaccccataccttatctgaacccagacattcctttctactgattccaggtctttaggcaataacttaactctttcaaccaattgccaatcagagcctttgaagccacctgtgatccataagtcccctgcttcaaattgtcctggctctccgacccaaccactgtatacctcatatgtattgaccgatgtcttctatctccctgaaactgaaacgtgtaaggccaagctgtagaccaaccccttggggcacgtgttctcaggagttcctgaggctgactcacaggtcatggctctcacatttggctctgaacaaatctcttcaaatatttcacagaatttggctttttctgtcaacagtggtgtgagcaattaagttcaaagggtagcaacaactctatccccttcagtttctctgaaacctcttttgcttctgtaataggaaatgtttatttgaaaacgcaaggaatgacgcacttgatgttgtgtatgttggagcaagctgatggcataaaatgaggagtggaggactatgtcccagggtctactagaatctgtgccctctaacctggaggaagattttcaggacccatacttggggtcgttctgtctttacagaacgtgtcccaggcgtgtatggaaacacactggaaacagagatcacctgtgtttaggctctgactatatagctagtcatgaaat

SEQ ID NO: 61307 - DNA, 493 bp, Homo sapiens
actctgtctcaaaaaaaaaaaagtatttgtgtatctaaacagatacaaacatagacaaggtacagtaaaagtatggcataaaaagtaaaaaatgacacacaggtttagggcacttaccatgaatggagcttgcaggactggaagtggctctgggtgagtcacaagtgggtggtgagtgaatgtgaaggcctaggacattactggccactactgtagactttgtaaacactgacacttaggccacactaagttcataaaaaatatttttctttctttgataacaaattagccttaacttactgtaatggtttaactttatataccttttactttttaaaaaacatttggactcttgtaataacacttagcttaaaacacacattgtacacctgtataaaaatattttctttcctttttttttttttttttaatttttgagacagagtttctgtcttgttgcccaggctgaagtgcaatggcgtgatctcggctc

SEQ ID NO: 61308 - DNA, 1917 bp, Homo sapiens
aaacatgtgaggccaggaaacagaacagcaagtggaacctacaagtgtgccctataggtcctgagagtgagagcccccaggtggtgagtggggcagctgggcagccaggggtcagacgtctgtttacacacagacacacacgacaacacgcacacaaggaaccgcccctcctgctccgttctctggcatgcacggccttgatatctgtttttcaggttgactggagattgttggccacatttgccaagaaaagataagcaatcctcaccacgggctcacccatggtgcacagaactcccagcccggagatccagccacttctgagaacagaatcaacagccacttagaaggctcagcctaggctgggcatagtgggtcatgcctgtaatcccaatactttgggaggcagaggatcacttgagcccaggagttcaagaccagcctgggcaacatggtgaaagcccctctctacaaaaaaaaaaaaaaagccaggcatgatggcctgcacctgtggtcccagctactcgggagggggagatgggaggatcgcttgagcccaggaggtcaaggctgcagtgagccgagatcaaactgaaccactgcactccagcccgggaaacaggaaaataccctgcctcaaaaaaaaaaaaaaaaaaaaaaaagaagaagaagagaagaaaagaaaaagaaaatgaaaatgaaaaaggaaaagaaggcccagtctaggtgcaacttaagcccaccagcatccttcgaaccatagcagatcaaattaaaacaagccattggcccaattctaactttcttatgggcaaaatggaaaaacgtctggcctgagaaggaaatgccatgttactcctagggtgggctgattaagtcactcttcccatccggggccagagcaggatccgtcaggactcagcttgttgtgaaatgaggcctttcctggaaatgctgttcatagaacgcgacgaagcagccgtgacataagagcttggcattttgctgtgtacaaatccagacctttcaacaggatgttggggtggccagcctgctctttggaaacacggggctggcagaggctgcccctgcccctcgtccttggcccagcactatattgtctttgtgtcatggacagagaccaacacttctcctacgtcccctcctacttggagttaatcccagcccagccagtgcaggggagacaggtgtcgccacagaatcacagtggctccactctctgccctcctgagcctctgggcagtcccacactgccaggtcatctgcccaggagccttcccagaccccgggccccctctccttcatctgtatccaggcacgtgcctcgtgacagaagccttcccagaccccggccccctctccttcatctgcatccaggcatcagcctcgtgacatctctttgggtttcaggctaatattaaatacactaatcatggtgtggaaagagtttctgggtcaacaataaccaaaggcacacagagacaaggattcgaggcaggcaccgcgctgtgtccgtctgtcctccacctctccacccctgggtacttcaggggccccctcacagactacggggtcctagggggcaggacagtggccagtttacctgggatttcccagcagggcctggcctgaggctgatggcgctcagagactgttcgggatgagcaagccggtgcctccctgtacctctacatctgctcagctccccgccgccagcctgactggggcctccttccttgggctggcagactgctggcctcccctagtccccccacgggcctggcaaagggcagcctgcccagagcactgtccccagggccaccactcagagccctggggtgctcacttccaccatggtttttgcttgtttgttttgtttcgtttgagacagagtct

SEQ ID NO: 61309 - DNA, 795 bp, Homo sapiens
aagaaaaaaaaaaagttgagaggtgggtgtcacagaggaggaccactgcccctcacagtgtacaatatctgagtccatttgagagctcacagctcagaaacacaaggctctcagtccatgcagagttgatcttggtggggggtgggagggaggggacactcattcacattcaacagagtcacagccaatgtgtaaacaaccagaaggccagtttaccaatctacctttccagcagctattcctgtcatcagggcatgcactgaggtgtgcaattcatgcactcattcagcaaggttttgacaagcaccaagtgtccattagtgcacggactgtgagcacctgactggggaaaataatgcagccaaatgaggtggagatccagaaacgggaagtggaattgtgcaatgagcttggcgtcacacaagctggagttcaaacgctgtccatcatttattagggaggcgactttggggaaaattgcttaaccttcctgagtctctttcctcacctgtaaaatgggtataacaacatctccttacatgattattaaagaatgggattacatatgtaaaatgcctagttttgtttgtttttgtatttatctggagaggccatgccacataatttttaagggaacaggctttgggatcagacagagctgtctttaaatcctagctctgccacttactaggtacatgatttgggtaagttgcttaatttttttccactaagccttggttcgctcatttgtaaaatggaaatacgaattcctcatagggcctgggaaataagata

SEQ ID NO: 61310 - DNA, 3519 bp, Homo sapiens
tccaacagagtttctaaaataacatcatttttgtgctgccaagcaaaaagtcagatctgtttcaatactgctaagtcatgctccacagtgaaacagcagcagcatgtctgggatccccttttctagtttgtctgatgggaaccctggtactcacaaggcactgtgcacttggcttaacaactatacaccaaggtacacactgcgggattataaaagtccctgccctaaaggacacaaatcacctctcaattctggattgtgcctttatttcttcctaccaacactgccaatttttaagttgtttataaagcttttagttatggaagcacgatcttggattttgatataaaaatcaacatagctgccaattctaacctcagtgcaaatgcaactggtccaaaacaaagggcagccccttatctacctcatcctgtcctcagcaacatttctcttttccagatcgggaaacctgcacggccgctcaggacttctcgatgactgcaccttagagaccagagtgcaggttagcggggctctcgctccatcagtcaagtgaggtcttcaaacttcagggtgaactatggatgtgtttttaagactcaagttttcacaaaaaaaatccaagtttcagaaagaatgggagagtttcaacagaactaaaatatgagagcctctctctaaataataaaaattttctttttttttttttttggagacagtctcgctctgttgtccaggctggagtgcagtggtgtgatctcggctcactgtaacctgtgcctcccgggttcaaggattctcctgcctcagcctcccgagtagctgggattacaagcgagccaccacgcccagctaattttttgtatttttagtagagacagggttccaccatattggccaggctggtctcaaattcccgacctcaggtgatccgcccacctcagcctcccaaagtgctgggattacagacgtgagccaccgcgaccggcctaaataatagtaattttcaacggaatacattggaatctcattataaatgcctgctctgggctacgatttgcttatcaaagaattcacaagtcataaactagagggggtggactcgacgtgatgcccactaggagaaaggtgacaagagaagcacgaaggatagcgcttttcaaccctgggagagcagggaggccttcaccagaaggtgggaacccaccacgaagcgccttcaggaggccccaggattccaaaccaattaagggcctcctcttccgaaaacgggaggcgacgcgctgagctaagcgcgcaggctgggttgcgggccgacaccgaggcggcgcggcctcgcgaccgccctgggcggtcactggcgagtcacggactcgttccgccagcggccaatccaccccgagtccgaaacagaagacgtccctgggatgaaagacccaggcctggggcttaaggtggaaaaacaactcattcctcgaggcccggagtcgggcgtcccgggagaacgggaaagggagatgagcgcccgctgcggggagaacgcggtcgggttcctctccccgaaggtggcagccgcaaaaacacggcctcgaaagcagtttcgaggacgatggctcctgcgtcccgggagtcgccatgacgccgcggcctgtcccagacccggcgagggaggggaccaaccaccatctccccctcaaggcccaaaccgacaaagaacggcccccggtaccccggccccgccaccagggccactccgggtctcgcgagacccaagggctgcgccgcgaagacctctgggaaaggcggggggaggggagaggaaggaagcgagaccggggctggaggcgggccgaggccgcgagttgagcctcaggaagcagaaggggcgcggaaagatgcgattgacgtcgcaagcgaaccaatgacgagcgagctgtggcaggcctccagccaatgggcagtgaggcctgacgcggggggcggacgctggggccgagggtagcttgagcgcggcggcggcgttgttcagtcagagcgagaacattccagaggtgagtccggtgaaggggcggccccctgcccggtgcttcccgccccctcgacccctcgggccgctggctggcggggaaggtgcactccccgaccgcccacggctcacggcgccgtctctccgcgccaggtcgcccagctccggcgctgacgggtgtggaccgcggacgtcgctgggacagcccctccccgctgctcggcggcggcacctggcccggccgctcctcgctgcgcttcgcctccgcctcctcggactcggactcgggtttatatcgcgcctcacttcatcccagtcccgggcgagcagcgttgggtttatgtctttatttgacgaaaacggtgagtcgcgggcgcggcgggccaggagatggcggccgcacaagatggcggcggccgccgcgtgaccccgccgcggcgtgtggcgcagtttgggcggacggcgggcgggcgcgggcccgggcgccggccgccccctccccgcgcgctccccggcccggcctcgccccctccccggcatggcgggagcgcgtcgcgcgtgcccgccgctcgggctgactcaggcttcagctgctgcatttgtgagtcatcgcgcgctctggggcgggggcggcccgatcccggcacccctcggccgtgtgtcgcttcccggctgtgcaccctccggggccgccggctctcgggggacgcgctggggatggggccagacgccccggtcgcgcgcccccctccttcgcggagctgcccggttcgccagcccccgcggaaacgcctcggagcgcggtagccatggggaccagggcgaaggttaaccgagtatttgaatagcgaggaaaagggaggccggggcgagcctggcgttcgctcgcgctctcttgcttaatggcaaattgtgggcgagcgctgcgtttaaggaagtgctgctttgaagtaagccatggttgccgaagcaacgattagttgtagagaacagttccctaggttgcccttaaaaatgaagacgaacgggggtgtgcctgagaagtttgcttatccaggcggggtgggcggcggagagggctcgggttcgttcttcagcacttccaggatggccgcagaggcaaacctgctgattgccctcggtctgatggaatctcacggcggctgaggcagcacagcttgtgttttcttgtcaggcatttccctaccagtcacagcttagtcgaaatggaggcctttttatgttcccgcagattgtactgtgttacatgagaatggctgtttgcatgtgatctcagatgctttttaaggtggagttaagcagaagcataactaggatgtaaaaaggaggcgtttccatccagcgatgatgttaaacctggggggatttttgtgtgttctttccctttttctttcagagctgttgcgcagccattggtacctgtattggggaaacatagcatacaagcaagaagcttacagcctcagtggcga

SEQ ID NO: 61311 - DNA, 2358 bp, Homo sapiens
caagagcccggcgccttcccgtagccccggccctgtcattaattaatgctggggctccattcggtgcagcgcagtcccagggatgcaaccgcaacttttgcgcacaataggctctcgatctgtaatccagccaacccaggcctgtagtgtgtaaatgccaactcagcgggagggctctggctgtcgcccagagccgtttctcggctctttcgcggttgccggcgcgctcgggacaggaggaacccgcagcccgcgggagtcagcggagacccgaccagcactatccagccctctgcaccgcccccgcggcgaggtctggaccaagtcgcccctagcaacaacagccgggccggctttctcaggccatgctgattggcgggactccgggtggcggcctgtcgtcacttccggcagccggaggcagcagaggaagccgaggggcggccatcttggctccgtgaggctctgaggtgccggggtgcggcggcggcagcggcggccagcagggcggaggctgaggcagcaagctcgctagagagggagaagcagtcgggcgcaggcgcctcctccgcagcccgctccatggtcggcgcccacagcccgcggcggcctgtcttgcgctccacttccttcacatcctcctccgcctcctcgttttcaggcgccgccggcggcgctgtgtggaggcccgcgagctgaaattcgcggtgcgacgggagggagtggagaaggaggtgagggggcccaggatcgcggggcgccctgaggcaaggggacgccggcgggccgaagcgcagcccgccgcccgcaggctcggctccgccactgccgccctcccggtctcctcgcctcggccgccgaggcagggagagaatgagccccgggacccgccgggggacggcccgggccaggcccgggatctagacggccgtagggggaagggagccgccctccccacggcgccttttcggaactgccgtggactcgaggacgctggtcgccggcctcctagggctgtgctgttttgttttgaccctcgcattgtgcagaattaaagtgcagtaaaatgtccactaggaccccattgccaacggtgaatgaacgagacactgaaaacgtaagtaacctgggcgttgtagttggcggaccttcggggtggcattcgtgctcctcgggcagtgccttgcagtcgggtgttccccccagccgaacgctctggaaatagagggcaggccgtagtcacccaggaggcagccaggtcggaccgtttcctccagaagtctgccgtgtcccgctgttcgcgggcgggtctgcgaagtacatcgattatgccggcagtctagtcggttaataaagcccaggagttgcagcgttacggatcggtgctttgagaggccaggttgccgcgcaatggattgtgcaaacgtgtgtgtcagatcactgcagtggtcagtgcttattttagccgaactctgcttttaacttggtcaggcagttcttgagagactgtcacattaataacatatgttaccggtgctgattaagagtaatcgattgggtcaagtgggcggtctcgttctttaagatggtctggaactaaatttaatcacagtcactaagtgtccactgagggatctttgcggtccccttaggaattccaaaacactagcgcgcagcctttattaaggcagtttcctttccatacaaatcttttttgaaggagttggttaaacattttgaaaagcagatgtatagtgaagctctgctctgccactcactgcctagctgagggacacccgctgggggcttcgctgtcctccttcctaaaaagagattggcttagatgagctcttaggtccctttcagcgctcacaggctatggttttataaaaggaacctttgattttgttcatgtgaaactacaaaatgccaggaacagcattgctagagaatgagaacttgtagtagaaattccattgaagaaacgtttgactctgttcgttttctaactctgttctcctctaacactgggttcaaaagtgtttcaatctagttgttgactatattctgtaaaacatctagtaaataatttgtaaagaaacttcactggcctttcattaaaagtgttatgaggtaattgctggcacgaaatgtcttctcttagggaatgcttccttgctttgagtgttttcatgctttcagtaatgtcctgagatgttgtggcctagtggagttaatgctttcattttgatcttcaaaaatgccgcttgtttgctggatagctgtttgataatttaatccgtaaacgtaaaccatagcctaaagcatccctgtagcatattagtatacaatatttaa

SEQ ID NO: 61312 - DNA, 1978 bp, Homo sapiens
caggctaaaccctaggctgggtaggggggtctctgttcctctccaagctctggtcctgagagctaagagctggaggaagaaaatccgtgtcccctgcccccgctcccctgcacacacactccacagaggagccagctgggaatggtgttgctgagacagaacgccactcccgcttccctgttctgcccatcctccagcagcacctcctccagtctcctgcccaggctgctcaccagacccaaaagtgggcccaagtcatccagttctcattatgccttggttcgcaggaggggacacaggacccctactccctcctagaagcagctctgcactcaggacaacgtgcccccgtcgggggaggcagggcctgggcggaaggccacttctgcagacttttccaggcccccatctgctgcacagagctctggctgaccctagcccaagccttttagaaccgccccttgacctgcgattccttttctggaattcattttagggcccagtcaggggtgttcccagagcagtctgcaataacaaaatgtctatggcgaagtgtcctcatagaggactgggcagtgagccacgggccagccctctggtgaacccccaggggccgtcaaaggggtccgggacagcagtgacagccaggccttggctcctgccgcccttcaaatgtgcctgggtgcgacggcaacccgcggccggcggggcggggggaccttttgtttgtttgttattatttgtagagatggtgggggtctcactacgtttcccgggctggtctcgaactcttcagctcagaagaacctcccgcctcggcctcccaaagcgcgggatcacaggcgagagccaccgcgccggccggccgccatatggattttgtccagtctttcgatcttccagcgaccagcaaatgtaaacagagcagctcacatgagggaagaagtcgcccaggaaacgtcctctgggaggggcgggaagggcagcctggcgctcccaggatcccgtgcgcggagggggggagggggaggcggaggcggggcgcgacgtcatcagcgggcgcggagccggaagtgttgtggccgccgccgccgcgcgtcgcggaggcacgtgtggagccccggcagcaggagcgtcgcaggtgagactccgcggggtacagggtggcagggcgcgggtgagggtgacccgggccgggcacggcgcgcagggcctgtccctccagcctcgcatgggcggcccccgccggcccggcctggccccttgttgcctctgcatcggctgggcggtgtttgcgtggacggccagctccgcgtccccagccccttactggggagccctgaatcctctgtcataccctgccacctagcccccgtgggggagactggggtgaggaatcaagcctggcttggaggtgacctcattgaccatttgcctctcccccgccggtggacacctcgcaaaggcgcttcctcatctcacatcttgggaatgggagtcaagctcctggagaagggtgatgggagggtcgggtcctcactccgggaatccttgggaccgaactccgccattgccaagcctcagtcttttcatctctgatttaggctcatagtccctgtctcttgtcctagaccaagaaaggcttcagaggccaggccagagtgcagcgctattgggctccctgtcaggcagtggcagagactgaggctgagctagccacaccccgcccatgcccactgctgggatgtaggcctcgaagccttctacctagaccctaggccctcatcctgcctcctgacttgctcatgcctacacacacccctccccaggtccttggcccttgccagacattagcaccatgagcttcgtggcatacgaggagctgatcaaggagggtgacacggccatcctgtcactgggccatggtgcaatggtggcggtgcgtgtgcagcgtggggcacagacccagacccggcat

SEQ ID NO: 61313 - DNA, 855 bp, Homo sapiens
ggaagattcctcttcatgtcaaatcggtctgaagggcacactaggcacgcggtggccctgacactgcccctccctggtcctttccaacagcaccgaggacatggaggtcggcccaggctcaggaatcacagagctaactgctcatttcggcatcacaagcacgagcagacgaatttcagagacagaagccaacatccccacccctcatcttcagaggctccagcctgcctggcctctgtggctgggtggccagccaagggctctggaattggagaggccttgcttctctacagcagggtgtgacccgctctggcctgctggccctcctgccccagggaccgagtaggaggcacttttgattccacccgggctctcagggggatgaggtggcctcaggtgagagatcctgattggccaccccagagccccggtggaaggtgcagcagagagaaggtcctttggatccgataagcagaaggattttaaacactctctgaagctgtctgaagatctgagatttttccactcatttattcagcaagtattcgccgaatgcctattacatgccaggagctaaggacactatttccaaagaacagctcatccaaaaggcatgtgagtgcccattactgccaggacctgaggctgcatggatgaagagacagatcttgccttgaaaggcactgtggcctggcatgggagagacaggtgagccactgtgttaggagagctattaatagggtacaggaacagaagaaacgctccacggcccaagggatgggcagggagggcttcggatgagagcaccagaacccagggccatgaacagcaaagtcatctgatgaccttactctc

SEQ ID NO: 61314 - DNA, 574 bp, Homo sapiens
cctcaagattttaagagcattctaaaattatgatacagaaaagcaatcctacaactactgtggccaaaacgtggattccaatgacctgccttgagcccgcggttgccaggagttggacctgcagtagtatgggaagctcacggcctaaataccgactgccctctgaccccaccgtccagcgattctagaacatttctagtaggaaagacatagcaagggattttcatgattgggaaatactgagagacaagctgaagatttgttaagggctatgcttctgtcatcttttaggtatttaaggctactcctttagctagctactttgagctgtttaaagtgactatctccctacacagagttacacaatgagcatctctgaaagagaatattaccctggatttccaaagatgtactctaacaggatgaccaggcaaaaggtgacccgggggaggagtctgttataacactcggacccacatgttctcaaggcacttcagaactttgggaaatcattttgtaccggatcctcagaaagcatttatggaaatacacatcctttagaagagagatgctt

SEQ ID NO: 61315 - DNA, 2057 bp, Homo sapiens
aaccagcagggcacctttatgaaaggtgaaacagtagctcttgtaaccttccgaacactaacagtaccccgccccgccacacagctatgcctagtttccagaaactctaagcaaaagaaagaaccagaacaaaaaccagtggctctcagacatccccaaggtccccgcttcttcgtttctctccatccctttgtgcacttcccctccccacccttttagctcctcacacatcttccctcacagaagtctccctgaagagattaaaaccccacaggtaaagaagagcgaccgggacagcgctgaagggcaccaccttgggctttcgaggcccaacacctcctcagcccccaacatgctccactctctcaaaaaaaaacaacccgcgaaaacgtggtaactatgaataattcattcactcgcctcccactgggagtccacaatggcctaatgcacgtttcaagctcttggtttctatcaaacggctcgctcaaggtgggtaaccaatggaaacgcataatctatccccggcggatgtcctggaggccacggagggaaggcggcccgagctgcttcctccccgcctcgcccttccctcttggccctttacccaaaagaagtctgaattggatgcggtcttggcgtcccgtggctgaggtggcgaggtggaagatcagccctttacggggtgcggcaccggagctgggcccccagctgcatgcctcgcacccctcccgactaggtctgagcggggcagccggtgaaggggccgctactggctgcagcagccgctccgggcgtcttggcccgggtgccagggcgcgcctgcaggacgtgacctcacaatgggcgcgcgaggggagctcggcccggccgggggaagccgggggaggaggggaaccgaggcccggccggagacaccagagaccaggcccggccagccccggtcgcttccgaccccaggggcggggacagcgccgagaccgactctgccctgcctgatccgacaggccgcacggggctgggcgctggcgaaggggtggcccagcggggagccccgcgcggaggtggtgccccactcgtccccccgagagagggaaaaggctacaagccgcgcttcgctcacctgtcccgcccgcgccatcgcgcgatgcgtcgccgacgcttccacgacttccgcagctccggcagtcgcccgggcccggcagccccgcccctggccgaacacccctaaacccggggacacctcctccggcgtccgcgcctagccgccggcagcgccacgcccaccgccagcggcgcagcgaggcagcctggagtgaccgcgaccaaggagcggccgcccgggtcagcccgcgccgcccgccgccccctcaccccgtcgcaccgctgggaaagcgcacggtcggccgcgccgccgcgcttcctcgggcttcgcgaccctgccgtaaagcggcccctcgcgccgtcgcaatgctgccgtgcgccgcgggagccagggggcgtggggccatggtggtcttgcgggcggggaagaagacctttctcccccctctctgccgcgccttcgcctgccgcggctgtcaactcgctccggagcgcggcgccgagcgcagggatacggcgcccagcggggtaagcaggggcctggggacattgggccgggaggggtgaccggaagggaagacaaacccgggcctcggggccactccctgttctgcacagccgcctcaggcctttgtccaggtgctctcgcgtcctatcccgaacagtcccgcagccccgaggctcccgcatcaacgccctcagtcggatgggactgagggtgccgccgccaccacgccggggactgttgacagccagaacctttaagcgtaacagagtcacctggcaagtttgtacctaccttatttgttcccgagaatgattattttttatttttaaagagctcttggcttaccgtgcgttttttttcgttgtgtgtgtgtgtgttttggctttgttacaattattagtgcttttcttcaagcggcgagcactttatcatcgtacttttgtag

SEQ ID NO: 61316 - DNA, 436 bp, Homo sapiens
tataaactggctttctctgcctccttgtttatccctcctaagttcaaagaagcagtcagctgaggaggctgcctttcctcaggctggctccagcccggttgggaggtgcccggattagctgaggcagaggtggggcttgtgcagagagcctggctgctgccatggagacgggaggaagcaggcaaaagagcaggcctgctggcaaaggatcagagggctgggtaggcgcagggatcagtgtcccggaaatgtgaggaagggcaagtgctggcagcaaaacaacatgggcaatttggacttcaggaaaagctgccacaaatactcagaaataacacacatttatagacaaataacgtgactacaagaagaaaaaattgttcaaactctaaattttacaaggcatatttgtttatttttttgagatggagtctcactc

SEQ ID NO: 61317 - DNA, 2840 bp, Homo sapiens
atcccaggtttctggctagggttgtgggtgagcagaggggacagttactgggcgcagcggcacagaaagaatgagcagtcgatgcttggcggtgcccagcccagtggctgaacttagtgacatccaagctgcagtctggctgaaatcactaacctgaaagtggtatggagaaagtttgtttgaccctgactcagtgcctctccccgggccaaccctaccgtgttacctaggagctccccctttgtctttataaatgagataaaagtaaccagacctccctggaaaaaccgaggagcacttgcttctctggtgactgcggggcctaactgcagggttcacaaagggctgctggtgctgggtgataacatcggaaaggaacagcagttcacaagatggggctgggggactggcccaggaacccctccaggttaaatgatgcctccgggccccgcacttgggacgtctgcaggcactgggagggtttttcccaagccgctggcagcagcgagcggagcctcgcccattgaatcagcatgccctcccggctggctgctgagtcaggcctgcggagccggcgaagccgcaggacttgacccaggcgcgctccgctgcccttcaggccgggctggaggtcgaggccctgcagccagggagatgcgccggtggctgcgtggggacagaggggggttgtctcccaccctcacagtctacaccccggcccttcccctttgcccgtctgaggcgcagtttgtgtcgagggggagcgcctggaaagtttcctcgtacagatacgagggtccaaaagccccgaggagagggaataatgagaaggggagggcgcagggttagaggtcagggtctcgaccaaaggctgtcggttttcctggaggagggagaaaggcctggccgggatcatctgattccggggcctcccgaaggcctcctagctgggttttggggggaccgaaacgagcgcatgaagctcgcgggcctgggagtggggtggggcgggagcccagtggtggcggctgcggccgggcctgcaccgtccccggccgcattctggtagggcccacagtccggctggaagggaagctgccgaagcgctcggtcatcgcggctgcggagtcggagaggccagggcctggccgcccaccccgcgagccgcgccctgccccgagcgccccacccccgtccgcgttacaaccgggaggcccgctgggtcctgcaccgtcaccctcctccctgtgaccgcccacctgatacccaaacaactttctcgcccctccagtccccagctcgccgagcgcttgcggggagccacccagcctcagtttccccagccccgggcggggcgaggggcgatgacgtcatgccggcgcgcggcattgtggggcggggcgaggcggggcgccggggggagcaacactgagacgccattttcggcggcgggagcggcgcaggcggccgagcgggactggctgggtcggctgggctgctggtgcgaggagccgcggggctgtgctcggcggccaaggggacagcgcgtgggtggccgaggatgctgcggggcggtagctccggcgcccctagctggtgactgctgcgccgtgcctcacacagccgaggcgggctcggcgcacagtcgctgctccgcgcgcgcgcccggcggcgctccaggtgctgacagcgcgagagagcgcggccctcaggagcaaggcggtgagtccccggcgtgcgccccggaccgcggccccctcctcatcctccgccccgtccctgtcccgctcctcttcggacccgccccggccgtaactctgtccccatccaggcctccttcccggtttgggtcccggcccctctccgttcccaccccggtacccgccccagttcaccgccccggccggtccgcgaccccttccaggttcaggtcgggttcttgtccccggcccttttgccagccccggctcccggcgccgcgcgtcctccccatccgcgtcccactgcaggttccggtccccggccctgcccagggccccgccctggccccgcatccccggcttggccctgctgcgggcggcggcggccgttcccggggacagctgtggaccccgggaacccgcgacaggggaggtggctgaccccgggatcgcggcgggcggggaggccggaggcccggcggggctggctttgtccgattcctcctcttccttccacccccgcctctcccggcaccgccctgagcggacgcgcctgtcattctcgcgggcggcggggggccgggtccctcccgagagctggctccgctttgcctccttggcgaccccttattttcagtaaccagatgcgaaacgtttcaggcgaccctgttcacctaggctggcgttgctccaactaaacttgaagcagcctccgtcctggaatgctttttccatgtaaaattgggtgtacccttttccttaagaaaattaaaataaagcgtaaaagtagtgaaattaatgcgtgatggagtggatggttttataacttaacatttgtaggtcatttctaggtatatttgtattagaattgttgctgcctgttactgttttattatttaaatgaattaagaatttacatattaagcgtttgaaaaggaatacttacaaaaatgatgttttttaaaaatgtgagaacaaaaaatttgagatatactatttcaggtgttctgtaaaagggcagttagagctttgattctttgcattagttaaatcccaaggcctttttttttggtacggcatgactaagccattgatcagaatcagctcggaatacattgcactagtttagtgaaagacact

SEQ ID NO: 61318 - DNA, 1514 bp, Homo sapiens
tgagcggacgcctccccgcgcgcaccgggggccccggagaccgccttccccgctccgaacgcacgcggcccggccccggcgaggtgcctgaacgctacccgagctgcggcggggctcccggggtgagtgctgcagccccaggcccgcctgctcccacaggctcgggcaatggagacccgcggccgcccccgccccttgaccctgcctcacccctcacgcccgctgccgcccacgacctccgaccccgctgccgcccggctcgcagcccggctcgcagcccggctcggcgggcctcacctcccgcgggttccgcactcctcttcccgccgtcctgctcctctcggccttctcctccaataggcgcctagcaccctgagtgggctacaccaatcagagacgaagcggcgctaacgtgactgactaactaaccaatccaaagtctcaatctccctgagaggggcggagcgtacccgggccagccctcgccgccgattggtgatcgacctcagggttgcaggggcggtgcccttacacggattggagagggcagcgatggggcggagttcaagctccgattagtccgcgctccgtggcgggcttggcgattggacgccggcgctgtcagccgcgcgcggaccggggcggggcgggcggtgccccgggctgggcgaggggccgggtgcggggccgctggccgagaggctgaggcggcgtcatgtcctccgaggtgtccgcgcgccgcgacgccaagaagctggtgcgctccccgagcggcctgcgcatggtgcccgaacaccgcgccttcggaagcccgttcggcctggaggagccgcagtgggtcccggacaaggaggtgggtggccgtcgccccggccagcgcctccgacccgccccgccgccccggcccggccccgcgggcttccaggctcccgcgacgacccctccgcctccgggcggccccttccccagccggcccccgcccccgctctctcccaggttggccgcgtccccgggccgccgcctcaggctcctacgcccgcggggagggcgggaggcgcgcggtgtcccggtgcgggggtcccgggagggcaggaggcacctgtccagggcgggcgccgggaggcggggtgcggggcgcgggctggtcccgggggtgggtgcggccctgcccgaggccggttcgtgctgggctagcgcgtgtggactgcgtcccgagagctggggctcgctcccgagaaagtggaaggcggagcgccttcctcgcaggctcggtggggagggcgcgtgctgtccgcggaagcgctggagctggcggccccgcaggggtccctcccgggaaccgggggaggcgtcggtgccgcgggcgggtggccggttccgaagccacctcctgctcggaaggagggccaggacccagtctgcgggccaggctgccccccgtttcccttcgtctataccaccctccacctcggaagcgaggtcgcagtcgcccactggacagtttgaaggagacc

SEQ ID NO: 61319 - DNA, 539 bp, Homo sapiens
tccaccacaatcccgaaaaaggggctcgaaacacaggcctgatggccagagagtaacagtactgttttcataaacgaaggaatgtttcaatacatcaggacagggattcctgatgctgtgtgtttcagggaaatgtgtcaacctcagtcataaagaaagtcttattgcaaggaagccccaacacttttaatgcactggttgagaaacagactctccatgaacagcttgccctctgcttggcaggggcaccacccatggactacactagaggtccaagtccatcacacagcaccattgtgaggtcaagaccaaaccaacgatgtgtggactttgatcaatgaggacagagcgctgtttgtaggggcagcccctccacttggctggctgtagccgagttgtggtgaggcatccatgccgggcctcagtgtcctcagagtaaataaacctgcagtaagagaggacactcgtgggtcagttttttttgttttgttttgttttgttttttttgagatgaagtttcactcttgttgcccaggctg

SEQ ID NO: 61320 - DNA, 2352 bp, Homo sapiens
ttaaaaatcagaattcagcatcccctcctattcagattataggtaaagggaagggtcggtaggacgatggcaaatctaatggccaatgtctttctaggcgaaagcatccttaagggcaggacaaagacaccaccactacaaacgaacctcgttcaaccttcagaacacggagaacaaaccagttaaagcaaaacgaaccaacattgcagatacgggaaaagggaattcctaagatggctctccaaatccgtgcactcggcacctttcctcagtacaaccgcgaaggctacgggaatgcgcctgcagagtgtgggaactccgggcgcgggtgcccaccccgccgactcccagggcgaccccagaacgttcgtttcaggcgggtcacagctgcgccacccaccagacctgtgccccagcgtccgaccgcgcacctgagaggaccgaggagatgaccggccccaaatgcatctgcttctccccgcggccgcggaggccgagcaggaagggcccgcaggcggccccggccccgcgctgacagcccggcgccgcccccacctgcccgcctggggggcgccgcggccgggcgcgcccgcccagccacttccttccccgcccgcccggcctcgcaccggcccgcgggggctgggagccgcgggaggaaggaggtttggccagcggcccgcggaggaagccgccgccacctcccgcccgccctcacccaccggcatcatcgcggggagagtccgcgacgccctcggccgccgcctgacaggacgctccgcgccgagctgtgcccaccgctccggccgcctcctaaggccgcgctcccgccgccgtgctctccggcccggccgcggcgaggcggcagctgcggcgggctgcggggctctcgctggccctgtcgcggccgccggcgcgctgcgtcgctgtcccgggcacccggccgccgccgccgccgcctcaacctcagcctcagcctcagccccagcccgacagcctgcggcccgcccgcccggctcgctcttcagcccccgcaggccccgcccccagcgcgacgccccgcacgggtcccgtagccccctctgattggcccggtgggagcgggggcggggagaggggcggggcttcccggctccgcccgctaccctcgctctcagcggcggccaggtgcgtgcgcgtccgcgctcccggcggcgggggaggggcggacgcgcagtgggcaccggtggcctcccccgcccttgcgtgagccccgactagggaagaccgcggacggtgggaggactgaggcccgacagggaagggccggcccgggtcccgcagcggatcacggcagggccgggactcgaacccgggctcccgggggccgactgtgggccgggagcgtccctgcggcgacggcgcgcgcccgcactctgaccgcggcctgacccccggctgccggcgcgccgtggggctgcggcccagaggccagtgggaggggcgcggggggcccccggagcgagcatgtgacccgaggccgcgcgctcggaaccagccccggcccgacgcccttggctggcacctgcttctcccccaccggcgtcttccgcggctctcggggccgcgccccccgcaccagctcccgagccttggccttcgcccgagcgatctcccgcctagaaccccgcgcccacctgtgccacctgtgcccacctgcgccagcatccctcgaggtccagctccagcgtccccggggagggtccggtcctcgtctccagggcctgggtctctccctgcagtcccgtctccagaggcgccgccccctcgggcctgagcgccggagtgacagagccctgggcagggccctgagcagaccctcagtaaaggctgccaggggggtaggcacccgctcggggccccccacatggtgccattcgcccggaccgcggcggagagcagacagggggactgaggtgctccccgcggcagcaccgaactcccacgggcatcagaaggcaaggtctgcggatggccccagacacagaaggcgtaagccgccctgggaagcgccggcccagtggagaaggccgccgcgaggtcagggtcagtctggagcctgtctggttctcggagaggcttctggctgctgcagagtgggggcagagcaagggaggaggccagggagctcccaccagcccattcctggggagccacccctgtccctcagaggccacgggggctcgtgtttgcgagtgtggactttccagttagacagacttggttcagcaccgcctccgccacaccctcgcctgggatcctaaacaagccgcatcttctctgcatcgtagtgtgcttgtctctgtgatggga

SEQ ID NO: 61321 - DNA, 1444 bp, Homo sapiens
ctggcccaggctcagatacggtccaacccggcagacccttcccgggggcctgtgacggtcccaggcagggagagccacgtcggggtggtggtcacccccagcgccctgaacctgcgaaggcccagtgtaggggtgagcgcgcaccggctggggggacgttggagaagccaagcagaggcagccgggcgcgccttcctgccctcccggtggaggaggacgcggcagggacaggcgggcggccagccggcttcaggacgcttgacaagggttttggctgagggtgcgccctgggctctggagcgcccaggtgccccgccacccacggggggcgtggtatgggggcgtggcctgggcgtggccggcaccgcctcttccctttcctgagtccagagggcccctcctgcccgccacgtttccttcctgctggggggcttctgttctcccagaccgggtcggtgctcttttcccccggcgcccctcccccacccagcccgggccttgcctgccgcagccaccttcttctctgatgctgtgtcctggacttggtgacaatggcaaattgacaagaaggcgagcctgggcctttcctgcggcgacatccagcttcccccgcccctccctgggtgggtgcccaccacacgcccagcctgccgcgtgcttatccaggccctccaggccaggcctccgggtcttatggaagaaggccccgtgtctgggcagtgccgtggctgtgagtgagcatccggggccagtcagatgtgccgtctccggaggtcacttccatagtggccatcaacagcttggccaaactcggccgcaggatcttttcctatcaattgcaggatggactcttcccgcagccatgcgacctgtggcccgcggtcctgctccctgagctggaggaggctgaacagaatgagcaggttgaggcctgtgggaaggaagagccacatctccttcatgtttattaccccctccgcaggccatagctaggaggccttgaaggtttttttaagggggaaagggggtttccagaaccacagccggctcagcagaaagtctccaccaacagaatctgtgggcgcacattcctcaacagctgaagaaggggctggaggggctcatggcatcccctccagaggcaggcccagggccctgtgtgcagtggggggtcctgcatctgcattgttgttaagaaagtgacatttggctacatggagtgactcatgcctgtaatcccagcactttgggaggctgaagctgtcagattgcttgggcccaggagttcgagatcagcctgggcaacttggtgaaacctcatttctttttttttgagacagggtctcactctgtagccaagactggagtgcagtggcacaatctcggctcaccgcaacctccacttcccaggctcaagtgattctcctgactcagcctcccgagt

SEQ ID NO: 61322 - DNA, 2983 bp, Homo sapiens
cgggaggcagagcttgcagtgagctgagatggtgacattgtactccagcctgggcaacagagtgagactccgtctcaaaaaaaaaaagaatatgtttactttcacactcacctctgacctcctcttgggaagacgaggttaccggtgccttcccttctcttccactttcagatttcttcccggtcagccccaaacactgaatgtaaatacggtccaacatcaacctgcaaacgaacactgacatgaaagtgcagttggaaaggatctcgcaaaggaacagaatctggtgatcctaatcgtaatgaacgtgatcgccgggtattgagagcttgcaggtaccagggctccggcactacgtgtttcacaggggccactcggtagacctcttggtgaccttgaggtcaggtaccacgttcccattttacagaggaggaaactgagataacctacgacagcgaaaaggtagcagagctgggactggtgcccaggctcgccgagtggaaaagccctcggccaccgtggagagctcgcttcctgtggtctgaagcgtcgcccctgcaccggcttctgctgccaaggatggcttttcctcactggtgcccacctacgctcacttgtgtcatgtggttaagcccttttggcaacataagacctttcccaagaatgtgcctcggtgcagaggaagacggtgggggcaggccccctccccgggatgctccaccctccctgacctcacacgggtgcaacctgggccgtggccgagacctgctgtgtggcagacaatgggaagcctgtgtgtcgtcctgggtgccggatttagacaatatttagctttcccttggtggaaaagcctttcccctcctgctttgggcaggaactggttcctgttgggcggggcctggctgctgccccacccccacccggccgggcaccttgaccggcagctctccgggctgctccctgcctgtgtccctgagcactgactccagaggtttaatcattaacgggcacgtttggccttcggtcgtgggctggaatttgggacctgtgcccgggaacaatgatctccgacacattattttgtgtaaaatcacttttagctgccattagctaataaagctggaataaagtgaggtccattaaccagcactggcctctcggcctctggggctccttgggagggacccaagggactcaccttttgaggaccgtgaaatcgccgctagaaaatgtgcttacaattgtggtccagcactgaagctgctcagtatgttttcagtcccctctgtggcaaccccgtgtgtggttttggggactggcagagtgccctggaagcgtgcccacgtgctgcagatccaccagaggaaatgctcgggaaacgctgacgcctgctttgccccctgtttcagggtcaccgaatgagaagctgttgggatgaatggctcccccaccctcctagcccgggccaggggtcgcccagcagcaatgcccacctcccttcgtcatgggaggagctagtgctccagtcagcccttttcatcctgagctgtttgctggaagtcaccagtgggtatccacagcgcaagcctcctctctctccttcccccaacctctgagacagctggctggatgctccctccaaccccattcccctgccctctcctgaggacagctctgtcgggagcagggcctcccagcaagagccagcagctgcgctgtttctgctgctccagcatttcgggggcagctggctggaagggtaggggcgatttagagaggcccactggcaggtgtggtgatgggactccatgtctcccgcatgggacgccccctcctccctgggcttcattcttagggtccccagtcattcttccctgggcacagccctccctctctgtgcctcattagctcatccccaagtccaccctacagctggtcacctccgtcttggtgcagcctgcctccatggccccgcctgaatgctgagtgcccaagggccagtgttgcaaggggaccccaccagcctttctacagaggcaaccagaaccctctggcctctccccatcttcctgccctcccacatttctgcctccctagctctgccccctgccccaggaagctgaggctgcaaactcagaatctgccttcgcctctggtgcgctgccaactcccccttgggcaggcctgtcgcctgcagcctgtgtctgtgctgccctccactgccgtggcagtgcccaggccaactggtcggcatgcttgggctcagggacaacttcacggtcagcacgtggctgtgcatggccttggacacctggaacgtggagccggtcagccagcagctttcagacagggaggggccgaagggtccaggccacacagagggccagggccagcagccaggcactggctgccaccacccgttttcccccagcagccctgggctctcccttggtggctctgctctgtgactgcgggctggttcttggacctcggttccctgctgttctgggaggctcggggcctagctgaacttggggccttcctgcctgccagcccctgactccggatggccagacacactcccagaaactccacccggcctcttgttggccaccggaagggctggcgagagctgcaggatgcgcacacccctattgagggcttgcccgctgcccctctgggagccttcctggaatccgggaaatgaaggcgctctcaggcaggacacccagtcagatccgtctcgtgcagggctccgggccccgttcctggccctgccagggaagccagacccggctgcccaagagcagaccctgcctgcagaagcgctcccaggggagacagccaggacctcactgggaacagaccccccaggttatttccaagcctgcccctcctttgcctccctgctgcctcctcataccccccccgcaccccggctgagagcagccaccgcccagcttgccctgccatggttctctgc

SEQ ID NO: 61323 - DNA, 524 bp, Homo sapiens
tcaggtgatcctcccagctcagcctcctgagtagctgggaccacaggtgtgtgctatcatgcccgggtaatttttatattttttggtctcactatgttgcccaggctggtctcaaactcctgggctcaagtgatcctcctgcctcagcctcccaaagtgttggattagaggcatgagccaccttgcacgtttgcctcctgacctcaggtccccacggagttggtcatcttctgggcctcgctcagccggtgctgaaggtgagtcatgctcgatgatgacctgaggagcagaagaaggtgcaggtgagtcacctgaggggaactgggtcatgaccagagctgtcaccgctaggccagagcacaagagtgacatcacagccagtggtctcctggcagggacaggaagcacctgccatgcttcccagcggccgtccctctgtccaccgtctgttccccggggcctatgctgggcctcacggctgagaggcagaggggctgaggcccaagttcaggctcatgggaatt

SEQ ID NO: 61324 - DNA, 3673 bp, Homo sapiens
aagtgctgggattacaggcctgagccaccgcacctggcctttttttttttttttaaacccaaatcctcatacaatgcaaatatctgtggcatctaaggctcctgggaagccccttagagggtccaagctcccatggctgggacgagggtgcagggtgcagccagccagcccccccgggtggcattgtggtaggccgggccgcagccttgcagaaggctggtgggcccttagaggccgtggccctcaatgctctgccccaggagaacatgactcacctcgtgcagtgaccagctctgctctgccagctcctctgtgtacatgggggaaataggccgccagtgcacacgttggtctgggactgagggatcacgcatatggctcagtggggtgctgcctgagggccggtccactcacgccacccagacaccaagggcagggtggaagcaaggtctctttttccttcctggcggaggcagcctccacacggcctcagcgggggacctggggcaaagggctgagattgggagaatgggggcccgtacagcccctgggcaggacagtgcactgcagtggaagccgaggagtgcatggacttcttcagggttcgaggctcggccgtgggcggaacgccagtgcctgtggtcggggtggtcaggcctggacacggagactctgatctcaccgggagttccccaagccccgcccacagcacgatcctatcatctgctgcccgccccagctggaccggggctattacattattgtttgtaaagcgtcctgttgttattttctgattaccaaggcggtacatgttcacttaagcaccgcgtgggtggtggtatttgctccagttggtggatggggcggtgacttgcccagttgcagttcatcagcatcagcagcagtgatagcaaaaaggattcagtcggtgtccctcagacgcagcactggcagggccattggcagagactcagtgagccccagccccttccgacctaaagctgaccacaaattcgggtattttctagacaactgggtgcggcagccgggacccaccccaggccagccttgtttctccagctgtctcctgctgtgggtctggggatggggatggaggcgtggaccccaaaactgctctgactgcctggagcctccccagtgatagaggaggccactgggagcacagggcccctctccccgacgggaaggcctctgacagcccattctaggcgggctgggcgcaaggctcctctggggaacccggagctcaggcaggaggcctgaagagtggctgcactgtgactgttttcctggccctgattttagggctgacccctcccctcaacacacaccccaccgtctcaaatcgtaatatccaaaggagcgtgggtcacctcagtgcattctcaggcagtctcaccatggcctgctgatgtggacgtcacaacctcatttgacagatgaggaaactgaggcttggggtggagatgaagttcctgactcagtcacacattgctaagtggctgaatctgacttgaacctggtgtcatgtgatgccagacagcccctctgtactgctacatgggcagcaggtctaggcaagaaagtgtcagcagctgggaggtgggaggggcggagggtcttcagcccgaccctgggccggggctcctgttctcacactgatttgggatgggtggcacagtggggtgctaggagctgggactctggcttcagatggcctgcgggtctgaatgcaggctctgctgaatgctagctgtgcgcccgtgggcaggtcacttcccctctcagtgcctcatttcctcatcctggaaagtggggaggatgaccttgtctacctcctgagctgctgtgagattaactgagctgacgttgctggtctgtgaatgctggccgtgatccctgggcaggtggagtagggttagcagcgtccaccttggggcaaggcccacctggcctggctcccagaggccacgcttcctggccaggatcctgagaaaggctgctccctggcctgcttggagctcagcacagagcctggcacgcagcaacaccaccctgtgtggcactgggggctcctgcctttcttgccctctggttcccacacccactgaggctgcccgcaagccctgccttcccacaggtgcatcagggggagcctcaggtgcccagtgtccacagttctccagcgagtgtctgacagataggctctgcccgtgaatgccgggatcctgtgagtctggcctagttcctacacttgcttttcctggccaggcctcagccaggacctatttcctaaccttcggccctggcctgggcactggttccctcccacctgccaaggacgtctctggtcctaggcttcccctgtccattgctggtgtcactccggcctgcccaggcagcttcctcctctgccctctaattgggctctgcaccctccccagcctcagctcctgccacagctctgctctccaggccctgaccctgtgcacccggcactgctgtctgcagacagcagttcttcccggatgctctggagtcccgcagagcctggcagcaggtgagacctccagggaggttgccctggaacttgtttttcctggtgccctcctggagactgcattccaccgggcctgacatacacctacgttcctcccaggtctctggggagatcctctggccaaggtgaccagagctggggaatgtgccccagtccacgggggaccctgggaactgcgcttttggctggaggctgcaccctagggccaggcccagagcaggggcttctgggagcagttgctgaaggtgcccacagggatgggtgattgtgggcacacttggctggcttagagacaccggggcgtttgggtccagaggcaggcttgggaaaagtcatcggaaaggggctggatgctggtctggggaggactaacggcagaaccccgaggatgccgccgacagcgcgggctccgaaagggcagcgggggtctggagttctgatctgaagctccaggaacaccctgctggggtgtttcaggtgtttgaaaaattctctaagttatttgttttctgttatttcttcatggttgggataccaggttctagggccgctttggtttggctctgtatttcattgtgtggctaatcaatttcggtctgacacactttctcttttgaagaaattattcatcagggtttggcgtgaggagcactattgcaggatcctcaggcatctccaaacattgaggcaacactgcggaagtggctcccagtgcccagggctgggggtgaaattcccctagtccagccctcactgcagcttcctgctgggctgcacgcctctccaggccagggcctgcctcggagtcatctctgacccagggtccagcttgaggccagcatggaggaggcagcagcacatgcttgttgaatgaataaatgacctggagtgaggtgctggggagacaggagtgagggcccaggcgcggccctcatcgggctctgagggtgtgattctcccacacccttgcaagaaggactctattttaaactttatttatttaaaatcgcacagtaattcttgaacgctctcataaaaattaaagcattaccaataaaattcaagtctatcttgatcaagaccctttggtct

SEQ ID NO: 61325 - DNA, 1425 bp, Homo sapiens
atatgttgtaaaataagtggcattgctctgtctgtcatcacgtaagctggctttcccattggctactggcccctggagcccttgctgtgtcagtatgtagagatctactctatgacccatgatagctgcagagggtccccagaccacagtggatgtccaccacaggaacaagcctgttttgtggatgaggaagtcgaggcttagaagttgggtgacttgtcaaaggtcgccacccacggtgagggccaggttctgggagggctgaggggcaggcatggtgagccagttccgggcatgaggcaaggcgtggcaggcctgggggcaaaagccacagcccgtgtggagggggtggggggatcgaggcctttgggaagcctgtggattctggctgcagtgtgggtgtgacactgagtgctccggggactccgagttatcacccaggcactggccagccccacgctccctcctccaggtacttggctccctgcctccttggccggcccgggctgggtaggtgtgcagggctggaggtgaccaggtcagcgctgctctcgaggacaggcggaagccccttcatgcccagcgggcccgggggtggggccaggcaccactccccacatctcccacgggagatcatcagtcctcaccgccataccagtgtgggggctgggtgtccaccctctaggacttaggtcaggaccaggcacacgtggggaaggccaggtcactgggcgggccgaggatgcaagctgccgcgcttcccatgaaggccctctggccaaggtgctaattagggcagcttcccgaggagagggaagagcaccctgaagtgacctctggccttcccaaacgcggtttccttctgactcagtactggcctgcctgtcagccagaaatcacccaagggccccacatggagggcacctgccaggtcatgggccttgccccattctccctaattgcgcctgcctcagctgacccacctccagtccgaggcatgtgtctcacggatgccagggtgcccccagggtgggggtggagaggcactcagggtgagctgagggtgtgtctctggtgccaagcctggcacagcgtccttggcctggtttccccagggctggctccacctggccaccttatacccgtcccactcagaggccaccagtgctcggtggcttaatggcaccacggcagacaggctctgtctctgtgtcactcaggatgtttgcataaagggtccataccagggaagagggatcttactccacagagccatggtcgtgatcggaaggctgcgcaccccaggccccctgctctggctgtgtggcttggacaggctacctgtggtcctgtgggtttcttttttttcctttttttttttttttttgagatagagtctcgctctgtcacccatgcttgagtgca

SEQ ID NO: 61326 - DNA, 904 bp, Homo sapiens
tagctgcaaggctgcatattccccaggcctgggccagacagttcccatcaaaggagagcctggtgctggtagggtctcccccaaaggatgctttgttcacccatggaaataaacacttcccctggatagttactcctgggactcgagtgtaatatggggtgtacgttactctttaacaggtgactccatccaggtcataaagctcttctgaactaagttcctggaagataggcgttaccacctccagcccgggtgtttattaaccactcccacggtggccacggagcagccaggggtagttgttgccaggacgctgggctcaccttctgaactttgtcctgagaaccagagcatggcgggccaccctcatcagctttccccaaaccagcagggagttggcacaagaccaggggcttggcaagggttgctttcctctgctgcagtgaggagcctccgtttaatccccacctcccccctctgcagccactttgaaagaactggagtgaacacaggctcctggcagggaggaggtgtctaaatcaccaggctggcctctggcaccgaggcccaaagcactctcaccgccattgccacccaaacctggacttccagaccagggccgctgggctgacaaccatgtgtcaacctttaaagatgaaataaaactgcatgaaaccgggaggtttaaaaaccaaaatataagggacccagatgggcgtctcaatggtggagagagacaatgagcagagctgtggggaaggaaacccctgaaaccctggcctgtcacgcggcatggatcaccggcggacaccaggcccgagggcagctcgcgcataggctggcgggagacctataggctggtgccgaagatgagccgggccagtcagatgtcccattcaggttt

SEQ ID NO: 61327 - DNA, 1026 bp, Homo sapiens
tgggattacaggcgtgaaccaccgcgcccggccggcccctttcttgagtccattctgcccaggcacatttcctagctgtgtgtgtcagttttacagcaccagaccttttaaaaatccatcttattcataggccaaacgtgtgtctactgtatccacttaagtctgcaaagttttggcacattacattaagggcgaactattacctgacactggaaatgggaaatgtctgacccgcgagttccatacaatttcattcagcaccgtatgatctcttttcagcttccctgttgcctcacccaagttgtcatgtacagcataacgtggagggcagtgtggcgcaaggaaacttgagttataaaggagagaagggactggatgtggagtcagagttcttggcttggactctggcttctctaactctgcgtagcctctgggttaggcagctgaacctctcaaggccaaggtacgctccctgtcaaaaccgtgggagaattcaggtgcactgagcgcgttaaggccaaggagggaaacgcggcgcaggcctaggcgatgcttccctctggcaaccgaccctggcctacctcccttcagagaagggaaagccgggcagaaaagcaggcgcgtgccggcggaggggtggaaccccaagatcagctggggccaaggcggcttctcgccctcccgcccccgccgtctcgcacctcgggagccaggtccaggtccccgtactcaccttggcgcaggacagacggctcagaacgcaccacaaatctgcagccaactcggaaaggtcaccgagcgcgcaggcgcgcgcaggggatgccgggaaggcggaagcagcagagacgccgcaaggccagagtgcctccccagcggcgcctccgcaccacagcgcccccggcggccgcctggtgtcgcaggcaagaaggggcggggagagggtgcgttaggggtgtgcccgcgtgtgtcactgtgggctggctaatcctccacatcttcccacgactgatgggtttcctgggacgc

SEQ ID NO: 61328 - DNA, 655 bp, Homo sapiens
tgttttcactttttacctattatgaataaaatttctgtgaacaagtctgtagatagatttttgtttctcttgggtaaataccgaggagttgtgggattactgggtcattgagcaggtggtcgtttaatcttgtaagaaactaccaaattttctaaagcggttgtaatacttacattccgtgctagttggagcttttctctctcagccctcaatccatccttctttcgtctggcgtcctggagctagactgtaaacatttcttctttcccagctgatgcaatgttaggcgttgccggcagagggcactggagggacactgcaggaggagcggaactactcttcctgtttctggtgctgcttgccagcaggtggcctcccagcacctctcagcaataagcagtttcctgcctccaggcccagcctttgcacctctggccattccgtggcctcagccactctctctccgaagaggtctgagtctcattctgggtgtgggagcagggctgttccaagtttcttcctcccatgggtgttgtccttgatcctagaggctgctgcacatcttctcttcctatgttctttagacatgtttctgcccttctcagtagttaattccctttaactgaacatttatttttatttttttagcgacagg

SEQ ID NO: 61329 - DNA, 1004 bp, Homo sapiens
ggctgtgaggtcctgtgtctgggtgggaaacaagagacttggaggctggaaattgggtgtggggcgtcagtcttcagacctgaagcagccttctgagatcccttggtgctctgtgcactggggtcctggcttctgctcagcagcccgtcctcgtgtggctgcgaggtcacccccagctgttgctagctgacccatgtggggcatccacttccaggaacctgcaggaatgggctcccccaacccctcgtgaggttggagcagccagactgtcaggcgtcaatgatttactccctccacactgctgacgtgggctctggccttccctggggaggtgagaggggagtggtggctttgccctagtaaagctgtttgattgtcgctgttggaacggcttctgcgcctgctggtaaacagtgacctgtgggtggaacgctgcacacctggagccctgccagagttcagggagggcagaggtgatgccagtggggacgccccttgacccatcccttctctgagttcattgaagctatcacaggtcaaggggcatagcgaatccaaacacggctgataaccccaagcccaagctggcatcagtggccacgttctgtacacccgagaaacttgaagacttcctatgtcaaactgggaaccccacctgcttgccggcctgtcccaaagtccctcctgagcccggctccttgcaggcacagcagggagggcagagatctggggccaggcagctgagagaagctccctgcccggtgaccacacgggtcccagcagtcgagagtgtcagtggagtgatgcccatggcttcttggttactgcagtggcgtctgtgcccttggcctggacctccttcctgaatgggtgctacacgttcacaagtttctaagcctaagcttgacttcgctggtgacagtggggcccattgtcttagagagcaaagcctcctttccaggtgtttggcagggggctgaggagtttccaagtcaccagcaaac

SEQ ID NO: 61330 - DNA, 1331 bp, Homo sapiens
tgctgaagggggctctagggtatttcctagagcctgagccctcccctcagctgccatgttctgctgaagcagagtccctgggaggcgccactggtcaggcctggacacctccaggtgactaagtgggtaggaccggcagggccagctgcgccaggacgttcggggctgggctgtgagtggggggagcgaggctcaggcccttgctgcgtgagggggtagggcgtccctccccccgcgtgggaaatgaggaggcaggtacggggctacccctgtgggctgcggggtgggggttcagggtctgagaagcagaaacctccctccctccagtttcactttctctttacccctccccttccccctcccacgaagttccctttgaagtgagaggggctggggtgggtgtgtccagcccagcccccacacccaccggagagctagcgcggccctgggctcctgtcgggcgctggtcctcacctgttccggccaccctgggcctcgacccggccaaggtggagccccgggccctccgtgcgcccgagcacccccggcccagacgagacggttcgggcgtggcccggcggggacccagaacccgggaggccaggtgcgcccaggccaggcgctggaggctggggcgccggatggggcggggcggccgctgagtcagggccacccccgcgcgggcgcgcggagcaggtccccgggccgtggaggatcagtcgcgggacctatgggcccgggagccgccccgcccggaaaaaccggtcgggccagcgcggcgcgggcacattccggcgccgggaagggcggctgcgccgcataaaaggcgccgccgcgctggccaccgccgctcggagctcagccgccctgccacgcggggcccgcgggacgaggggacgccggggccagcgaggacgcggcggggctgggcttggcggctgggatcccccagcgccaggcgagggcgtctaaggcgtccggtacggcgtcggggccgggtggctgcagcagggcagggggtgcgcgaccagcggggatctgggcgcaggggccggtccccgggatccgcaggcgacgcgggcggtcccaagggcgtcgggggctcctctctccgcagctcggcgaaccgacggtgttggggactcgcgcgctgggtccagtggttcttaacagttcaacagttctgtagcgcaattgtgaaatgtttaggaccactagacccggcgggcgcggcgacagcgacggagcgtcccacgcgcggcctggagtcagagtcacagtcaggggtgcgccggcgaccaatccaggggagcccacggaccggctccgcg

SEQ ID NO: 61331 - DNA, 518 bp, Homo sapiens
ccaggccctgggcccagcatgcagggctgccccagtccagcacacaggcagctcccgagggtctgggccacctccactcagcaccagggatggtgtggaggctggtcctgggctagtcttggctccagaaagcttcaggggcctgaggtgacctgaggctgtgctaaaattcctaggccaacctgccccgcagggcagagctgaaggtcctgcctgtcctggatcccaggccgtggagacgcgcgggaagagaggctgtggtaggcagagttcaggtctggggacactgaccgcggtgtcaggtcacttctctgccggcctaggcaggaagggaacccagcaggcagagccagcatgggatggcggggctggacgtctcaggcacgatcaggcccacgggaaagtcggaggtcagggcgccagggcctctggttgggggcttcagaggcgttgcagtcgactcctggagcagaggtgagtaagcccctgccgccctccccctgctcacagcctgacct

SEQ ID NO: 61332 - DNA, 438 bp, Homo sapiens
acaaacacaggaggtcctgacacaggctgccacacagctcaggcttgaagacattatgctgagggaaagaaccgacacaaaagggcaagtgctgcctgactccatgtttgtgaggctcccagagcagtcaaaaccgcagagacagaaagcagaatggagggtgccaggctgggggaaggagggtgtggggagtttgtgtttgctgtttcagagtttccgtttgggaaggtcaaaaagttctggagattggttgcacaacaatgcgaatgtacttactgccactgaacttgaactgtacctggaaacatgggaagacggtgtggaaacaagcccccagtcagctggtctggcagctgatttgatgcagatcaagagggaagtgaggaatcgatagggaagactgtgatcacccctaatcggcacagacagataggaggt

SEQ ID NO: 61333 - DNA, 2439 bp, Homo sapiens
ggccccagaaaggactgcaggggaccaggctgctcctgggtgaccccagatgtcctggctcttctctaggggatcttgggctgaacaggggactgaggccccagaggaaggcaacacagggtcaagacggatccctgagggtccccagtcatttgtaaattacctctgccctctgcaaagtgtgaatgctgattcctcggcctctgcccaaacatatgcactctctcaggttcacgctcacacatccccttaccattcggcagaccccaccggctctgccccagctcaccccctccacctggccctaccatcctctgcccctcaccaagggggaccctccaatccaatcccataaatcagggtccccgagctgcactcaaagcctccgtcacctttccgtgcttgtggaacaaaccccccctccgtcttctgactctcacccctcccacctcagtgtgtgcagaggagccttccctgcacacagctgaagtggccctgtgtcccctaccctggactttggccaggccattgaccaggctgctgcctccacccatgccttggcatctgggtcattttttattgatggtagcttggcccgacttgggggcttcacacacacctcccgtccagcagccctaggaggtgggactgttatcaccacccctatctcagcaggcagcagagccaggacccagaccggcccagccacagcaccctcccactgtaccacgggactgcgctgttcacagggccactcctgacctctggggagtccctccaggtaggccaggccaggcctgtgctctgtaatgcagtccacgcagggctccctgctgcccggggcagggcggtggtccgacagctcccacccctcagggcccgtgcacccgcaatgcccaacctgcccagcccacccagcccagccaccgtcagagggaggttggcgatgactcaggccttgagtcagcagcatcggataaggatgcagccaaccctctgccagcataagggatccccagacagccccgagctctgctagctgggcttgtggggacccctggctggaaccgaaccaggctcatcagcgctcaggagcccgggagccacctccccgggaaaattcacatgcacacacacacgcacacgcgtgcacacagaggaggcctgccatcagggtgggtggggctggactaacaccagcccagggaagagaagccagagatggtggggcgcggtgggcagtgaggcggggtctcagctggaggggctcactctgactgtggagcacccatgtgcctcctaaacagaaactccacacaggccaaggaaacagagctaccagctgactcactctcccagcaaacaccagctcctccccgagccaggccctggaagagaagtcaacatcacgagctgccatctggggggtggcaccaggctgtgaaggatccacagactggcatatgcaggaggaaatggggcgggcgaggagtaaggaccccaaaaagcaggggtagggaagggccctcccagcgccccactgtaataggggcctcatcaatgccccatgctcactgaataaagcactgccagcgaaaggtgaaaagaggaacaaagaacattctcctggacgccacccacagaaagccacgtgcaggcttggccctcaccttggggaccttggacacggagctggttatgtcacatctggctctcagagctggggcagcgtctaggaggcctgatgtagaaagcactcagctaagccctagttaccggcacacgggcaccagcgccccctctcagcaaactccacgtcttatgaaattagcactggatttccacttcaattggaaaatatggccaaggtaagagatcaggaacgacaaggccaagctggggtagccgagaaagcagagcagacacgggggcggagaggtggctgcaagcatctgagtgcaggaggcacaggcccctgaggtcccggagggcagcacgctggtgcagagccgggacagcctggggttcactcactggagaggcagggtgggcggggcaggtgaggatgggggctggagcccatgacatccccttggttgctgagcatggctgacccctggccacacccggcctggacgttgaagtctaactggggagccaggcagggagccaggcaggaaaccggatgcaagtggagattccaggctgaggcgctgtgggaaggaggggagctgtcactctcccaaggcgggaagtgggaggggctgggagtctccagggaggggaggagggcctggaggagttccctggggtgggggtcccagaagagccagcagcctgtgcggcggcatgggaaagaccccagtgcctggcgaggaattggcacagccagtgtatgtggagtcagataggggtttggggtttggggttatttttaac

SEQ ID NO: 61334 - DNA, 3447 bp, Homo sapiens
cacacacacagacacacactcttaatcagggcccaaagccctcctctgcactccctgccgaccccagggacttctccaacctctctccaactaaatcacattcaccccaccttcttcaccctgctccggcctgtgctggcctctctggaccaggtgtgcagctcggaagcacgactgggtgcaagggagacagccccaggcaggagcggccctgggggcgctgggcctccctcccccatcagggcaggaaaggtggacccctcgcccacacctgacctcctactccagcctctgagtaaggctcaggactctgactttcccccaggcaggtggacaggggagggggctgcaggtcaaagctcactccccaccaacctcctcacattcctccattcactggatcaacaaacacacccactgcccagcaccgctgccaggcatcagctcccaacgcagatgagtcagccccgcccgtgccctccagggtggggtggtaccagggcaggcaccaatgttcgggtccaggagtgcaccaggagacccaaagcccagcttgagggagggcaggaaggccttctgctctggaaggggccctggagcccggtgtggagggccggaggccggccttccaggtgcattccaagaattgcagagtgcctgtctaggagcagcggccgcccaggttggagggtgtccagtgagcgcctgccttggctggctcctcaggcacacccggggctgtggcctgcagctgctcctgcactggggctgagccagcaaacttccggggctggggctgctgggcagggcaaggtccgcacagggagcagacagacgcagcctgcaattcggcgcttatccccaccggagcggaggcacaccaaagccaaaggacacgcagctggcctcaaagcagaagctgcatcggggctgggaagccattcaggagcccttttctctcccctcgccctcaccctgagccctggccgccacggcccacacagcaggccctccggagagagatgtcaggactccgagtggagacactttatccgcatgttcttgaccctcatacagcccttacgggtacttattctattttacagatggggaaactgaggctccacagagtcatatccgagcctgaggccgcacagggagtgctggcgccggttctcagggcaggggttgtgtctgctctgtcacatgtcacacgggggctcccccaggcctgccttcctctgccctccctctagctgccagtggcccccaaaccccaggcctggtgcgctgcttcctgcagctctgactgagggtcagacgtcagaagggacttccagagctggggtctggctctcatccaaccaggctggctttcagagccgactatgggcacgccccatgctggtcaatgtcggcggtggggggatgggtgcccccctcaatctaggagacagatgaggccggacagcagaggggtggcagagaaaacccaccccattgcgacacctccgcggccctcatgcagctgtctccaccaaccggcgaagtgcggctgcccaagaccgccgagaccccatcaagggtggaagggggtcaggcagggctgcggagaggaggccacatgggtggcctggttgatgggtaggctctctctccccaaagcctgggaagagccatctctgctgagggatccccgaacgcggggactccggatccggctggctggaacgggagtcccgggccggggcagagagaggtgagcggcgcctgggaggccagtcccaccggaggataggggtgtaggtggacgggaggcggtggagggcagggacggggcggacagtgggggctgaggcgggagacggccccgatctgcgcgtcccacccccatctccgcccaccaggagccaggccagcagggaccgcgagggggcggccaggttattcacgggagtggggagaccccttaaagcgccctcagggaccggccacagtgggcggggccacccccagccacccacctccccccccaggccccgcccccggcccgcgctcgctccccacgtggccgctgacgggcggggcggcacctcctcttcctcccgcccgccccgcccgccccgcgcccgccaggagccaccgtccgagccttgcggagcgcggcagtgggcgccggctgcccgcagcccctgacccggccccggacggagcgccggccgcaccaccgccctctggccgttgcctcaccgggtaagtccttggcctcggggtccgcttggagcttcaggggaaactgagtccgggaggaggcaggggcgtgcttgggtccaggagcgaggttccgggctgcggcgtgtgtgcccaggtggcggcgggcggtccggcggcgcagggtacagttcccgggcggggaccccagggcgcccctggcccccccggctccgcgcgccccgctcgggactatggtcctccgcgccgaggcaccgcccgagcgcgcactggccgcagagtggtgggcccagggtcggccgggcctactcccagggcaggcgggatttccgcgcctcgcggctgccacatcctgaccatgaatcagccacagttgggaaaataaacttcaacttcgggtccgccgcccgggtggcaccccgaggtgcgcgccggcctgcggccccaccctgactgcttggcttccagctgcccacgcgcaggtgggcgcacagggagcccttcccaccccgcaaccgctggcaggcttaggggaatcagcctccatcacagctctctgttccttttgggtggggtaggatccaatccctgtacgcccccagacccacccgtcaaccctctaactggggagtcgccccaggagtgaccatgactaaggaggggaaggcggggtgaccagctgtgtccctgaccgtccccaatgccccctggggagcacaggcgtggggggtggtctgtctgtctgggccttctggggctcaagctccccacccagggctcccgcagctcagctgtgaccacagcattactgcccactccagctggacacaccaggaggcagagaggcagagaccctgcccaggcagggaaccaggaacccaggaaccgggccagaggtcaggcacacccagaaggcgctggacgtaggaaattcccttactgccagccctgcccctccgtctggcactggaatggagcaggatactcgccctcttccggcctcagtttccacatctgcactctgaagggtgggacagcagctcaggctgggacctgctccctgccgccctgcactgggaaggtggggtcccagagcagtgcctcagaccccgagggtgccacccagccaggggcttttggggtgtcggtgctcagcccccagtgcagcaaatagtagcattgggttccaggcctggggtctgagacctcacactg

SEQ ID NO: 61335 - DNA, 1193 bp, Homo sapiens
ccccccggctgccccttccctgggccaggccaggctgtggaggtgcaggcccaacagtgaggggctgcctgcaggagctggcagagccatgggccggacccaggaggggccacacgggcggtgctggcacagccaacccaggtcagagctacggggccctggagaacatcctggccattttacagatgagaaaactgagtccagaatgggcctggctgtcccaggcccctggcaccctcgtgtcccagcaagcattgccaagcggcatgttgcacccacgctgaggatcttgtttgcccagttgggcctgacgggctccctggcactggctgcctggagcagaggtcaagagacgctgagcaggggctgggaagattcatgcaacgtcctagctccgtcccagccgccaaacaggaggtgggctgagtgggaaggcgggcggtcagtgcgtggttatgcactggcattacaggtggcatctcgtcaatctgtcagtaagctgtgggggtggcattgacacactcatccgcatttgaggacaggaaccaggagatcctatgggtcacaggccggtcagcggaagagcccagtctcaccctgaatcagagccgtcccccaccctgggccctggtagcagcccctggccgtgctgggtgcgcaggctcagcctctcccccactctcaatctgtctttgttctccctgctcctgggaaggcagctgctagcggggatgtaggctgggggcagggaccatggagcctggctcgtgggcaggcagcgggcagccgtcttgtcttggcacaggcagggtgggggctggacaccctggggcccagctaggcacacagcaatcaggacctgaaccctgaagccggggcctggctccaatgagctgctgcccttccccctcccaggttgagagaggctttttctgaggacagaggagggacctggggcctcggaggaggcatctctgagtatgtctggtccggggggaggaaacccaggtgggaggattctggtgacgagctcctggccacctgccctcattgcccagcagaccccctgcagggtacgtctggggcctgcgataggccagccctgggctcatgccacctgcagggcctgatcaggccctgtgcccttcccagtccctaaccacagatctgtacacgtcactcccagccacagc

SEQ ID NO: 61336 - DNA, 2346 bp, Homo sapiens
cttgggaacctgggccccacggtggcgtgcatccctgggggttgctcccatgccagccaggtgacgctgacaggatgggtccctttaccccagacttgggtgctgagggccggagctccatgctggagcccgcctgctcgctacagccaggcccgagccacagcgcgcccgggcgggacgcggggcccctgccgtggggcagaagtgcgggcagttgcggggacacaaagtcctcggagaggacgcgctgcgcggctcttcgcggccgccagggggcgcgcccgcgcccagggcactcggggttccacggggggcaggtgcgctcctcgagagtgcggaccctctaggtggggtgcaggacgcagctccccttttgcaaaccgcactccttccctggagggaacgaccacccctgcagttgctggaaccccgaagtcctgggcccggcaagggcttggtggggggtgaggtcgcggtgcacaagccctggtccccgacgggctagcgagaaactgcctccgttggcaaattcgtgggggcggctccccaggccatctgcctgcctggccgttggtccgtgcggcccctcacccctaaagtgctcgagactcaactgggcttcccgggcagcggcgagggggcggggatgtggcggccggaggtcaccggggcgtcactgcgcccgccctggccctcccccggcccgccccctgccccgccccctgccccggcccggctccatttaatggcgcggacgccggcggcggcgggctcctggccgggccagcgcagcggaagagccaagccagcatgtcggggacccgagcctccaacgaccggccccccggcgcaggcggcgtcaagcgggggcggctgcagcaggaggcggcggcgaccggctcccgcgtgacggtggtgctgggcgcgcagtggggggacgagggcaaaggcaaggtggtggacctgctggccacggacgccgacatcatcagccgctgccaggtgcgggctggggcgccgggtccctcccccaccgcccagcgagcccccctcccccgacccagacggcccctgtcctcccatgccctggccggtcactcacccgcttggatgccttccttccgggagcacctttcccagggccaccccacccacgcacgcacacgcaccactcacacaacccccgacccacacacaccgccctccttccacccacccctactccaccaccccggcagcgggccagggcacagctataaatacaagtcgctgagttggggacacccgatccttagggggtggcgcatgccatgggtgtgacgctggaccctccatgggggaaccagaggacccagccccaggatggtttgaggacccccaagacaccccccttcctcatttacagtgatcacctggggcctgtctgggtctgggatagggcttacctggctccccgcaaggtctgcaggtggtggagggggtaaaagctgcctgctgggtgggggtgaccccggtgagtcagccaaggagaggcagaggtggaagggggccaggccgtcctggggggcaattggggccgcgcctgagggagggtgcttgggacgatcctagccagacatgggagagggagggccacagacttctggccagggtgaccccgtggctggcagtgccaccgaggaggccagacctgctttgtcccccagggcccagggctgggcctctgccagccggcagctgctctcagcgcccccatctgttctgactgagctgcacactgggcactctctcgggccgccaccctggggctacatgccccatgccagggcagccaagtctgctgcccatgggctgacttacagctccaggcacaaaggggtcaactttgggatgcacgcgtctggggtttggagcctgcctggggctgctgccaataatggaacaagggcccccgcaccgtcccttctccgggttctgtggcctccttcctgagctccagagaggagggctggggcccaagacgaagggagtcagcccagcaccctgtgtggctcagggctgtccgagcccctcctgccggaagggactgtggcttcctagaaagttcttcctggaacagtgggggacctccccccttgctctccgtcctaagcagcaggcaagcacatccctcgctccagagatcccccaggtcctagaggtggtcctcagcccatgctccctccacactgcctctgccccgccaccttgtcctgggccgccagggggcatgtccagcgctctactgctcttcaccctccagggcgccctcagcgtggggcagccccggcccctgaccctccttag

SEQ ID NO: 61337 - DNA, 1301 bp, Homo sapiens
cctcctcacgagccagtgaggcaggatcatcctgaagagctccttcacaggggaacagaggctcaggcgtggaggaatgagtcactgccacatttggagccctcactggtgccacgtgcccaccatgatagcccagggcctggccctttgtccccacctgcgagtgcggggaccgagctggatctcagcggggcgccgctctgcaagggaaggtcagggactggtcttctttggggccccagccccaggctctctgcaagtgctcagtgacccctacctcacagtgcccatctctcctcctagcggtgggggttctcccctaccaccgggctcccagcacctcccctgttcttgtgcacaccatgtctgaccaccccatgtcgtcagaggctggcagagggtctggctggatctccccagggaagactgcgtctttcttacttggagtgtggatgcctgaagccagatgaaggtacccgacatgggggtctccaggcgcacagaggccaaacctcaccctctcactcaaggggctgagcagaggacagagcgagggccgagtggtccaggtggtcaaagtgcacgccgtgggcagagcgggctgggccgcatctgggaggcaggctggctgccaggagggctgaagctgccagccctggcaacaagcctgttctgctccccagtccccaaagggtcacctgggcctggggccaccctgggttttggctatgctccttccctggctgcccaagcctctggacacccaggctctggctctgcctgctgctgacgcctgcaccagcagagccatcacttcgagcccagctctcaagccccctggtggcccctggcacttggcaagagttgctgctttgctcaccctggacatggactttccactctgcccagaggtgatctggggctgcccaaagccccgcacggctcgcctcattcttttcccatcccggtggtttggggcctgtggtcagagtgcatctgggggcccctgagagtgtcgtcacctcccacagcctcccgccttgggtccacctttaggacctgtttcctgggcggcctcccttctccaggctgagcctacattttgcatcccccaccttctgaccacacccccacctcacacctcggctgtctttcctccattccagggcggctctgggtctgttcggctgcactatgccccctggccccactatgccatcttcctccttgcctgctcccctggctgcttccaagcctctctcccctccaggctgagtctcctctgagccaggtctgccctc

SEQ ID NO: 61338 - DNA, 2596 bp, Homo sapiens
atcacttatccccatgaggcaggaaagacagagtgagtgcggctgccctgggggctcggcactggggggatggtgacaggactcggggctcagggccgggctgcctggaacaagcagaccctgaggggccccctgcagcaggatccatggacccatctactgggccagcaggggccaggaaaggagaagagggagaccggtggggctggaggcaccagtgcgtctgtgcaagaggaggaagccctgtgagagggcagcagcctccggactgccctgcacaccgtgctgagaggcctggcgtccacctgcagcccaaggcagctccaaaagaaggtcctggtgcttctccaggaggcgaggctggccctgatgtttggtccctcctcatcggccagcctcatggtcagccttggctggtggctcccatggcaaggcagaccctggcctggacctgaaggctctgcctttgtgcagagccccagcctgacggtaccagttttcctttgttcccctttgtccagccctccttggatgcctttgctgtgggaatcccaggctgaagctggaggaaaggcaggaggacttcttgtccccagcctctcaccacgtgcctgtgcagcctgacgtcctgagacctcaactggtgatggggaggacagactggtgtctctctggggccatcgtcctgggctccccagaactgggagcccctgcggatcagcaggccccaggctcagcgtcctgagctggctcctgctcccaggggtggcctggcactggccctgcggtcattggacacccactggcctacgacaagccgcgcctgttcctaggagcctgtgtttgcccccaacagagccagggtgtgcctagcagggcgttcctgggcctgttgacgtgggcactgggcactctgccatggtaggcagcacttggcctgactgccaggtcatccctcgacgcctgcccccccgcccaggcggggctgtgtacaagggataggcttcccttctctcagtttccctacctgtcctcagagacctcacccctgactgcccccaaaaggcagcagatgcagtcgtgggcatgaaggtactccatgaccccagcggagaggaattaccacatatgtgccgaggcaaggacagagtaagagtgggggtctccaggagggtgctgtgacccccaaacccagaatctgttcgagtcacgccagggcctgccccgtcccgatggactgaacctgtgcgcccagggctgactcagcgtctgctgagcagcacaggctgagagccctgcccatccgcccaggctgcagaagtaccctgaccctccacccccaccctgccttggcgcctggcagcattagctcccacaaggcctccaggtgccctcagaccaccctccctcctgccaccaggcttcctgcatctctccacctcccaggatccccacccagttcacccagcaccgccccgcccagagccactgtcctgaactggtttcctataaggactgggcccagccaggcagggccaggcagaagtcagggcgtggaggtggggactcctgccctgcgaaggggcttcagggctctgagtgctgcctaatctgccagtgtgtgaagttacgtcccaggagggtgagccccctgcctggcatctctggatctgccccccctctgtccccagggttgccctgccacgaggcgccggggctgtttccgtgtaactcttgtccagatgcatcgtgaggagctagtgcagagggagggggccgccatcacggagggtcctgcttgggcaggcggggaaaggctatgtgagacaccccactgccaggcttgtgagggtgggaggggagctgagacccctctgccgggcagagagcagtggggtgtggctgggagaatcccccatgcgtagacaagttgagggcttttctgccgggaggtgaggcaggaaggtggggctggatctgggctctggggtcctggggacagagtgggccccaaaagggaagtagtgaaggagagaccagaccagtctgtggggcagggtatccgtgtgtggccccccgcaaccccaccgggaccctgcttaccctccaggtggagctcaaggagagagggcaacaggaagggtcccccatgccatccagtggctggccagaagtggggctggagacctggccttctctcctggggcagagaccttctggggctccctccaggctctgtcacactgggcctacaggggtctcttatggtggcataaagaccaaaaggtgctgtagggatatcccttgccgttggtgggggcctggcttcaggggcaatgagccatcatgggccatcagagatgctgcctcttcctcagctgtgaagcggggcctcctgcctgcacgtaggggagccctatcagccgtgccttgggactggagtgtccctgtatccatcatgccaccagcccacctgccctgcaggagcagagggtgggggcagcaggggacacccactggacctgtgccctgctgagcagagccaagcaaaaggcaggagggctttggttcttgccccacctggagagggtcccta

SEQ ID NO: 61339 - DNA, 2644 bp, Homo sapiens
cagaatggctttttctttttcattcttagacgggaggtgcctgcccaaagggaagggtttctgctaaagtgggtgagggcaggtttggccgtgggggtgctgaattcatgttctgtgggagggttaggcctcctcattcctgcatgagaggagcgagctccagagcggggcccgcagctgcagagacctgcaccaagccacctggaggtgttggcaccagcctgggccagaccctccccgacccaggcccctgaccaaactgctgccctccttccaaggtgcaggatgcccacatcccagtcccgcacagacgcatcagagctggccaccaaaccagacaccccaaaatccaacagcagtgccctgcagggacagacgaagccccatgtgggtcagtccatgtccggggggtcctcagtacccaagtgccttcagctcagccgggtttctgttccaggggggcaacaacgccggccacacggtggtggtggatgggaaagagtacgacttccacctgctgcccagcggcatcatcaacaccaaggccgtgtccttcattggtgagtgccctgccccgacctgtgtgtgagcaggaaagggggtgtcagccagcccaggagccccacgcatgggggcacggggcaccagagcctggtgatgactgctctagcagtaggctggaccccagcctccacctgccccaccaggcactggtgcacagaaacctgcatagcccgggcctgggctgggaacgcagctgagaggacacagggctgatgggaggaggggcagagtcacatccaccgcgcaggagcgggagtgcctgatccctgatccctgatccctgatccctcacatgcacatacttcctgtgtgggcatggagaccacacgcccatgtgcccgtgactccatgtgcatacctgtgagtgagtatgtgcttgcgacaggcctggcttctcgctgcgtggcgaccaggctgtgtggacaaggccgtgccctccccggccctgccgagccatgtggccgtcctcttgcctgggctgctgtggccacgtggcaggcctggttccagccccttcccagtccgtgctgcagagggacctccttccacatcgcctgccccctcctgggtccggacacagctcctcccctgcagccacctgtgaccactcagtgctccaagaggcgagccacctctgtccccagggttccgtggctctttccctccttctctcggtcagaagcctgctctgtgcaccctggcctcagctcttagcccaaaacccccttgctcagagaagcttttcctgatcccagtggccaagccagccaggccccttcttgtactttcccttccagctgtttccagacttcagcaaggccatccttgtgatgtatctgaccccttcccagcccgtcaggaagtgggggtcaggcgcctcaggtgtgtgcccagcagatgcatgggcctggacccattcaatgtgagcagagggaggaagatagcgcggaggtggctgccgcaggggccatgtgtggtcaggggctgagctggagtgactcacccaagaccatcccctggggtgcagacccagtccctggccctcccagcagtggggccaggacagtgtgggggcggtccctagttcacagcagggaggccctaagcagtgaggtggcctgcccgccatgtcgcaggagcccctagccctggcagactgggcagtagcgctggctggccgctccgggttgtgctgcaggaagcccttctccagccgccagcctcgtcctgcccagccctgggccccacatggcaggaaacaaggccaaagaggcaccgcttagcaagcggcaggacgtgccagggctcacacagacaccctgagcttgcaacactccgggcctctgccgcgtgtttatttcaggatgccgtggcatttgggtgaccttttgtgctcaccatggcttgcgtcgtctccgggtcactctcgtctggactgaagtcccgtctccctcagctgagcctgtgccatggccagcctcagcgggaactggcaaagggaaaggggttccttggggaggcagcaggggtttctgaaggcttcatcttcaagcaaggggtttagagctcaggagtgtatttgtgtttttttgttttttgtttattttgagacagggtctggctgtgtcactcaggctggaatgcaatggcacagtcctggctcactgcagcctcaacctactgggcccaggggatccccctgcctctgtctcccaagtagccaggactacaggcttatgccaccgcacctagctgatatatatatatatatatatatatatatatatgcatttttttttttttagaaatggagtcttgctgtgttacccaggctggcctccaactcctggcctcaggcaatcctcctgcctcagcatcacaaaatgttgggattataggcatgagccaccatgccccaccagagcggtgcatttgtgacaatcgatgaacctacactgacaggtcatgatcacccagagtacatagtcacctctgggttcacacttggtgctgtacattctaccagtctggacaaacgtatgctgtgtatctgccactatagtatcgtacagaatttttt

SEQ ID NO: 61340 - DNA, 918 bp, Homo sapiens
ccagctccctatgggacacctggatacaacctactggactcagcccctggcccccacacccctcacggactgtgcagacgtgccacagtgaccaccacccagtcacagcaagatgccatgaagctgatgcctgccggctcgaaatcacaccccacaggaaatgcacttgagtaacaacaccctggacctgaatacagatttggtgcacaggccgctggctcgctccccaccatctggctgggcctgcctgttccccgtggctccccctccccactggcctgtgaggaacgctgcctcctcgctcccgcccggttgagtcacacacctgctctgcagtttcatgtgttctgctgtgctgcctcctccagctctcacctgacccttgcacccaaacctcactctcctggtcaggactctcccagagagaccatcatgataggaatgaactgatcactgctcagacaaaagccacaggctgcctgccaaagcctagaagcaagctgctggtgagaggaatgccagcacagctggatacacaggcctgaggccatcagccagggtcaggaggcatcccacgagagcacacactgtaaccccatgcccaccgcccccagagccccatcagggaagggccaaagtttacagccactctccaggagagacctcaagacgaattagaggaaaactatgacaatgattttgtttaatgataattttcctttttcctagcactctggaaagctgccagtttctttacaagttaaccatcaatctgatgcagggcaggtgagccccaaaattggggcttaaccctggagggttcatggcttcacccaggaaggcattcaagggtgagccagtggtgttagccaggcaagtttgttaaagcagcagaatcctacccagcaacctctgagg

SEQ ID NO: 61341 - DNA, 1579 bp, Homo sapiens
gctgaggcaacacagaaaaacccccgttcctacccaaaaccaaaaagcggggcgcggaggcgcgcgcctgcggtcccagctaccggggaggccgagaagggaggatcgcctgagcccgggaggcgcaagctacagtgagccgagactgccactgcactcagtctgggtgacagagcgagaccctgtctctaaaggggaaaaaagagctaggaagaagcgggctgcctcttaacttcggagaagtaaatgaggaactataaccagtgtctaccgtttaggaaccaaacaaaagctgacaggaatcccgccaccgacccagccgccccagactttgccctggcctatcccgcgccgctcctcaaactagacccgccccgacgtcgccctggcctatcccacgccgatcctcaaacgaggcccgcccccgatgcacaagctccgccctcgttgcaccgtcctgaccctcggcctcgcccccgccccctggctcttcccgcgcagccgaatgccgcgacctggctcccacccttcgtcgcttcgcgccgcataggaaccccgcccctagtctctcctcccgcctatcctgagcggcgcgcgcacaaatctctcccacggacccgcccaccctgatcctcaacctggcccctggcctttcccgcggcgtcgagtccagtacaccgacgcacgagtcccacccccgatctctccctcggcctatcccgcgccgctccgcgcaggagtcccgcctcccacttcgcccgcagcctatgacgcgccgcgtcgctccctctcctcaaacccgctctcgcccgcggatgggcgcgcagctgtgacgtcacggcgtcgttggtaaggggctggcggccggggagctgcgtagctcccggccccgcggccatgcccaagcggagctgccccttcgcggacgtggccccgctacagctcaaggtccgcgtgagccagagggagttgagccgcggcgtgtgcgccgagcgctactcgcaggaggtcttcggtgagtgtcgggcgggctgccgagggtccgctgcgtcggggcctggaacgggccgggcctcagcgtcccctctgaggcctgagcggggggctggagggccctgctttctggccccgcgttcccggaagctgggaggccgcggggacacaagctggccacgcccagggctggggtcagtgagggggatgtgaggaccccagcgttcgcccaccctgtccaacagcctgaaagaaaagggtccctgcccctagcccccgcgccctcttccacgatcccggttagtcgccgccctgcagtgagcggcacccgcctggtgctttctcaggactgtcccgtgcaggatgtcctgggagaggttggggagcggggcgtcctgcatggagtcaacccgaagagtgcccctcctgtcccaagaggtattcatggagcgcgcggccctgccaggcacggcggctttctcgggagaccaaaggcaggcaagacagatgtgccccgtctcccgggagctccccagcctagttggggagaccagcaggaggagtcgccacaggtggtcggggcagg

SEQ ID NO: 61342 - DNA, 785 bp, Homo sapiens
cactcctggcctaggcccagccctttctcgagagcccagagcacctcatcctgggtcccagcatcccggccacccgcctcggccctctcctgacccacttggtccagccatgtggacggggggacgctcaggaagacagccgcgagtggacaaaaacaggctccaggccggggctgcaccagggcagctctccacggggctaggctgcagccaggctggtgcacggccccaggagtactggggcaagcgggcaaggtgagcaagctgtttggggaaagtacctcaaaagagccacacagcctctggccaaagcctggcacggagctatcaaaggaaggaaaactgcaggctggaggccgagttcagccagacctgcgccctggcccaggattgattttttaaaattgtcagccttcaaaaatcaggagacttcacacaacagaacaaatctttgaaaatgcaaacgtctgagcaacactgagcccaccagaccaccaatggccagagctgagctgggctgcttatccagtgagacagccgaaacaggaggggacatctggccccctgtccctataggccccaccagcctcctcactagctcctgcccttaacagcctaagctcaccctccaggaaccatctccctgttagatgtgcagacccagaggcctcgcctgggtccagccacaggtccacacaggcctgcagccggaactcctgtgtccccatgcccggtcccttctgtccctgaagctcctctgactcagagcacacacatcagaacaa

SEQ ID NO: 61343 - DNA, 635 bp, Homo sapiens
gcagaagggcctgcacagggttggaaggggtggggctatgtccccagctcccatcccacccagctgctggccaggcccctcgggcagcacctcctccataggctgcaaggccaaatgagtgaggagggggacacaggggctgggggacttggctcagccagctctgcagctccaaggcaaacatgccctgtgcccaggcggtacggattccccccacccccaaagctcaggcctgaagcaggcaccaggccaagccaagcagccctgccctgccctcaggagcccttgggcagtgccctgggccgccagcgtgccagaccctggaacagcccagtgtcctcgctgccttccaggaaagccaggagagaggctggcagcagctcccccgcctgccagggcccacaccaggaagccactcagatggccggccctgcacagggcctcatcctcctggcctccccgaggccgtgccctccatgccatgggaagacatggggcccaggacactcaccctaggccagcccaggagccccaggggaggcagcccctcccacccagcagggcacaggcactcacagaccctggggctactacccccatctctccctccccaggcccagccctggcagcgggta

SEQ ID NO: 61344 - DNA, 2380 bp, Homo sapiens
acacagggtggtgtacgtctgcacagaaacgtatacaccaggccagcacagggctgcctgtgggggcggagggaccccgacttcccacagcctccgtacctgccgcctgcctttaccataagcacatattcttgctactattattaagtcacaacttaaaaaaaaatactctgttttcgaaagggctcctccatctgcctccagaaccctggtgtatgagaagtctacacagctcccgggagaggcaaccggacccccaccaacggactccgtccgcccttcgctcggatgagggactcaaagcagtcaagaagtggccacctggagcaaggccgagagacccaggagtgaatgtggggcggcctctggctgcagagcaggggcccaagctcacccgctgaccaaggcagcactcagaggccgtcccgacaggaccaagctcgctagcgccccaggatactcaatctaaggggcaagccccagctgccctccaagccttggcctctgggatgggcgggcaggacctccagggcccacccaagacaggaagcagttccggggcccaggagggtcacagtcctttgtggctagcctgggtaccccgccaccacgtacaacttttcgtccgtgggaaacgaagtctccttccggggccctcccacaaacttgaaggccggccgcggcgagtctttctccaaccccggggcacctccgccggctgcctcgctggcccagcgcccggggagccccacggcccgcaggggcaccccgagccccagctccaggcccggcggcgtcccttctctcgggtcccggcctcgcccggcggagcggcctccccaaggtcatgagggaggctggggccggcagcctgcacccccggcgcccggcgtggggccgccctcccttggccgggcccgcgcgccccgcgccctccccgcccaggcccgctcggccacttcctgctcccgctcctccattctggcggcgccgcggctcgcgccccggcccgaccggccgcgaacaaagcggcccggcccgcggggaggaaatccaggcccgggcggccacggcgggcggggactcaccgggccgccgcgtccgggcgcgagcgcgggcctagccgggccgcggcctccggcgcccgccgctccgcatccccgcgggccggcgctgggcggggccgggctggaggccgcggcgggcgggggcgctgctcggggccgggcctcgcgtgccgccgccgctcggtgcccggtgcccagcgctcggtgctcggccgcctgctcccgtcttcgggccgcgctgcgtgcgctgggccagccgcctgccgcgctcggtcctgccgccgccgccggcccgccctctccccgccccgcgcccgccccgcgcccggagccgcccgcccacatccgcctccgccgcccggggcgtccccaccgcgcggccggcggcgagggcggagcgcgctcggggagcgcgcggccgggctgaggggcagctcccgacgacctggggcctgggctgggccgctaacggagcccggccaccagccagcccgtcccggggccacgccctctctggcctcagtttccccgtctgtaaagtgacccggcgcttctgggctcgctctgccgtgaccctagcagaaggggcccgagacaggtcagggacgaatcccggacttctgcctccgcgcgcggggcgggggtggcttaggttgactttcaggctgccccactctggggggcgtggagggggcggccaagagtgacctaaaaggcccaatcccaagaccttgtgcctctgggggaagtgcgggaggatgccaggacaggaggtcagttggaggtgggcctccaaggagcaggaaggctccgaggggagtcaaccattcacctaggtactggcagctacactcacaaaagggggactttgctggggagtgggagaagaggggcacaccttgcctggctcccaccttgagctgggagcagacaccagacagaggaggagcggtgtctagggtgggctgtgacagctgacagcccagagccctccctgctgggtggacttggtcagcccggacacccagtccgaagtccactgggaggcagatggcccgggtatggaatgagtaagtgggacacagacccctttctcctggacactcacaggagagtgcaggtgactgccaccccgaccccttcctagccagaagttcctccgacaactgcccctcccccattccagaggcccacagttgataataacccttttgtgaaagacagactcttgtgagttaccttcctgaggctgctaagtattggggttgggggagcatttttattttcagccagagtgagttcagctggcagca

SEQ ID NO: 61345 - DNA, 1648 bp, Homo sapiens
ccagctgaattaaattcaaaaagaggctttcaaggaagaaggaggtgtcatctttgcaaaattaacgacccccaatccacgcaacccctacgccatcccaaggccggcgccctgcgaggtggcgggaggccagggtcccgggtttaccctcgggtgactgcccaacgcgggctgggatacaagcggaccctcggaagggttccttttgcagactggcgcagtaaggaccccatgccgggaaaggttgggaggtgggggacccaggccaaagcgccaagtatcgcgagagaccccctgcccccgcgcagtgccctaaacccccctcacaccccagcgcccctgctggctgcgcgcggggcccggccgggtggggcggacagggaagggggggcgagggtgacctcagcggttccgccgctccgggaagtcgctcggcccgccccctccggcccccgccccgagtttcgctctctctggggcggggcgagcggcgggcggcgctgggccagccaagttggagcgcgccccgcccggcgccctcgccgtccccgcgccctccccgccggggcgcgctgcccgcagctccacgcgcgccagggccgccctggggagggcgcgcgcgcgagcggcgaccggagaggagctcggggcggcggaggtgagcgctgggggtgggctcccggctctgcccgccccgcccgcccgccggccctctccccgctccccgcggccgcgctgccataaatggggccggcggcggcggcatctggtgggccgggcggcagctggaggcggcgcggaggcgtggggcgggtggcggcgcagccacccgggcgtcggggacgccgcgagcgggcggccgcccgggagtgaagttcaggagcgcccgggcggggacgcgcgcaggtttgcgcggctccggctcctgcgcctgagtcccgggacccgcccccgcggcggagctgctactgtttactttcgatcgagtttttcctgctcggggcaggtgcccgcggcggctctggacgggaggttgcgcgcgtcactcccgcgccgctctttccgcgctgcctgcagccgggaagggcgcttcgtgggcgcctccaggcgcgctgacgggcgtcccgtttgtgcccaggtgatgacggcggcggcatggagttccctgagcacggcggacggctgctgggccgcctgagacagcagcgcgagctgggcttcctatgcgactgcaccgtgctggtgggcgacgcgcgcttcccggcccaccgtgccgtgctggccgcgtgcagcgtctacttccatctcttctacagggaccggcccgcgggcagtcgcgacacggtgcggctcaacggcgacatcgtcacggcgcccgccttcggccgcctactggacttcatgtacgagggccgcctggacctgcgcagcctgcctgtggaggacgtcctggcagccgccagctacctgcacatgtatgacatcgtcaaggtctgcaagggcaggctccaggagaaggatcgaagtctggacccggggaaccctgcccctggggcagaacctgctcagccaccgtgcccctggcctgtctggaccgcggacctctgcccagctgcccgaaaggccaagctccccccgtttggggtca

SEQ ID NO: 61346 - DNA, 2046 bp, Homo sapiens
tcatgggttcaggcaattctcttgcctcagcctcctgagtagctgggattacaggcgcccaacaccacaccggctaatttttatatttttagtagagacggggtttcaccatgttggccaggctggtctcgaactcctgacctcaggtgatccacccgcctcggcctcccaaagtgctggaattacaggcgtgagccaccgcgccctgccaagcaacgtcacttattacccctgctgacttgggagcaaatgtcacatataaattcccccacgtgcggaggtgtttccctttccttgctgtgtctgcattcgacagcagccacgctaagcggctggaccaaatggagcatcataacgtgttattttattttatgattttattttatgttttttgagacagagtctcgctcctcccgtccacctgccggcgctcctggggcttcgggccacggctgtctcctccgggagcggcggcgctgtaggaagcctggtcctctccctcagcggtcacagccatcgctcgcgtacgcccccggactgacgcctcccgccgggagccctcttcgaatcccgcctgcgcaactcccacgccacagccctgggccatccctgctcccgcgcagccccggccgcctgcctcctacctcgcctccccaaggccccagcgcgccggggcttccctgtcccgggcgcctgctcgtggcggcgggcgggctccttgtccggctcttaagggccggcgccggctcctgggcctcccctccttcccatcgcggcctgctcctcccacccgccttctccgagctgatgccaaggccggacggacgcgacaaaggcctgctgccgaacgtgacctgtccgcagagtagacagacgggccccctgaccgccagactgaggagacccggcgggcgggagcggatgggcgcgcctgcgcaccccctcccggcgctcgccagtcacgtggggccgcgagtggcgccgctgccggaagcgccccccaaggaaacgcaagcagtggcggagcggggttccgcctgggccgggctctagcgccggcgctgcgcgggagtcatcgcgtgccgacttccgtgttgtcgctctcccctcccaaaagcgcggccgcgaggacgggcgctgccagcgatttcctcgcctttgtgtcgcggggctgtccgctgcgcgttacttggtgcgatacgcgcattcggcggtgatcccgagccccacgcgaacctccctgtgtccttgctagtgcctggcgccgtcactgacgctgaggcgtgaacacggagtcggcccagaggggctgttctcccggacgccgaggccaccccacgcggccgcagggccgggcagaggggaactgcagggaggcgcgggccgcatccctcccggaggtctgcgagcttcttgaggcctcacgcccccttttgagccccgctgctgccctgtggcgctgcttctccatccctgcgggtgaccatcgacgcgttccccttgctcgcttcttggttacgggccaggggatactcctgcccgaccctcggcattgcccaagggagtttgcacttcccactgtgctctgccaagcctctgtggagaggagccctccacctgcctgaccgggcccagctttggggaagaccttcttggttttgtctgctggctggactgaccctggccctcagcccaggtgaggcgaccagcggcatgatgcccgggtggaacacggatttctctccagggtggccgaagaatggtttagaagcagcagtgggatgagggagaatcccgaccccgtctcaaaaggtgaagatacgtcaggtctgggggaaaaatatccctactctagagggctaagagagcttggtttggtgcaaatctgagaatccctcaacactttaatttctttaatcctgctaacagttaacaacttcctacaggctgacacctcaggaataagctccttcacctgcgttccctctgtttcctctattctttcctccaatccttaatttttttttttttagatggagtctcact

SEQ ID NO: 61347 - DNA, 1928 bp, Homo sapiens
gcttgagctctgaccgcaacccctggcgctggttggagggcacacgggcaaggcggtggtgggagcgctgcggcagtgcaagaccacagagcagggggatatgcggggggtgggctgggagggctaggtggggcgtctgacgaggctggggaactcctgttcttaagctcaggccggggtgagcactgtccctaggagggtgtggccaatcctcgccctcaaggcactgcggcatgaatgaagcgctttaaagggagttcccaaaatgaaatccctaagcgaaaggtctggtccttctgggaagcggagcagactgcgacagctggcgttggagcggggggcggtcccaagtcatcctcaggccacccgtggccagccccaagctctctgcggcgaggagcgctagccccagagcctggcgtcctgctggggaggcgcctttcccgcggcgctgggcgccctgggcatccgggaggagcacccgtcccgccctctccccgcgcccggctccgcactccccgccagccctgcgccccgctccccgcgcgccccctggcggcaaacttcgcaatggctcccgccgcgctctgcttttcggggttgccggaggggcggggctgccggaggggcggggctgccggagggggcggggctgccggagggggcggggctgccggaggggcggggctcgagtgggaatgcaacccttggacacggtggatcctgggaatctaaccttccgtcccggggctgatgagctccagccctgccccaggaactgtgctgggggcccctggggatggggacgcaagctcagagggcggagacctcgggcgccccggcttcgtccgcaaggcgagacgggccgcaggggactgctagggtctgcaggggggtctgcgggggtgagggggcgggtgggctcggaggatggccccgggctcccagggaagctggaagggcgtcgggggaggtgacggcgcggagacctcggactctcagtcctgcaggggccgcggacacaggtggggaggagtgggggagtttttccctgggagaaatgggaagcgtcgaaggattttaaggagtgcggctggtcgggtttgcattcggggaggtcgctttgtctcttgagtggagaatgaggaggtggcaacagcaggggagtcaccgggaggctgctcgggtccagctcaaaaacgccaggcccgcccccgccccgcaggtccgcgggaaggaaggaaaaggcgttggggatgcgtaggaggcagaggccttggtggtcgatccggtgtggagtggggcaggggctgcgaggagggcgcccaggactggtatcagtgaacagtgacggtggggcagggcggtgaccttagcaccagcgcttcggtgggggggaggaagcacctgagccgcggagaaaggcctgcgtgaggtgggcacaggctggcgttgaagccctggggtggactcacgtccaggggagggcggtgcttcacacgtcccaggcactgtcttgtgtggccccaagtgctgtctgaatctctcctgcgtcttgggccccagcaccaacagccgtcgccctggagccaggcagcagccttaagcttccctgggaggctgactggctgggagcagggaggtcccatcggggaagtaggggcgtgcagggggcttggcgcctgcagtcctggaggggcagggcagatgataaggctaagtacctcctgtcctttgctcagccagccactaggaggaggccgcagagaagaagccgccaggggctgggggaggccagggacggggcagggaggaggggctgggctgaatgcaggtgccccaggagctgcgggctctccttccacaggttcgtgtctggtacacggctggagaaggcagggagggtgggaggagcctggcttggagag

SEQ ID NO: 61348 - DNA, 2953 bp, Homo sapiens
cagggcctgtggttggatgcctggttgctccctccaggcatgttttgccatccactgactttgacacccggagctctctctttcaaaccctcatcggagcagatctcagccagcatcaactcacattatccttgggaagaaatacaggcacccggatcacctggctgcaggtccctcccctggcctccctcctccccaaccttgcaatccaagctcctgccggagggtctttcctgggagccagcccggagtgctcactgccctgctctctccctaggcaagtgagttcccaccaggtgcttggggtggggctcccgccatactcaagggcgcctcttgactccctctgaactcgcaatcccgccccagggtccggcacaagggctctgctggggctgagatccgtgaaggcagatgcggagaggcgccgctggattgcgagcaggcccaggtgcggggccaggtgggcgttgtcgcagccgggaacgcccagccgctccagctgcccacaggacaaagcccagggttccccggccgggcgcacgccttccacattctccctcacctccacgccttcgctcactgcgttccccaacacctggaatgcagcaatgcccttcgggcacgctgccccgcccccacgttgatcccgtcccctagcttggctccagggacaccggatacgcctattgtagcacccggcaaggagcgagcagtccgcgggaacttacccaggaaccccgagcgcctccgtagttcccaaccccacccccacccctcggccaggtcaggtccactgtgggcgtccaggtaagacggcgtcgatgcccaccaccatcgcccccagctcagcccagagcgcccggggtcagaggtggagatgtcggacatacgcccagtctggccaggctcgggagggaaaatctgggagcggcctctggaactcaccctgactccttcaccgtccgctcctctttttggcttccggggccaaaggttggggactcgaggcgcggctggagcctacagctcctggagcgtagttaagcgttaacccgctggccctgggccagggcgcggggctgctgtgcgcacccggttccgcccgtcgagctggggccggaccgggaggcgaagcggggggcgctgccgagacgggagggcatggggtctgcgccgggtgcgagatgagccggggaggccagcggggcctgggcggtgggggaaggtgggcctggggcaggggcgggatggcggctcgccaagcctctgccgaccggaccacgcgcggggctaccggggcgggctcacctggcggccgcggacccgccctaacctggtttccggcggggcggcgcggggtgcggcgcggccgggcgggggcggggcgggcgggggcgtgcccggggcggggcgttccgggggcggggctgagcctcccgcagacgtcagggacccgcgcgcgaggccgccggcggccgctctgccgtgggctcggcccgggctgccacgagcgtgcgggcctcgccgggcatgtcctaggcggcggccccgcccagcgctcggccgggcgggcgggcgggcgcgagggcagggaccgagccgggccgagctggggaacaagccggggaccaagccggggaccaagccggggactaaggcgagccggagaccgagcccgaacagcaggtaggacgcgccggcccagcgctggccgcggcccgggcctcccatcgcccgcacctgcacggctgtggggtctcacggggcgcggggtcccggccgaggccggacaaaggcgcgggggttgggggccgcccggcgcacctggtcaggcgggtccccgccgccgcggaggcggccctggtctgcgccaggccgggaggagccgccccgtttctacgcggcctgcggagggggcggcaagcctgggcacccgggtccccgccccggcaccggctcggccatggccgcccccggagagcgctgattcagaaggcgccgctccctcccccgccgggcccggccgcctccctcctggcctggtctctcctcccgcggtccctccctccgtcttcctcctcctcccctctctcctcatttcccttcgccgccgtctccccgctgtccctgcctctcccggcctgtgcgctccttccaccgccggcctgccccgcccggctcgctgcccttccctgccctgggcctagccacctttccccgcctcacctctgactgtggcccttccggccggggcggctgaggggacaagtttggggcgtttattattcttcctcctagcaacgatggccagcccagccccgaggcagccgaaggccgttttggagcgtcgcgggctcccaggccttttcagggtgggcggccggggcagtgggtggcctggctctggcacagcggcaccaccaggctctggggctcggcttcatttcgccttaaacagggaccgtggactcctcagggcgggccgcggcaggtgatggcagagggtgaggcctaggagggctggctgggggccggaggtgcaatggtggggtaggccctgcccgatagagcaccctgtggtctcccccagcagccctagggagggtggggctgtagaggcctcctggaggctttgctgtctggggctgcagggtcatcgaagtgccagccccttggcctccagtgcctgcctgtctggctggagctgggtgcgtggcttaggaagggcagggcccccagagtgagagggtcctggctgcctggagctgccttctcctggtgaggatttttctacatcttcccacctccctgcccaaggtgagggtttaccatggggcacgtggtcacttgggcattcatgctagctggagctgggtgttggttttccctgctgctcaccgaagggagctgagatctggtgaagagcctcaaagctgaagaccttgggcgt

SEQ ID NO: 61349 - DNA, 736 bp, Homo sapiens
gtaggtgcacacatctgtgtgtgttgtgtgcatgtgtgtgctgcatgtctgtggggaggtgtcctccgtgagagcgtgtgacagctgggatttgcactcttgcgtgctgccccagagaccacagcctgggcaggccctgaccttctgtgccccgtgcatcgagccggtctgctgcgggtgcctgtggccgccaatggggaactcgggtgagctggcaggagggtgtgcccagagccctggctgctgctactgccactcagcacagctgggccaggctgttgccccagagggcgtcagacgtgaactttgggaacatctttattctgttttaaagtgagcacaaattattagacactttccccaaaatccatgtgtttggggcgtcttccggccatgccacacatctgtgtttgcctggctgtttctgcaccgagttccgtccacagcccgggtttctgttgttttaagtcttgagccctgggccgggggccacttctcattggtggctggaggctcggccaagtgaggggctgcttctggttggagaggggagtttctggaagggggttccccatgtgtctccagcgcttcctgcagtctggggaggggcttggcaggagcaggtctggtgagaaagccctggccgggggtggaggctcagtcctgggagtgggcggggcagctgggctcggggtgttaacagggtcctgcggggggactctgtgctgagtcaaag

SEQ ID NO: 61350 - DNA, 578 bp, Homo sapiens
ccctgactcctggcccacaggccaggcctaaaaaaaactcgtggcttcccggtgcctctgtgtgagtcccgcgcgggcggcccttcatcctcttgccaagggcccgcctctatgcgcccgcccctgcgaaactgcgccgcgcgaccgccgtggcagcgcctcagctagccccgggtccgcgagaacctggggcggggcggggcggggaccagacgggcctcccaggcggagcgaaccctccacctcccaccccgcgccgggctgccgcgctccggaacccaaattcccgccccgaggctgccgggggaagcgagaggcgcggagcccacgcccgggactccagcggaggaaacgcagaccaaggcgcagcgccgcgcacccaccgccagggggcagctcctacggcgccggacaggggcggcgcgggaggggagcggggctgaggggaccgggagggcgggaggggacctgcgactgaggggacagggagggcgggaggcgacccgcggctgagtgagggaagggcgggaggggacccgcggctgaggggaccgggagggcgggaggcgacccgcggc

SEQ ID NO: 61351 - DNA, 736 bp, Homo sapiens
catctcatgacccccaccgcagagaagagaccacccacacatcttcgcatggtatcaccacctggggccttcccaacacggtggtgctttcttggggggtcgtgggaggtgctcaggccacaccggggcagcaggtgcagggtgggggccggggccggggaggggttccctgtctccccagttatcaggggcccagctctgcccctgggaaagaggcaacctgcccctggagtaggcaagagtgtgacacccagagcccactgggagtgaactggctggtgttacagtcggcagcgctgcgtggggtggtcccagcatggccaccagggggcagcctcggcacaaaagccgcccaggagatggctccctgctgggctggtgcctggtgtgtcgggcagagggcaggtttggactggacaggaagacgagagcaggggagagtccgcccatctccagcctgctgagaggaaactgcaggtggaaaaggcctggaccaaatccaggctgggaaaggcagtagttggcagggtgcttgtcaggaatgcacgttcctgggccgcagggttggggagggtctgggaaccggtgtgctggacagaactcccaaggtctctgatcttgcaagtctcctaccaaagctccagcgagagccactgaccttattccctaagagcggatggttccgtaggctggacacagggagggactgccccagacgggctgggaaccatgaagc

SEQ ID NO: 61352 - DNA, 719 bp, Homo sapiens
tggtgcaggtgccccgggtcccggcggccccggctttcacgccccttgcagacaccagccctgctccagagtgcggtagcacctcccaggaggccgcctctcgaccagacagcgtcccaggagcggggcaggagcgagaaggagagacagacagggaccgcgagtgacagagggagtgagcgacagagacgagtcagccaccgagaaacaaagtgagcgacagagacagtctcagaggccgggagaggagcaggaacctacagccacggacaggtagaacgcgaggcatgggagaagagactccagcggccgggaaggcccagaaccacgcgcgagtcccgcaggcgtctccgagtcccccgcccccaaggcccgcactgcgcgcccctggacacgccccggcgcgcgccctcgcgcgtagcccacccgccccaggggagcgggctgcaggcggggaggggcgcaccgctgccgggggttccgggccaggtgggcagcaccatgtggaagcagtcgcacatcgcggcggccaggcggtgcgggcctggcggcccgtcgcgtccagtcgctggtcccggctccggcgcacggggcgggcgggcgggagccgcgctctgccccgctgccctgcgctgccgcgggcggccgacctcggactgcggacaccgcgcgccaggctacccagccgctcagctaggaccccgcccggctccgcccag

SEQ ID NO: 61353 - DNA, 870 bp, Homo sapiens
cacactcacacacacacagacacacacacagagacacacagacacatacacatagagacacaaacacacatgctctgtcatacacacacacacacacacacacacacggacaccttttcctggggtgggaagaggccaggctgtaccggaagggccaggcagacacacacactcatagataagatcacaaactcaccaagacacagacacaggccacctgagatatttgatacactcaggcctgcatgcatgaacacccacaccaggatacagacccatgcacgtgtatacatacacacaggggcacacgcattcctgggctcatttggagaccacgcacagctagcgggcccaggtgagccacccgggcacgatgactcaccctagacagttcccgttagccgcgctgcagccaccgggcagccatccagcagcaggtcagatggacgccagagccactgctgggaagaggccctggcagcctcctgccagtgagcccaggcatgatgggcacaaccttctccctcgtgtggggacctggcgcaggtcttaccccaccccctcgcagtgtccttttttcggggctgagcagtgttgcctggggtccagaggccctgcacttacctccctccccaggagcccaccctgctctggtcacctggagtcagtcactccctggacacagggagagagccactagggtgcctgggtgcatacacctctgtgtgtgtccctggatgtgtctatgcctctgcctggtctgctggggtttcgcccgctagtcctctgtgtctgagtctggctgcagggcctgggaacgaggggccgctcagggcactcacccacctttgtgtcctcagcccctttagg

SEQ ID NO: 61354 - DNA, 1485 bp, Homo sapiens
aaaaaatcagccgggcgtggtggcgggcgcctgtagtcccagctactcgggaggctgaggcaggagaatggcgtgaacccgggaggcggagcttgcagtgagtcgagatcgcgccactgctctccagcctgggcgacagagcgagactccgtctcaaaaaaaaaagaaaaaaaaaaaaaagaaagaaccactcgggcggcgaactgagcacggacagaaagctcgagcggcccggcgcccagggctcggccagtgtggaagcccgatcccacccgcagcggaggcggcccggggcagggagggcgggtccggggcgggtcctgaacggcgggggccggcgctggcctcgccccggatgcgtgctgacgccacggcgacggacgccggaagcggagctggcgcacgccgttgccaggcaacggggcggcgcaggcaggagggaacggctggttgcaggtttctctcgccctggtcccgcgcggccccgccgaggcggcgaccaaggtgggtgcggggactctcgggagccgtgggccaggcgcttagccggccacctcgggccctgtccaggcccaggcgttccagggctgctctgcgggccgcgtgcgagagggactctcgggaggccccggggcgccgcacccactccttcccacttgggactcccgcgggcgcccggctctcgctcctctggccagcgtgggcctcccaggccccctcgcggctctctccagagcaggagccccaccttgggccgcccctctcacacctgccgtgggtctggtacgcgcctctgtgtcggactccgcgcccgcctgcgtgggaggaagccaggactcccgggcgaccgggccattcctgtggtttgtgtcagttccacagcagcacgtgggcactttccaccgtcagccactgggcagcccggggcactcctgcagcgtcccctggccctctccagggcaggggaaggttgggcagtcctgggcggccagcaccccggcgtgcatgtctcctgagcagctgcccatcgggcctctgctggcctgggggctccaagatgcaaggccggcgggagctggggggagagcctttgagtgacctccaggaggaagcagccagcgcttccctccgagtggcacctgagaggctgagtgatgacagtttggaatggagacggacctgccccgaccttctcctgtccgatgggaaagccagcatctccatgccccgtgagggcggttccacctgcactgcccgatgtcctgaccctggggaacacagcagcacttggggggagtttgaaggctttcgggaatcttcagccaagtctggacaattctcacagtcccttgaactcctcgagggacccacagaaccccagccaccgagaaccacttctgccccaaaagagtgcagttctcaccaaccatgccagggtggaccttgggtgacaggaacttctgccgtcccaccttctgaggtatt

SEQ ID NO: 61355 - DNA, 2246 bp, Homo sapiens
ccctaattataaaacacggtgacacttgaaaatagagtggttgtacgtagaaagttgataaaacgtaagttttgtgaacaggcaatgtttttctgtggctcgctttgagagaacggttatctgggtcccgccgtcccgtgcgtcccacacgaaggccacaggagaagcgaggcagcggagaccctctattccagcaagctgtcggagcctttgccacgacgatcctgtttgcggggcgagaagcgtctgaagacgcggagggaggcttgcgtctgacttctgcaagtgtctcggggactttccctagtcccacctcgcaccgccggaggagcccagggaagacggcgctggccgacccgcccggggtctgggcctcctcccacatccgcggccctctccgcggccgggctccgacagagggggctgcggcgcgcctggcgttccctccgctgcaactagagccgaggtacgggaaacgccgctgcgtaccccagccgggccctcgtgaagcggctcccgcgtggggccgcccgcaggcctcggcaaagccccagctccgcgctccgcaaggaacgcagacggcggcccgggcccctctgttccccgggccccctcagcagcggccaccccgcgggggaaccagcgcccaggagggcggcgagggcgccgcggcagccccagcggtggtcccgggcgccgcctccgccccggacccagcgccaggagccacagactccgcgcaccgcccccaggctcctccgcgccctgcagcacaaaagtgcacgccgccgtagacgccctagcggtccgccgggcccgctcacctgacccgcgaggccgcccgccgggtcctctgctcagccaccgccaccgccgctgccgccagcttcccgccgctgaggaaggagcgcccgacggcgcggggcggggcgagcgaccgccactcggcgtccacaaagggtcgacgctgcgctctccgcgcgctacgcccgctgattggccactcgcgggccgggggcggggcctcttgttcaaacccacgcgggcggggcatctgtggcgcgtcttcccgcgctgcggcgacggccgttggggctcgcgcgcgccctcggttgccccgcccccgcccctgcgcccggccccgccacgcccacgccccgccggctcccaggtctccccgcgcccagtccggccccgccccgccagctcccaggtctccgcgcgtctggccctgaactgaacgcgcctgcgcctggggcccacgtggggccctcgggcgggcgtggcggggcaaacagaggtttggactctctcgcttctgcctggctcaacttctccgccgaggcatccgtgccggggtcgggaggagccgggcacggcaattcccgggcggtctgggctccgaggtctatccaagcctctccagagaccggggttatctccaaaggcttcctaggtttacacgtaagaaatgtaacgtgaaagttcaaagcaggggacacgtgttttaaatctcttagtggaaaaggttttaaataggatgcgagaacctgcaatcattgacttaagtaataccctgagcgcctgcagcaggcccggcaggcgtggctgcagctgagagccaagtgctggaagttgggggggaatcctcagatcaatccgcaggtgcggatgcgccaaggtcggtggtaaatgctgaaatgctgtcgggaaacctgggagtgacgtgggggcgctgctcacataggtctctaggataaggagcgtcttaaagcaccaaaaggaagagtggacgagaattcaggagaggaatggctggggcaaagcccgaggcaggggcaggaggcaggagcacgtctcagtgcagtgagaaagaaccctgtgatctcgtgggaaagttttaagtgtgaggggtggagggacttttgggctattctgggagtgggatggagactactggcatggtcagcagagaaggaactggaatctgaattgtgcttgaaaagaatcactgttcttatttaaaaaaaaaaaaaagggggtctctttcgcccaggctggacaacagtggcgtgattatggctcactgtatcctcgaactcttgtgctcgagtgattctcacgcctcagcctcccaagtagctgggactacagaagtgtgccactacaccaagctaactttttttttttttttggtaattttgtagagacagggtattgtcttgttacacaggctggtctccaac

SEQ ID NO: 61356 - DNA, 668 bp, Homo sapiens
cactgcgcccagccccaaaattgggaattatttcaaaataaaaagctggataaatgcatacacacaaggcagtatcgcgtattttccacgagtgcctgtgcaggcaggtaaggatttaggaaaggtctggaaggatgtgcaaaatgttccgcctgcgaaggttccgcggtggcggggacactgctccggctccgctcccgcccgcccgagcgctcggatggggccgcctctgcactgcgtggccacaggcgcggcccggctgcccacgggcgccctttgcagctgctgccccctggcggccgcgggcggctactagcgggaaagcgaaacccgcccggtccattcaagccccgctgcctggcgccctctagggtcgttcttgggaacgggcggacctttcgtcaacactttgcctgcaagatcccccattgggggaaccgaggaggaagttaaaggaagatgtgtgtttttgagcgctgctttgtgccaggctcatcttaggtgtgggacgtgtactatctgaattaataccccaccaggcctgtgggacagtcactgtcaccattcgcaaattatggatgaagaaaggaggtaccaagtggtggtatcacctgtccatagtgagctgtccctcaggagggtggccgccccacgcgaccattcagtgt

SEQ ID NO: 61357 - DNA, 2132 bp, Homo sapiens
ggcagggtgcagggtgaggcacagggaccagaaacttcttccacctgatatctctgagacagcggcctccctgttcccctcttgccacagtctctccaggataaggtgagggtgtcaggggcctgggtccccacttgcgaccccaccgggctgctcctgggacgggctgtgcaggccaggagactggcggacctaagaaactgagacgtgtttctcagctcccccaaccacgtccccagccccgccggtcccggagctgccctgccgcctggtggctgcggctgcgctgcgcccgaccggcccgcgctccagggcatccgacctccagttcccccgcccgcgcccgggagtgcgccgagagcagcagaggtcgagacagcagcccggaggtggtgttacccgcaacctcggctcctgcgctcggggccgcttctctcctgggtgcagtcagctctgcgcgggggaccctcagcacgccgtccacggacacggctccctcggccacagtctcctccccgccatcagacgcactgcagacctggggcctttgtttcccaggcagggaaatgggcgtgctgcgcccacgggcgcagggaggacgggggagcccgccctgggggcctggaggattcgcgtggcctccgcggtccagaagtactcctctcccctagcgatccccaggattctcttccccagttccctccctggtctagaaccgagactcacagctccccacccctcggtcccgagttccctgtcccctccccccaggccgggaaccacccagtcccctccgcgcctccccaacccccagcccagagcattcctgcccgcaccgtacccttcaatctccgcccccggccaggagcctccctggcccttcccgcccggcggggcaggctccgggcaggcgggcagcctcgcggcggcggcatccgcgcccaccttcatgccgccgcaggctggagcgcgcctgggcctgtcgaggccgctggcggagcagcggcggggcgggcggggaggctgcgtctgcgcggcccggaggagcccccgcagaggctggagcgagcccaggcaggctggggcgctggcgcggggcgagctggcgggggcgggagagctggcccagcgctgggtttcctgggtcccagcacgcacgcgcgccttagtggggcgccggcccgcttcccaggcagatcgcccttggcctcgcctctggctcttttatttgcacaatcaccccgaggtgggtgatgctattgttcccacttttcagattcgaaagtcgagacacaactggaattcgtatccaggttccagacaccgcccgtcctcgggcagaggtttgcgcagaaacaagcatcattcctgaccttagggacctcaccgagcctgcctgcgggcagggcagggaggtgctgagaattcgggtgcacgtgccagcacccggggccccagagctcccctccccatgaagccctccctcagccccctccctggagaaatggcgagccatctggaaggaggtcgagaggggacccgctcccgccaggacctctcttctgggagtggaggagtgggcggaggagaagggttcctgagtccccaacccggtcccaggccctgggagccgcccctcgccccctcgggaatctagttctctttgccaaaccgccagcccgggcggagggctgggggcgggggcgaagccgagcgcgctgacacacgcgcctggaattcccaggagagccggccgcggcctgtgacctcttctgctcttggccggccccagccagcggggccgaggggaggacaggctccctccacgggggtggggcgcacacccacctcgttcctcctgctggagcccgccctgtccgtgtccctccccctcccaggcagcctgcctggaggtagcagtaccctctgtgctccggacccaggcagatgtgaactcccctcactccacaaccaccagagacagcccggggcagaccctgtccagctcctgccccagggccttgagcacattaccaaatgctctgtgcctgtttccccatctctgcaaagggtgctaacggccatctcagaatggctcgttgagattcaaagtgtcttgtaaatggttgtta

SEQ ID NO: 61358 - DNA, 3771 bp, Homo sapiens
gctgccatcctccgggggatggtgtccttgggccctaatgggcttcaactgcccatggaagccctgccaaggtcccgacttgcagcctcctggcgggaccaatgtcctctccaggcccttcctgcatggaccagcccccaggggcattgctccaagccagcagcccctctgccctggcctgcagccctcccagcgcctgctccaggcttgacctctccctcaccttctcctccttcagctcctatcacccaagggcacagaaaggcactgtcgcaccaccagggggcgccctgcctcaggggcgggcttaggacacagcagtgctgcttatctgggagcccaggggctggggacagaagaggctaactgacctctggctggtaccttccgggcttcaggacaactcagccaggtggtcactgtgggcccactccccagatgaggaaacaggccagagaggaggatgccaccggccctggctcttgggagtgggaggtctgtgtctccaggattcctccaagccaccaatttgggaaagtcatctgacctctctgggcttccgtttccccacctgtacagtgggggtgggaaggcatcactgctggggctgagcatgggactacaggacagagcttggggccctggctccagcaggctggtctccagcccctgggagcagggacccaccccacccagcacaggtgcctaaaggctgttgtctccgccagcaggtgaccctgcacccatgggtgggggtccacagggccaactcagccctgcacctgccagctgaggacaaactctcctggggagcttttgggctgtggccagaacaagcgaggctgcctttgagcggctgcctttctgctttctgctgtgtgcgtgtgtgagcatatctgtgtgtgccaggggcctgggctcggtgtgacccctagcaggtatgccccagctgtcaacaccctctccctcctgtggtccccactggccccagatggaggccgagtcccccagcccagagcgccccgggggtcgggagtgcccactgctttgagccacagaaacccaggccccaacctcctcaggacccccaggcctcctgggccaccaggatgcaaaccccacctccaggcaaggtggaagcccatttggcagctgaggccctggtgcctgaggccatcaagggaggtcagaagggacaaaggccacggctcggccgagaggagggtgccgtccgctctgctcaggcactgggccgggtgccagcagcaccacgttcccacgctctatggtgccaatcttggcaccccagccctgccccacccttgccttgcagggaccagggcaccgggaatgtggctgtggattccgccccctggggccacggattcctgtctcagtgggcgggggtggaggacggctttccaccctttgatccttgccagttccagggagcgaggccacgcccaggccctgccagccaggccacaggggaggccaggaggcaggcccaggcgagacagagctgactccctcagctcaggaaccccagctcccagggcctgggcctgctccccaggtgccccagaagctcctgcctcacctcttgccagctgggcacggggcctggtgcccagactaatcgggcagagaccagcactgggcaatggcccagtccccaccttcagcctgtgatggccacagcaaccccttccctcacctccccagtctgccacagggcacagagtcccagcccctctccgccagcctggcctcacatgctcaccctcctgccctagcaccccccattcggcagccacaactgccccacccagagactcctgggcgcctggtgctgttcaggacactggcctgctcagcatcaagacagatcccagaatgtcctgggcttctgaccacaaaggagccagcataggctaaagcctggcacgcggctcagaaccctcaaccctatgtgcttgtttcctgctcccccagcctctggagccggctgacagctaccccctcagtacaccttcatgcgtccccgacccctgttcaagcaccactgagcaccccaaccagtggacaaggggacaaggggtcccacaggaaacaggaccaccctctgagcctgggggaggggagagcaatctcaaaatcccacgtgggaggggcccagggccaggagtccagataaaggaggggcccaaggaaggatctcgcccgggctcctgagaggcaggaggatggctccactctgccagccgtcctgatctgctaagtggaaattacagtcattagcgtcccctcccagaggcccgtggtgccctgtgggcctggaacttgccccaccccctctgccacatatggcccagggagaaggcgctaaaggtgagcgccggctgcagggcggaggactctggcctctgcggggccgagccacggagccacctggcttgcggggatccctgggacccagccttgttctactgcccacttgacgcggcgggcaccctccttcctggtgggtccttactcccaaccctggcctggccatgggattgccagggtctggtggggggggggtccctttccaatggggcgccttcctatgcagacagaggagaggggagtggtcaggctgggtcctcaaggtgcccagacaggggtgcgaggaggcaagtgctcaccggagcagccaggaacgctccctggaggagggggcccggaagctccctggctgcaagagtggattcctgagcaaaagctccgcgggtggagaaagagagtatggcgggggccacgggggtccgagtcccgacacgcggctgcgcactcgctcccctgcaccgcgggcggggctggggccggaaacgcgcgcggcggcctcggattcctgcgcggtgggacaagcccgcgcctgcgcgccgcccggacagggcacgtcgcccgcgaggggggtggcgggcccaggaggaggggaccccgacagcccctcaccgcctgccggggcgggccgccacgctggacgggggcagcgcggggcggggtcggggggcggcagaaggcgcctttgtgcgtcgcgtccccgagcgtgtcgcggcgggcccggcaccggccccgctccagcgcccgcccccggcccgcgccccgggccccgcgcgcatacctggcgaggccacgaggggattctgcgggccgagccccgcctgggctgcgccgccgcaggcgggagaggctgaggattcttttgggaagcccctccgccggctgtaaccccagggccgtgccaccctcctgatcaccgcaagcatggaccccccagcacgctgcgggtgggacaggcagggcccctgtggggtggcttgactggcctggagttggggacgaagtccccgggcttggtcccccgagggcttggttgggcgtcccggggtaggtggctgccgcggcgatgtgggcggcttgcgtgtggccgatcggggtcgctgctgagccccggagagcggagggtccaggctaggctgggggagcgagaggcgagggcggagccgcggaggtgtgggcggctttcgtggtccgagaggccccaggttcccggcagggcggggaaggctggggcggggccagagccggagccgcgaagccgcgatggagagggcctggagggtgcgccaggagccggcgtcagggcctgcctccatctcctccaacccccaccccatttattcctgtaacaaatccctaccgggagctggcacagcagctgtg

SEQ ID NO: 61359 - DNA, 988 bp, Homo sapiens
cttgtgccgtggcctggcatgggagaaggtgacaccctaggaggtggggaaggctgagcttaggcagatggagactccaaggaggtgccctccctggaaaaaaccccaaggaggaagcctgctttgagaggctctctcaagttctcactcagctccttctcctacctccctgcgcccggcctctgcgctccttgctccctcctcctcggcccagctatctcctccttcaagtggtagcatgaaagccaccacttccaggaagccttccctgatccccagggcaaccaaggagttccactgccaagagggtcggattgggcgggcgggaaggatggggcccagcaatgcttccttgaaaggatgagtggtgccccctcagatgtccctcccgcggcccctccccggcctgggggctcactgggtctgggaacccgcgatccggcgggcggacaagcggccgcccgggagatcggcgggaggcgggggcggggctccggggcggggccggcagcgcggaagatggtgggcggggcgcgggtcgtgggccgggccgccggcgggggcgcgggggacgcgggggcgcgggctcacctggcggtaatgcagcgtgagcggccgcaggtagggtgaggcggcgcagcggcccacggacgccccctcgatgcgctccatggcggcgcccggacaggcgggggccgcgagctctgcgggggccgacacggggcggcgccctgtcccgacaggagccttcgggcgggcgcgtgaccgcggctctgagcatgctccgtgggcgcgcggggcggggcggccgaggtgggcggggcggccgaggtgggcggggctcgcaggtgccacctgtcgggtgccgcgcgcctcggggcgctggtcgccgcggtgccagggaagccgcgcaggcacgtgggcgtcgcccgggggaaggactggccgggtcgaccccggccgccgggcggggccagccgggccgggg

SEQ ID NO: 61360 - DNA, 629 bp, Homo sapiens
ctcccggccctcagcatctgtgcatccaggtgtgggtctgggtacacacgctcaagcccgtgcacatggtggtgggatgggtgcgagcagacgtgtgtgcggatgaatgtgtgtacgtgtacacgcgtactgggtgtgcatgaatagcggccatgtaggagggtgtggtgtgcatggaagggcactcacaggtgtgcacaggcacacgtacgtaagggcattatgcatttctctgtggatggtcacatgcctgcacacgtgtgcccctgaggctgccagctccgtcctctctctggctggctgactctagctcagcagccagcagccagcagccagcagcccacgtggccctcagcccctgccctgccctcccctctggcatgcgggcaaaggtgacttggacttggcagagggcaggaaactccaggaaagctctgtggctgcatgagtgggccgaacccgcccactatgccccacctgaaattgggcaggacatgcgcgcttcctgcccactggccctgagcggtatgtgctgagctggggtaggtgggtgaacagaggggcctggctggccttgggtcctggcccttggtcccacaaagttcccagtacacaacaccaaactccac

SEQ ID NO: 61361 - DNA, 1068 bp, Homo sapiens
aagccctcagagcagagtggaccgcgctctctgcaagcgctggctgctggcgtccgtagcaagctaaatcgcgaagcatctgaacgaacgaggaagcccaacgaccatcccacaggccgcggccagaggcagactccggaatgcaaatggccaaacaagcaggtccacctgcgttcctaaccaaaagatcgctaactgaagaacgggcgcaagcacctgcgcatggcactgcgggtctgggggcggccgcctgccagcgccgggagccgccttccacggctacctctgcacagcgcgcggctcgcgccggttgctgggcagaagctcgagcagcttcgaggatgtcgggcctgggggcggggccgcgaggcagcgacgtcgcgcggggcgcggccctgacgcagcgtgacgcaccggcgccgcggcgggtacgggctcgggcgggcgggcgggcgggacggcgccccccgcggccgggcctggccgggctgcgctaggctgggctcgggcagggtcgcaggggcgggggtggcaggggagcgggtggcagccccgcgggtcacagcgccgccgccgcccatgctgctgcccctagcctgcctgcacggccgcgtcgctcagtgcctgacctccttgcttttgcttgcagagccgctcccgaggccccggcgcggcgcgagggcgcggggcgcggcgtccacaggcgccgaggctgcccccgccgccccgcccgcgaagatggcggcggaactctacgctcccgccagcgccgcggccgcggacctagccaacagcaacgccggcgccgccgtgggcaggaaggccgggccgcgcagcccgcccagcgcccccgcgccagcgccgccgccgcccgcgcccgcgccgcccacactcggcaacaaccaccaggagagccccggctggcggtgctgccgccccacgctgcgcgagaggtgagcccgtgccccgcggcccccgcgcccgcgcgcgcccacgcccccagcccgtgcctctacctttgcaggaacgcgctcatgttcaacaacgagctcatggccgacgtgcact

SEQ ID NO: 61362 - DNA, 2038 bp, Homo sapiens
aggttgaacatcactagccagtagagaaatacagaataccactatgatgagatgccacacacctgttagaacaaccgaaataaaaacatcgacaacaccaagtgctggtgaagatgtggggcaactggtgagaatgcataatggcacagccacatcacaaaacagttcatgacagtttcccatagagttacacatacagctaagttccccagagaaatgaaaacgtatgttcacacagagagctgcaaatgaatccttttagcagctctattcacaaccacctgaaactggccacagtccagctccttccacaggctggggtccatccccagcccgcaatactgcccatcactgaaacgtcccctccgaggcctgcagcagcctgagtggccctagggcatccgcccggtaaccaccaaggccaagggcagcagcaatcggattctaagtaccagacattgctgaaaacaaaactgcaggcacagagagtgacagtgaggggcagcttgaggggccttctgggctccccaggctctcttcaaccctccctgtgctggctgccctggcccacgcgtgtgtcgaggaagtccacgcacgccacgggggtccacaggcgcgcgaagaaggtctacattctcgccaaggggatccacactcgcgcccagacggcgcagaaccgcgcgccccgacagagcgtgcggtaccgaggcgctggtcccggccgcgccgtcaccgcctccagcccgcctaagccgcaccgagaaatccgcgcagcgccagcccgcgggactcaccgtccagggacacgaactggcccacggccgaggagccgccgccgctgctctccacgaactgcacctcggacacgatgatgttgtcctccagcactgagccgcaggcggtgcacaccgcgtccccgcgcgccgcgtccagctcgatgtccgtgccgccgcaaccgcggcacacgcggcccgtcatgccggcgaccgcgcgggcagcgcccggagcctcccaagactctcaagccacccgagcctccggagcagcccgcgccgcccgcccaggcccagccgcccaggcctcgccgctctcgcgaggccccgctccagccgattcgcagccgcagattcgccgcgcgcgcccgggccgcgccgcccgcaacggccgcgcccgcgggatgggacaggcaccgggaccacggcggggacgcgaggactggagccgcgacctccccactgcgagcgagctggcctcccttgcggcgcgccggcgtcggaggggcgacctgcgggggctgggcttcggcggaacccgagcggggcctaccggtgagcgcagccgaggactggcgcttgggggcggggccacggcggtgagcgcagcccgggactggagtttggggcggggcctcgtcggtgggcgacaccggggactagagctaagggtggggcctcgcggtgagtgcagccggggacgggacccaaggctggcgacgggacccaaggctggcgacgcgacctaaggcagtgggcgggcccttggcgatgaacgcagtcggggactaaagctggacgcggggcagaggagggtcctcctcggatagtgagcgcggtctccagcggcgagcgaggcctggggtgaggactcagccggatgcggggctgagggtggggggcggggcctcccgtggagagacggcctgcgaagggaactggagctgtgggcgggggaagggggcggagcctgggtctggacccgaactgtgggcggggcttgaggcgagggggccgagcgtggtgggcggggccttggctcctgagggcgacctgggacccaaccccgggctctgggagtggtgggcggggccagggcagctgcgctggggggcctggccgcagaggtggagacacccgccaggggccaccctgccccgccctccgcatttgcggcgtccgccgctccgctcgcccaggttccagagcctccccgtgcgccccgctattctccgttttctgttcccctaaaattcccactttct

SEQ ID NO: 61363 - DNA, 1999 bp, Homo sapiens
gcactggggtggcaagccccgtgggccaggaaagaaaccagctccaggtcaatttgctcgggctggatttgtttcagtaaaactacttgtagacaagacacagggcgaagagaaaagcaactgtaaactaactgtgaaacaaggaaacagaagagaggccagaaaaccgtttcctaaatctcggcttggcatctggtgctggaccacagccgctgccaaacagatgggggaagcaccctccctgagccccagagcctacacgtcgggccccagcggctctagccattgcctcctctttgcttgggtccccaagttcactgttaaccccagggccaggagccagccttggccccagacatttgttctccattgtcctgagcacaacgctgaaaagcggcgctgaataaggatgctgggacgcaaagagggcgcccggggtcatctggagccctggaggctaagctcggcagcctggcgccccgagtggcttcgagtccccgcgaccgccgccaggcccggccacctccttgccacctccctgcgtcccggggaacccacgcaggggggcgcgagggaggggctcggggacgggcggggcccgcacagccgggccaacccagcgggggtcggcaggagacaaggggcggcgagggcaggggggcggggagactcggggcatggcggggtggaggcgggaaagtgtcgaggccggggaatccgcgcgtggggaggtgggcatcgccagggcgacgatgagctttccttagggggcggcgcctgaagctggccgggacccggtggacccccacgactctcccggcccttgcccgcggctcccggggggcggggcggggcgccccgggcggggtctgtgcgcaggcgcgtgagtgcgcgctctcgcgcaccggcgggcggggacgccccgtgaggcgccgccggaggaagcgcgcgcgcacctcacttccggcgcgcgctgcgccggcggcgattggacccgaggcggcgagctggcgccccgcccagccaatcggcggcgccggcgcgggtcggagggcgccgggcgcgcgcggggcggccgggggcgcgcggggcgcgggcggggcgccgggcggggcggggcggagcggccgcagctcgtcgccgcccgcgggcctgtccgacgccggggcccggcccgtcccctccgccgcccggcagccatgtgaccgcgccgccgccctccgcgcgcccggcccgcccgccgcgcgtccgcggcccggccgcagccccaggccgccgagggagcggcggggccggcgccatggccgagcgaggccgcctcggcctccccggcgcgcccggcgcgctcaacacgcccgtgcccatgaacctgttcgccacctgggaggtggacggctccagccccagctgcgtgcccaggtacgcgccgcccgccgcgctttgttcccgccgggcacctgctgggggtgtcctggccgcggcctctgcgcgccccatccccggcccgggtcccccagcggagcccaggtcgccccccgcgcccccgcccgccggttcgacgcgtgcagccgccgcccccccgcagctccggcaagcgcggccccagccccccaggtcccgagcaccgggggccgcgctcagcttccgaggacccggtgctgctcagacccggcgggaccttggggctcccgggcggcgctcacctggctcgccgcaaccgcacctgcacacctgcctcaatgcggtgccggccggggtgacgagggtgcttcctctctcgggtaccacacgcttcctttcgcgttcggcgacactgtcagacctcggcctgggagcgacccccggcgcacggggcgcgcaggactcggttgtatcctccgtccagcgcgcggtggagatgccctgtcctgcggggcggggtcgtcctcgcgggtacctggttggcgctgtctctcatttagaggcgtcgccaagccagtactgctatttgcgcctccca

SEQ ID NO: 61364 - DNA, 585 bp, Homo sapiens
ctctggtttgcatcatgcacaggagtgggtgggtgggagtttcagtctcccagagagcatactgttgggccatgctgtctctggcctcctcacccatggaggtcctgccccgcccccatctgaggctgggtggccgaggggtctgttctcagactggggcctggcgctggcccggtttcctggaggaggaagcgggggagtgacctgcggaggacttccagcctccccttccgcctgctgtgggctgcatggcgctggggctctgcccagccctggagagtgttggctgctctccttccagctgacatggaaatgccatgcagggcacgcacgtggggcactttctgctgagtcaggtttctctgaccttcctgaaatgtcacttgttctgtaactcacaaaaactggggtgctgggatatggtgccttccttctcccggaagtccctgccgaggggggcggtggtggggcattcccagggggtgtttgtcctttgctgtctttactttcccaccttgttccttgggcctcccctgacctattgaccctgccacagctcgctcaccccaggtccctgggggctgt

SEQ ID NO: 61365 - DNA, 1993 bp, Homo sapiens
gtccactattacgtagacagaccccaccctcacccaggccagctgtgggccagtcccgccctgcaatctggtctgctgccttcctcttccatgttggtccccttggccactgtctctgggcatgcaagccagtgtcctggttcagtgcctcggccagagctggggcaggagaggggcctctgggtgagagctgggggtgtctctgcagggtactggcagccttgccacactgtcctcattcccagatggaaagacctgagtgcctctcgccttcctccgggaatgaattcctcatgaaaatgaccaggccacttcttccgagggccaggccgccccctccccgagacctgtcctgccgtccgcgggtgtgtggcctgtaggggactgagagctgggcttgctgggcacctctggaatctgaccctgtgggccaaagaagcaccactgtagtttctgcagacccccatgcggttcattgtgcattgtttggtttctaggatgtatgtgttgctagttttttttaatgaaaccctggattaatgtaaatagctttttggggaacggattctaatgtcacgtatgtgaccgtgtggactatttcaaggtgctgatgcaacactaataaacctggaggggccggcccccgcctgcagtgtgattctctcggccgtccaccccttgggagcacgcggcggagcagcgcctccctcccgcccgcgcgccccgtcctgggtcgccccgccccagccctgcggccccgcgcgcgcggaggtggcccggggctcagcggcatcgcgccgcttgaagggcgcagggccgaaaggggctctggccgacaaaccccaagttcaggtctgtgcttcgggagaccccggaggccgacgcccggaagggcccgtggggcggtagcggccatagacccggatatgcgccggggacccccagaccgcgcccatcccccacccgccgcaacggagcccagaacgcaggcgcggcgcagaccggaagcggaaccggtgggggcggggcttgccgtagcggacgttctggagcgaggcgccggccccttgggccccctcaagccgcggtgtactccagcggccccctgtggcctctccatccgcggcgggtctgtccctccttctgtctccgggtgcccacgtaccccccacctccgaccgccgttcccgtgtaccccgcccccccgccgaaccccagagtgcccacggcctccagcgtgtgtcctgagccttcttcccccgtccctccgcggaccccggccgcgcagaccccgcctccccaccggagagggcgggcacgtaagggctccgggctgggcctggggcgaggcctgggccgcgtggaggggaggtctcagggtcggaagcggggctgtggcaagagctctgggcctttccttcgccccgggcgtagcaaggccgggccctgagagcgtgcccgcagtgctggctgagggctgatgcccctggaacgtttgagaaggctggcagaggcgtggagtccgtgcagcaggctgccgaaggctttccaggctcccggggtggggtcggcaggggcagagaggacagttcgggaggctggtgtggagaagagctgcggcgggagctgggggatccactccacccagaggggtcagtgatgcctgacctttggctggaaggtgaccctagcagaccgcgatactgccaccatctgcccccagggactcaggtattggtgggcacgtgggtggccttgtgggccccgccccacctccccctgctcctacccccagatctcagaggtgtggacaagcagcctactagggctagagatggacagcaggaaactgtccccccgggggaagaagctggagtcgcacctctcccaagagcacaggcggcccccactgggcctgatagcagcctggggccagcccagtatccagagcagcgttcagcagggactgcagactcaggactgggtaagcgga

SEQ ID NO: 61366 - DNA, 393 bp, Homo sapiens
agtgggaaggatcctgggaggggagtggggatcccccgaagtctcgcagcagtagtgtggtgcttaggccgtcgccccggccgccactgcgcctccccacccgcaggcctccgcagcgccacgggcggccgcgcggggtagcgtttgggggctcccggggacgcggtctccggcgcgcaggtccgcccagggttggccgcgtggtcccccgggcttcccacgcccgattcgaattgtgactccggctggctccggaccgagccgaggacgctccggcaccacagcaggagccgcgcgggcgggggcgcggggcgcggaacggggcgcggggcgcctgggagatgtagttcgcggccttccccggcgcaccagacaatgcccgacgcggccccg

SEQ ID NO: 61367 - DNA, 2029 bp, Homo sapiens
cacctcatgctcttcctggctggggcgtctgggtcactcactggactctcctctccttagacctgtgcacaagcacacacgggaaggcatcctgacaggtggtgggaagagaaggcagctgcctcactgcggaaagagcacggccgctcctggactccagccctgttggggctggcggggtcagcaggcgctgggttccagcctcaggtggggtctttggaggtggcctctgggcacaggcacctcctctgcggccttctcaccaggtcacggttcagggaggctttgccggctacggagcctgcccacaccaaggcgcgcacgaccacctgtccagagatgccacgcgggctgggcggcgaaggccaaggacacgccctgcctggtgtcgggggcaaaggttaggcctggaagggaggtgtggggtggggaccccgaggccagggctgggccgctgagcttcagggcccttggggggctcagggaggaatgccggaggaccccagcatcaggaggaacccctggagagctacggcaggactcacctgtggggcacagggagggatcaccagggaaatggcccttgtggaggatctcccctctacccccagggcaccaggggaggatctaccagggggttctggtggaagggcccacccgggaagcggcgcgcggggaggactcgggggcgccgagaggaactgtccgggaaggggcgcgcgggccgcgggcggcgcggggtcggtaacggcccgtgcggtgggcggcggcgcccgaggcccctccccgccgcccgcggccgctcctcctcttcctctcccgcccgcgccgcggccctcccgtccctgcgcggcctcggcggcctcggcggcggcggcggcggcggcggcggcagcagcgcggcccctttaaacgcctgcggcgccccccgcccccgccatcgcgcctccattttcccggccgcccgcgccgagcgccgcgcccgccccgggcccctccgccgccgccggcccggacatggccgccaacatgtacagggtcggaggtaaggccgcaccgcctttatgcccggccccgacccgcccgcagcccccacccgccgccgctgccgcctcccccgcccctctgccccgcaggccccgcgccccccgcccgccctcgcggcccccggctccttcccgaaccgccccccgccgtgctcaccccaacccaaaatggccccgcgggtcggccccatcgggggcgggcggggctcggcggcccgggggtggggggcggcccacctgttggggccgagggggcggccgcgggggtggcgggggggcgcggggcctgcgggacatccgggggtccggggccgggagcccccagcgggagcacgtggccttgggaggcgccggctgccggtctgggagcaggagttttggggctgtggggtctcccccggcccgcggccctgtgctgggactccggtgcatcccctctggggatggggagccccggtgaggggccacgttcctccctagagccctcctgcagcctggccccggggcttcccccagcagggatccctcagggggtcttcagcagggagcgagcatcccgagcacgcctctaagtccccccaaacttttccctgcctctcgctcacctcagcccattcgggaggcgctttgcaagggttggggagaggccggagggcctcctgggcaggggcttcctccgtgggcccagcctcctgttgctcgggccccccgggcctgcagctttgagccttgccctccttcgtgtgcctgggactccgtggggtctttcacaggaaggtggggggtcgtgtgcattccatcattccatcagcgcctccctccccaggactctgagacccctccctgcctgtgaccctctcgggcaggtgctcattacctttcccacctgcagcctgcgctgctggagggagctggggtcactcccgctctggcttgatccccatgcccctgaccccgagtgcccagaacactctgtgtctctc

SEQ ID NO: 61368 - DNA, 710 bp, Homo sapiens
ttggttggacaaatttacaagggttgttaaacatacaaagtgccaaaagcctatagttattcattctattacttgttggcaggtaaatattttgtggaaagtatttgtttatttttatttttactttttgaggtggagtctcgccctgttgcccaggcagcagtgcagtggcgcagtctcggctcactacaacctctgcctcccgggcccgagtgattctcctgcttcagcctcccaagtagctgggactaaaggcatgcaccaccacacctggctattttttgtatctttagtagagatggggtttcaccatgttgggcaggctggtctcaaactcctgacctcaggtgatccgcccacctcagcctcccaaagtgctgggattacaggcgtgaggcactacacccggcctgtggaaagtatttgagtctgtcatgccttattgaaccagtagtgtcaacagtgaacttcatttgaccttgtggacttgatgtcatcagttctgtgaattaaaaaaaaaccttttttaaagagatagagtcttgctttattgcccaggctagagagcagtggcacagtcctggcccactgcagcctcaatttcctgggctcaggtgtgagcccctgtgcctggcctaaagctgaacatcttgacttgctgtcctgtgcagcagcttgatgagttggcagtggtgaagttctattgcttt

SEQ ID NO: 61369 - DNA, 647 bp, Homo sapiens
aggggccgggctcaggagagaccaggggtgggcttccggcgtctctcccagcagagacgtgggcggtgtgtaggtctagcagtggtctgtgatgacaggcctggcgtatttccaagcagggacgctcccgtgagccttggtggtccaggtgtttttagaggttggtcaggtgggcctggctgagcaccggtgtggctgccctcggtccctccgtctcagcccctccagaggtcaggctgatgccacaaggcaccgcggtacgtcactgtcagggtagcctctctgaggtggcctgaggccctgggtgagcagacgctgttggcaggcaggatgctccaagagctccgaggtgacctcctaggagcaggtcaagggtcagacctctctggaaggaagaatgcgggcaatccaagcctgctgagctggccctttccaggaaagggagtagcgaggctgctcacttagagccacgcacctggggctgacagtgtgcctggcagtacctgtgtggaaagacagttacagaggaaacacatgaactcactataagccagcactaatggatgcacctttgttgttgattttggtgataaagaacattaaatttgaacccagtgaagcaatatgtcatctcccaaaacaagtcc

SEQ ID NO: 61370 - DNA, 2084 bp, Homo sapiens
caggcggggctgggcgcgggcggcggcggcccggaggagaacgggcggagggcgcgggccgaccgggcgcaccgaccatggcctccaaatgccccaagtgcgacaagaccgtgtacttcggtgagtgcgtgcccgctcccggcccgctcggtgcatcccgccgcccttcgcggccagtcccgcgccgcagagccgcggcgtaactcggggtgcgcccggccccggccccggaccgaggatgcgcgtcccggaggctggctggccgcgctgcccaagcggctaaagccaaagggtggggctgcgcgaaagcgggggcggtcacgcccgaaccccgaagcggcttgtgggggcggggcagggaccacccgggcggggcttgtggtgccccgggatgaggccagtgtttgggggagcgctcggggatccgcggacgcatcccggttcctcggacggcgccgggcggggcggggcagggcgtggctgtacgccccgggtgcgtcccgcgcgctcccgtgggcctgggccctttctcctggaccccctacacccgcttcccccgggaacaagtggccgggaacagtgacccccagctcccactccgggctccgctgagctgggctgggccaggtttggactctgtcgggattcagtccaagcgggggcgaccttggcctctgcctcctgcttgtcccgacgcattcccttggcgccagttcccccaggagtttcacacgggggtagggtgggggcgggtgtgacacgcgagttcccgcgaacgtgagagggaccttgtgctcaagcagcccaggtgtccaggatccctgcctcctcaaggtcagaacagccctggacaggatgcaggtggtggcgggaagagggatgtctcgcaaggcggccctcggtctagcccctccggcaggcgcgctccccccgtctgggcttactcactctctgggcctgggtgcgcccttcctacccccttcctcctggctgattcgctgcccagctttctccagggtggtaaggtccctgcccacctacccaccagctgctgcacgaaggggggcagacttagtgaagcagagaggagggccgggaccaacagggcgcctgccctggtcgccccatacccagaatgcggccaggctgcagggaaggccgccactgggcttccccggctcacaggctggagggggttgaggggaggttgtattttgcccgtcccagaggggagggaccggatttggcctggagtgcttctggcgtggctgggagccgaggggcttccggctgcctctcctggagcccgctcagccctcagtctctgtcccagcgagggctgtctctgtaaggcttagggtgggagacggtccccagggcccttctgcagtccaactgcccatgactttaccccaggccgggccaggccagcctggggctctccagggtctcggccaacagtcctgtggacagcccggaaaggcctgcctgcctggcccgcccagcctctcagcggaaaacaaaggcgcttcagacccggctggcttctgtcctgcctgggaggcactgtgagggcgagggtccagaatcctgcccaccctcacaccaggctgcccccgcagctcatacctgagtagaacccaggctgggatgtcggagcacattgaggaggccaccccagagcccatgcagccagggtgggcagctggttttcttctgagccattagacccaatcgattctgtgttcccaactcggacccgtaatgtgtggccattgacccacccagtgggtctgagggccagttccctgcccccacttggcccacgtcccagagctggccagagcacagtgctggcagccctgggctgcagctgccacggccgatagccaccgagacttccttgctgctgctgggacacgcctgcccaccgtgcagccagcccctgcctgccctggtgtgtcccagcttccttgagtggagtggttctggtcagagggctctaagctggtgcagccttgtggttgggctggtgtcctggaggctggccctggccatgcccagagggttgtaccagggccacg

SEQ ID NO: 61371 - DNA, 1435 bp, Homo sapiens
gtggctgtttccagcttttgtccatagggtgatggacaggcttttgtggacaggcctgccttgggtgtggcccagggacagaatccctgcccaagtgttctggtgaaggttttagtgatgaccgactcgcccctggcgtcttcatggtccaggctctgccctttcagccaggggcgctggcggctccaaggagctctcccctcccccgcgccccgcctttgctgtgcgccactcctcgggtgcccactagagggcgcactgtcccattctggcagcacagagcagaaacgtggagaccttccccagtggctgagccctgtcctggcgccatctggacttcccaccttggtttatgctcctctgctcctggcaccacaccgaagttgccttggcccttccttcagtgaggggcactcagacctggccacctccaggcccctgtccccagtgctacagggtggccggggctttacgcctcttccctgctcccagccgttggcacagctccctgcctggccaccctccagcccatgggctcagacggagctgagcctggatgctgagcccattgtcccgagagcagccatccatgtcctggcggggcctgggctggctccggggtccagccgtaccacagctgccctccagccaggcacccagtgcggtctcctcccacctggaattcagccaaaacccccggggcctgacgttgcggaagggacggccagtccccaaccccaggcagaggggaggatcaggcaggttccagacccctgctcacaggagaggctgggatggttccccttctcatcccctcctgccaggcccaggcttccttgtgtgtgttggggggttgtttcgggagaactgagaatttccggagtgcccgtctccgcccttgctgcgggctcccagggttgcatgggaaattcctgctttcagcttggcggggcggggggcgggggggggactggagggctcagctggacccccctcccttgggagcctccagtggaaactatgtcgtgaggagagtggtgggtggtgtgcccttctctaaaacctgggcggcggtgggggatttgtgtgccagaagaccttccagggtcggttgcggggatgatgtgggtaaggggtctcctccagagatcagcccctgaccccgccagggacagcagcacccccgaccccaggtctggctggggcaggaccatttcctgcggggccggtttgaggatgacgcctgcctgccgtgtttgtttccaagtcattgtcatggaaaccggggcggttgttgctactgtttgtctggactgcgtcgctaggcggtgttgctggggttggctgggtgcccacggcactaacagggctcgcttggtgtctccagctccaggaagctatgccctcccagccgcctgccagccaggtgctccct

SEQ ID NO: 61372 - DNA, 3099 bp, Homo sapiens
gctacttagataccggccttggcagaaggccacccctccggacacccactggtttaaaagagcccaggggtctggccctgccttagggctgtggtgggtgtgctgcaggctcagctcgacaggtgctgtgggggcagtctagggtggcccgcagggtggggtgtgtgggggtgattgggggattcctggaattccaagagctgggagccacagcacttttgatgggatgggggcagggggtgctgaggtgaggctggtttctggctggacggtggtgggtggagctgagggaactgagatctttgagacagcgacacctggtgcagagaaaaatccgcaagctcgggggttgggagagcgctgaacaaggccgcagagctgctccgccatctcccccacgcctcctgccaagttctgtggcgccgcggttccccacctcctgctcccatccccctggctcccgccgccctgtagctcggcaggtgcagtaggcgctccgaggaggaggccccttagcttcaagaaacccgcgtgggcggggtgaggagcgcagtcctcctactggcgccgtgaaggagatcgcgatgcgccggagggaaggaggctgcgggcggggaaggacggagggcgtgcggggagggagaggaggggcttgctggggggggggccccgaggcggggccgggagggccgcctggaagaggaggtcgggggcgaaggaggccgagaagaaaggtggggccgggacccctcgggctgcgcctctcgtgggcgtgtccagccagggctgggggtccagggaggactgagtttccctctcccgccgtcctcgcagccccgggaggtgcaggggcatcgcgggaacagccccggtgacacgctgcccggggtcttcacgaatgcccggaggcgccgctggccagaagccagcccgaccttccatccccgcagacagccccacgttcctcccggcccgcgtctttcggggccgcccgtgcaggcgggcccggctcagcggcgcccgggcagcagctgcttccatgcgccggcttcctccggggctgctccgtggcggcggcagagggaagcgctgccgcgggcgggcgaggatcgggagcgcctgaggaggctgccgcgggctccggctgcgcgttcggggcgggggagctgcccgggacttcgcgccaggggccaggggccggccgcgctggggtctgcgctgtgcggcgcggcgggctctgggcgcctcctggcggcccagcctggaaggcggcgcgatggggcgaggctcgtccgctccgactgcgtaagcggccccacagggcgccttccggagtctgcgcgctcccgcccggcggttgctaggttgccaaggggcgtgaggcgctgatgggtggggtctgagcgaggcggggtgtcgggtgtcgtgacgattgagcctgcaagggcggactctgcggtgttctccatatcaacagccctgccaggagcccggaagtgggtccgcacgagacagaatagactacactcaaactccaggggaaccgttcattgggcttggacacgaaggcgggaccctgccgacgcagtgattggatgcatgtccggccagcgcggtgattgggtacaggtctcgggagcgcggtgattgggtacaggtctcggccagcgcggtgattgggcgcaggtcccagccggcgcggtgattgggcgctggacccggcccgtgccatgattgggctcaggttccagccggagcggtaactgggcgcaggtcccagccgccgcactaaacccggcccgtgcggtgattggacgcaggccccgggccgcggcggaggcgggcgatccgaaagaggctggtgctggctgcatggggaggcggcggcagcgggtggaccccgcggctggggcccgggccggggccctgcctgaggccatcgccgcgttgagtcggtcgctgccctcgggacccagccccgagatcttccgccgcgccaagttcgaccgtccggaggcggtgacgctctcgcggagggcaggcgggccgggtggggtcccgggccctcgcagggagttgggccggctccgctgaccgcccgctttttattttccgcagacctccgcgctctggcagctcctcttccgtgtgctctcgccactccctgcgggcaacgccttggcatcgctcgccctgggtaagccccgctcctggccccgcccacccggtagcactggccccgcctactcctgtaaagccccgccttccccagtaagccccgccccggcaggctctagcccccacccaacactgaccccgcttgctcctcaaaactccgccttccccggtaagccacgccccctgatgggccctagctccacccccttgggtagcactggcttctgctcctacaaagccctggggacgtccctgttggcccctggtctcctcatcctggtctgagttctagctctcccactatcatctcttctgaactaggccttgagcttctgctcaagtgacctgtgggggtctctggagggatccaggtggtgtcacctccaggtgggtggtccccctaaggtggtggtcttctgtcctagaggtccaagcccgcttggtgaagtcagcactatgctcccagggctacccgaggctggcactggcacaactacctgaggatggctcgcagggcagtcgggagctgctgctggctctgtcctggctcttggcccgaggacctgtgcccgagcagatgctggcccaggcccgagtgcctctgggtgacgagatgactgtgtgccaggtgcgtgtgggtgagggtgagctgagccagccctggtctcaactcctggggccagagcaagggcaggcctgggtcagccccctctgtctgctttgctcctcagggcagtcccatgaagggttacccagctgcccagctgaaagcacggaggctccctgtgcagggagcacccgttgtttttggctgtgcctccactaccgtctccatcctggccttttctggggggcagggtggggtgggagcagggcctgacccttgcccctctccagtgtgaggccctggccagccctggc

SEQ ID NO: 61373 - DNA, 1094 bp, Homo sapiens
gacagcacggccatgaggaccagtgccaggtgtgtgacagaggtgcaggggcctgtggaagcccgacgggccttggtggacgggcttcccgagattcgagggcagccacaggcatcgccctggcgcagaggagcaaagcagggtggctctgccggggcagagggtgggggacaacacctcgccaaggcaatgcggagccatggggagcagggcaggcagtggccacgcgcccaggatggtggacaggaggggagaccgagcctgcccgtgcagggaggaggggcgtgggggctgccgggcaggggcggggaggctcggagaggcttgtgggacggatgcatcgggacctgggtggctctcggtccgggatcagaaagcctgggagggccgaggcctccttgggtactccaagagcggaggggcaggcccgcctccctgcccagtgcggcggcggggagagggtattcccggaactccgcggaaacggcctgaggccagcagcgcgggcgtggggtccgggccgccggagccaggagggagggcggcgcgggcccagcagtgacaaacccccccgggctccgggaacgagctcggcgggcagaaaacgcgtccgttccgtttccttcctggcggcgggaacgaggcccgggtgctctggcgaggcagcagcgccctctggaggcctcgctgtggttcgcggccgccggttcgcgcatgggcgcaggcgtgcgcgatgcctcggggccccggcgcggagaccgcgcctggtgggaagcacgcggggtgcggggggcggggggtgttgggggaggccgctccagcccgcaccctgatcttgtctcctccggtctccccaggtttcgagctcgccgggccgtgtcgcgccatgcccgctggctgagcgccgcagggcctcgtcccgccaggcgtgggggccgcgcgcgcccaggccggggcccggcggccgaccatggtgctgccgcccccggaccggcgccacgtgtgcctgaccacgctggtgatcatgggcagcatggccgtcatggacgcgtacctggtggagcagaaccagggcccgcgcaagatcggcgtgt

SEQ ID NO: 61374 - DNA, 2145 bp, Homo sapiens
tgcattagttttagccactggagggctgcctgtgtcactctctgccattcctccatattaaacagggtcaaaagaagctgttttcaatctggtcacgttggattgtgtgtctgaaaaacggactgcatcaatcaacgagagcctgtggcttctccatgtaagagggaatatgatgcttccactttaggaggtcagtggttgaaaagggctggtaaacgaaagttcactctcccctctggatgtggccatgctggtcataatagacaggtcccctcgtctccctgagacgcatttgcaggactcaggtgcggccagacctgagatggcctgcctgactttctgggctttccactctaacttcctgcagctccaattcctccttcttagttgaggctgggggagtatactctcccggatttaactccccatggacagctggggctgctggcctcacagctgaacttgcagagggagcagttggtctcggcaaaggggggtggcttggaacatgaggaggaggaggaaattctgtttcctcctgaggtgcccgcagaactggtttatctcggctttcctgtgactttccctttttctctgcagctgccagcatggctgattttactttcattttgtcttcggctgctcgggccacaggcgtcttacaatatgctgctggggggtgcaaccacgctggtcagttttgtataacattgagccatgaatcgatatagggaaattgatctgggtaccctggctgtcctcccaccccggtcaccaccttaaacacccggccaatcacctccctatctatatagcaccctcggccggcagccgacccctaaagaaggccattctgattcacagagagttttcaacttcagggggtcagcttaattccataatccgctgcaaaacctttcttaaaattctttagtatacattccagtggagtgggtttccacgattttcctcccatttcctccctctacgacgcacactcactctgacttccttttttaccgagcagagcgtctcctattacaggagttttcggggccgcctggctaggagagtcccctattcccagcacggccgctgctgccacggggcagctcctaccagccgcttcgccgctatcccaggtcggccccaggcttcgctgggagcgcccagtccacgctgagatctgcgcctcccacgtcactccccgcaccggcccctcctgcagccgtctcttgcacgccctttcacccacttcccctccccagttccctttcctaaccggcctggcgggcctctctcctgtgccgcgtcggttgcggcgtctgcggtacccgagtgagcgaccccctctcgccgccgcagcctccctgggtcggactagacgcacagcccggcaggtgatggggctcccctccgtcctcgtgggacgggtcctgccttgggccccaaaagccgaccgcggttcattagcgctgcttctgggatcatcccgcagccctttccgcgctcctttgcgctgtcaggggaggggccccgggggcctggagagccggtctcccctccgggctgaagtgctccccgaggccgccctggggtcacagatcgccgcgaccagagccccagaccctccggcaaaggagacagccaatctgtcctctcttctcctcctggctgctggctcgcaagaaaggttgcggaacatcaggagggcaagggacacctcggggcatagcaggagggtcttcactgagtgcactctgtcccaagggactcaacgtccaaacaactgggccccgaacaaagacaaggttttgcttatacacctcctcctaagtggcacgaacgcgcacgtacagaggcaagacagaggccgttaatcaaacaaagccaggcttgtaactcagggttagcaatactccttcccatgcagcccagatggtcattacctgcttagttcaaaggagtctcacaaagactcatcctgccacccccaccatggcatgtagctggctacaagccagacctgctcaggctgtactgcttagatgcagaagcaggaacctgcaatcattaactacaggaaaaacagaaactcctaaaacgtacagagcaagaggcaaggtatagtttacatagcagagg

SEQ ID NO: 61375 - DNA, 1405 bp, Homo sapiens
cccccaagccgcccctgaggaacaggcgaggcaagggccagcaggcactactagcgggtcgggacagctgcttcgctgatgctggttgtgtagcatggatgtgtgtagcgtgactgtgttgtgtggatggggcacggaaatccgcagagaccatcactggagggagaagctgcagggccgggagggttcagcaggtaagcagttcagggttcctggaaaggcgggtcccaatgcatttgctgaccgggcacctaacgggctgctctcaaaatcactgactgtcaccgaggccggccagagacccttatgtatctgattcacgatgacaccagctaactctgagtacagtagaaaacgtaccgtcgggcaaccagaaaatgcgcactccagtccccaccacgggacagcgccaggcagtaccctccacagccggagctcgaactgtcgcgagaatagcggtcggcttggaagtcgcccggcgcgggagcgcgaactctcgcgagaatgccgccagctccggaggcgactgcggcaggagcccgagctctcgcgcgacaggcaccaattcgttagacgcgcgctgcaggagcgcggaacatggcgcggcacgggccaccgtggagtcggttggacgcgcagcaggagcgcgacgtgcgggagctcgtccggggtgtcgccggcctccaggacgaggcagaccccaacttccagctcgccctaaacttcgcctggtccaacttcaggtgtggggcacggcgcgcgggcgggttcccggccacagcccggagcccgcgcgtgggtcccgcacagcccggggtcggggcgcgctggggcagggcatggggcggaggcgggcgcggcctcagggagccttcgcaggccctgccaccgcctgctccccgccggccagcgctctcggcgcggtgccctgcgcaccacagggcgtgttacccgggacgcgtcctgatcgtcacggggaaagcgtgaactgggtttcttgccggccggcgcgcgcgcctgcaaccccagcgctctgggaggcccaggcgggactccaggccagcttgggcaacgtagcaactccatgtttataattttttttttttttaaattaaagagattgtattctcactgactcctgctccctggtcagcccagtgtaagatctctcaccctgctctcctttttccaaaacgcgtgtcatgacactgatttaacctgtcattactgtctcctccacttccactccagctagaatgctgcatctctgcacagctcctggcacgtagcacgctgagtcacctaatacaatttctaatgcagtttctcttgtaactaatttttaaagacttacagaatttagatatttacgtaaagtgagatctcctatttttctttatgggag

SEQ ID NO: 61376 - DNA, 2532 bp, Homo sapiens
tgtcatctacaatgtaaaaacctttggaatctaattttgagactccaccctaggcacagaaaaggagtaatctgctgatttgaaaatgtgtggactgggaaccagaatgttatccaaagcccctgttttgcaggaatgtgagaaagtgatatccgaatattgagtcaactggtagattgtctcaatccgctggtcaggattcatttgctgctttttgccttaccgcagagcacaagcgggggtaaccaaaccttcataatctagagaccagactagaatatctgatgcccatccttactgttctccgtaagaaccaggggtcgcggatgaatggggagtgaggttgctgcggctgagcggggcgtttagggcagttttcctaaacacgcctgtgaccagctgactccactcagcgtttccgtgtgaggtatgtttcttcaccggcctttcaagattgttttttggcacgagctcaaatcaggttttcttccgtccgccgttcccgcaggtctgcgcacggatttgtccctggttcccgcaggcaatggggccgcaggggccggccgggggggtccccagcgggctctgcgcgccgacctgcagctgggacccgcgcctggaaccctcccgacgagcgcaggtgagcgcctcctgccaagtggggcggcgccacacgggcgtcctgggtgtccccctgagctccttccgcagctcaggccaacccccgccctgacccggtggagccccgggacagggtgcggaccccgttccttcgcgctccgaaccggacggacccgcaggaggaccccacgcccgctccgctccgaccccgccgtcccgcgcaggctgcggtgacccaggccggcaggtagccaggggctctctgcctgggaggacaccttcggcggctggcgtggggaaaggggccgcccggccggggatgccccgccaggaggagggagcggccggggccgcggccgggagggaggagcgccgggaggaagaggccgagccgggagagcccccgccccgggaggaaggggaggaggccgagtgtttcctggcgcattcccggccagcccgagtgactcactcggccaaggaaactcccagggcccgcccaggacccccaagccgccgcggacgcaggtgaggaaccccgctcgcccgcgcctgccctgcggcctccgcggggtccgggtccccctcggaacctgggccggccagggcggcggcggggccgggacggacccccccctcccccccaaccccggcggcgcggcctccccggcggcgcggcctccgggatcgtcctggtccccgcgtcccccaggtcccggccccgggctcccgcgcctcccgggctccaggtccccgcactccctgcactggcttcccggtccctgcgcccccggcctttcggcctcggccccgagctccccgcccccgcgttcaccgcctcgcgcccccggatcccggattccgcgccccggcacatggcacagctccagtggcgaaggaataccttagtgtttgacgtttttgttggaaagtaaggagcaggcagattgttaatgttgcactaaggtcgcgcagcaagatctgaacccgtttttgtttcgtgcccctgtgaggagcggagggagcctggtccgcggagccattccgggcattcttggagagaggagttttgggctttgttaaggaggcgcgatcgttacggaggcagcactgtttcgcacaagcatctgaattgtgtattttaaggctgaaatgcgtgagcttaatttgcagcacattgtgggtgtgacaagaagggtgcaagaataatcgggaaacggggttgatggaacgtgttttaagctgagaggggcgtctggacggtgtcagctccgctattaagtccagtcagggagcggctgctgattgagcccagcgccgcgtggtcgccgctggggactgaggctcgggagcgtttgttttctggcggcggagggcaccgtggctgcgccgggagcggtggtgtttcttgcagtcgtccgtcggactccggaatgaggcgtggtcggagccgcggtgatgcctggtgcagtgcgcacattgctatgcttgacagcttggcggcagagtcccggccaggccgggacccgcgggggccccacgcatgctgccttttccctgcgggtggccagcggttttccaagtgatgtctagatctgcaggcacggagcctggaagaacgagtcacgctgtgagtgggcgcgggccgtagcaggtgtgcactcgtagggccagtagggatatagtgccggtgccctcactgcgaccgaggcgccctggagtcgtggcggaggacgtttcctgcgttaagacaggtgtctgtgctgcgctcaaagaaaatgtaccccctaagtttgtgtgtgtgtttaaatttattttaaacttttagtaagattcactttttggtgttcagttcagtgagctgtagcaggtgcatggactgtagtgacttccaccgcagtcaggatactc

SEQ ID NO: 61377 - DNA, 1718 bp, Homo sapiens
acctaaatctccaaccctaactatgcaacaatattagttataaattacaattttaacttacatgtaagtttaatatggtctctcttatgaaaaaaaggctgggagaggttagagatgacttattcactctcatttcctcgtaaataccaccctttattctcatttaaagtcttaaaccctggccgagtagctccagcctagaaagaagaaaacacagaagtaggcaaaagacttaaagttactaagtacgttttataatttggttactagccttcatactcattttgccaaccaatcaacataaaacctactcaatcgagcacaactactgcttcgacaggcagcttactggaatggaaactctcgactctgatatttcctcttactaaaaaaagtattaaccgggcacatggctatacacaggatttctagaaacagaacttaacatgcagtcctgtattaaatgaactaacaacctagaaaagaaattaaggaggcacaaacaccaaactaaacacacagttttgagcaattgtatagagagggaaataggattccgtgattttataaaaggaaattaaaacagtcaggctcaaaacgtcacagcagacttctaaggcttgtttaactgtcagttatgatccccgcagcagctgaagccaccttctaaaactcaccaagacaaatgaaattattttaatgaacttaatgaacatgcgtccccgacatggccaacgagccaggcttccgtgggactgaacggcaatccgattcacggtgggtttcctcactgaggattacaggaaaaccgcttcagaacacccggaaaggaaagttgcccgaagaacccttctccgacacaaggcgggctggctcgccaccaagtcagccccttcgcgcttgcctgaaaggaaggagtggcgacctcaccctagtcggccggccggccgcgcggcttcccctcgccggcgcagccttgggcaccgcggctcacacccccacacaggccgcccagtcctgcgctcgcacggccaccgccttcgtcgccgtccagtgggagatgcgagcattcggggctgaagccgttcgcaccgcctcctccatggagaagcgccgaggaaaacctgccaaggacaacctccggcaccgccgtcaccaccgctgccgggacctagggccggcgccggaaaacctaggcgcggctaaatgacgcaagaggcctcgcgcgcacgcgcagtgccgcaccacgtacaccccgcccccggggctctctcccgccgggttccggttcctttacaaggccccagtcggctgagcgcggagggcggggcgcgtagagtgtggggacgggggcggggcgcaggatccaggcgggacctggcgagggacgaagctggaagcgtagttaagcagtacagtatgctgccaggtggcgttggccgatcagttcaaaatcaaactccggcgtggcccttatttaaaacgaggattccgggcccggcgctgtggctcacgcctgtaatcccagcactttgggagaccaaggcgggcggatcccgaggtcagcagatcgagaccatcctggctaacacggtgaaaccccgcccctactaaaaatacaaaaaattagccgggcgtggtggcgggtgcttgtagtcccagctactcgggacactgaggcaggagaagggcgcgaacccgggaggcggagcttgcag

SEQ ID NO: 61378 - DNA, 1902 bp, Homo sapiens
cggcacatccacctgggaagtggccttggcccgtccagggcttggttttggatctgccgcgcgtgttctccaaactgaagatcacttgtattcatttggtgcaggtctaaggcgcagcgggctccgtaagagcaccccaggaacgcacagccctgagagcccgcccgggtcttccttttgcaccagcgaggcccctgcgggggactggaaatcccaggtcttgctctaccgagcgtaccctaggagcgggccgcgcatcggctgaagcggcgcttccaggcgggcgctgggctcgagcaccccagcaccgcgtccgcaggaggctcccggccgcgggttgcgggccacggcgagggctgccgggcggcgcggggcaggtcttggaccgagggaaaaagtcagccggggaagcccgcacaccaaagcaagccgctccagccgctgagaacggagaaaagccgtggcgtcggcgaagcgccggacgctcaggacgcacctgtgattcctgggccgctcccgggcccgagcgccaggacgcggcggcagcctgggcacgccgcggggagcacccgcccgcgcagccttcccccaacctgggcccgggccccgaccccgtcccctgccccgacccgggcgcccccacctgcgaccgccttctccgccgcccgcctcccccacccgcccgccgcctgccgcctgccgcccgccctacctcgccgcttggcacgcacgatgcccttcttctgtagcacgaacgtggacccgttcaccaggctcgacacgacggccacgcccaggccgagcgacacggcggcggggctcgggctacgcgccccctccccggccgccgccgccgccgccgccgccgctgccgcagctgcagtccccattccgcccgcgcccgccctccgagcctgcgcctgcgcgccgcgccccgcggggcgggatggggggtgaccgggaggcgcgggcgggggaggggagggggacgggtgggggaggagcaggaagaggggcgggggcgggacgggggtgccagggaccggcgccttaggctgcggggacagcagtggcgccggacgcggcggcagtgaggggccggtgaggcgctgggtggggcgggggttcccggatttcgcaaatggaaatgcaggactcctggttaagtttccagcgcggagaaacacgcatactttctgagtggtgtcctctgcaatatccgggcagcggagcgcggcaggacgcaccggcgggcagcggtccccgaagagcctccagcggaggccggcccaactcaccggagcgcgaagcccggcgcgccgctgcagagatcgaaggagagccctggcgctgggcgtttctcttccgcccttggcgctagagtcagctacatggggctctgggcttgtgatcccatagtctagtttcctcgttttaataaactacaacaagccgggcgcggtggctcacgcctgtaatcccagcacttcgggaggccgaggcgggtggatcacaaggtcaggagatcgagaccatcctggctaacacagtgaaaccccgtctctactaaaaatacaaaaaattagctgggcgtcgtggcggaggcctgtagtcccagctactcgggaggctgagccaggagaagggtgtgaacccgggaggcagagcttgcagtgagcggagatcacacaactgcactcgagcctgggcgacagagcgagactccgtctcaaaaaaaaaaaaaaaaagaaacaacaacaaaattacaagcttgaaaaataggaaaaagttattttattttttttggaaaaaaatattttttaaagtgactcaattccacaaccctcacctaattattagtattttaggtgttttcccataatgtatacatacttttacatg

SEQ ID NO: 61379 - DNA, 2013 bp, Homo sapiens
agggagctgggacccctgcactgcggcaaacaagcacgcctgcgcggccgcagaggcaggctggcgcgcatgctcaggcggggatgtgtgcgaagcctgccgctgctgcagcgagtctggcgcagagtggagcggccgccggagatgcctgacgcatctgtctgaggagcggtcagtgacgcgatggagcgggcaaggtcagctgtgccggtggcttctctcaagagacagcctggggagcggccacttttattcatcagatattccaagtttttaggacttggagtactgaataaacggaatttgggccctaaagtcctttgttctggagaaccagatccggaatgttcagaggcttgctgttgtgccgttctgccccgatggtatcctgtccgctcgcattggggcgcgtcccccatccgcccccaactgtggtgtcgcgacaggtcctattgcgggtgtctgcggtgggaagggcggtggtgactgggagcatgcggggtaaccgcagtgggcaagggacatgggtggaggtgggtacatcagggtgattgcagttccgtgtggcgagggtacgtggggggaccagtgcatagggattttaggcggaggtaggtatattggagtgattgtggcggggcgaaggtacgtgaagtgatcggtatttagggggtgttgagcgcaggtaggtgtataatagtgaccactgcgtggtggagcagggtacgtggggcgactggggggggaattcgtcgcagtgaccgaggcgaggaggctatggcagtggaccagggggatgagtcggtgtgacagtggtgggggttgtgttggtggtcgcggcgcggggagagtccgtaggaagtggctgggaggtagggggaaggcggcgacagtgggtattggcggcggtgggcattggcagcgggtaggcatggcggtggtggactttggcggcggtaggcatggcggcggtgggcatggcatggaggcggtgggcatggcggccgcggggcctgtcgctgtccggagtgactaagggacgctgaatgattgctgtgtagaggagggggcatcagaaggggcagtagcacagtccgcagcctttaattttcctgtgacctgcgatggtcatctggtttgcctactgtggtggtggtgcttttttattaaaactgcgcaatgcctacactgccgcaggggctgcagaaatgcgtggaatccttgcgtaccctttaggaaccctcgctttagaggctatggcataagaagactggaatgatgtgcagaacttgcatttacagatcttttgactgataggccaggtgatgcctgggggttacttttttttcattgtttctctctgttgggaaccaggtcttggaaggctatgtcgaaataacctgggggtctgtgttgcgtcactgccattgtgcagctccttcaagatggccgccgctgcagcggcttagatctgcgcaagcgcttcagcgggggggtggccgcttcctccctgtagagccgccagtggggagggggcaggtggtgtgtgttcagcttctgctgtttcggagtttcagccgtaccctctttagggtgcagtggtaaggagaggaagccggccaaggtgggcggctgccccctccccaaagtgctgcttgggaaaggatgcaggttgcgcagacgcagcagaggtgacagtcgcctccgcttgcagtggggcgagacgtggggcaggggagcgagggcttacgcagcttttgcctggaaggaatggcagccctccccttcacctggctgatacagcagctgttcctttccggttgtggcgcagtagaggggggaggagggagatgggttggcgcaggctccgcctagcaagcttggcagccaccccttacccacggtgcagcagtagaggactggaggggaatgtggctagaggccaggcatttgtaccacctccgcctgtgtgggatggcagctgcactgggctactgcttttcagctctgcag

SEQ ID NO: 61380 - DNA, 2518 bp, Homo sapiens
cccatatgctattagtttacattttcaacagcaccctcgccacttaataatctcaaacagattttggactgttactaatttagcatatccataaaaagtcatttaaaaaatgtagacgctaaattctctttcaaggttgccaagcttcaccagtgtctgtattaaaattatttctaaaattttacggactaaggcatttggtacattcaattctacctttaccaacaaaagcctttaccaccaagatgaggaaagcatccttttcattttctacactgaaaaggggggggaaaaaaggccaactgcttgcatacaggtctgcatataacacagcagtctctggcaaagccaataactcacgttcaacttcagaaatcctggtggccggtaacacagagtaacctgtgcgcacaacccttgggcttgacataccacttcatccgccctcccttcccatcaatccacccccaaaaccccaacccaccaagcacacggctaaatatgtcttccccaagagagccaaaaaccttgaaaacgccgagaaagggctcccctttgaaggaaagggcctgcccttccctgtctggggccccggctggctcgaagagcctggctcctaggaggcccaaatctcgacgcctcgcacgtcccgccccgccccgggcccgctcgcgtcccctcgggcgacaaaaccctcccgccgtcgctcagccaggactgacagttacggctgcagcagccgcggccaccaggggcctacttctggcaccagccccttcggaccacgcgcccccaaacactcgcctcggcggcggggggcggggaaggggggtgtcgacctcgccacagcgggccccgaaggccggccgagtgacggaggggagccagcgccgcctggcgcaggccgcggcaacactgacctgtcgtcgcccccgcgcctgggctgcggcggccgcctcactggtcgtagtcgccctcgcccgccgcctccgcccgccaccgcctcgttctctttcgctgccgccaccgccggggctcatgcgggacccgcgcttccttatccggaaaacgaggccgggaaagggagcgccggggccgccgaaatcccggcgttcgtcgccagccgccgctgcctgtccacaccggggggctgaggggccctcctgccaggggctacaggccgcgagctattccgaggaggagccgaaggaggcgccgccgcccgcagccgagcgcgccgggtcggcagaggtgaagcgtaagtaggcggcggatggcgggcgcccgcgctggcggatggctacgcggcggaggggtgcgcgagcgagcgaagcctggtgtgtcgggtcctggcgaagggaaaaggccccgtcgtctcctgtagtcaccccgagcccagcgccaccatcttgggagacacacggatctcgcggccgcggcgcaagacgggaggactggctgggcgggccgagtatcccggcaggcagcgcgcgccgcccggccgggcgagggctccaggccgggacgcggggacgtggggcggggccaagacgcgcgggagggcgccgcgctccgcccctccttccttcgccggccccgcctccctcccgcttgccgtcgccgccggcgcacgggccattgggaagaggaggtggcctgcggcccctcggagtcccaccaggctcggtcgccatcttgcgactggacagaaagggtaatccctctttttagtttctgctgtctgtgacccgaaagaataaacctgggacttccggaagccctctgggcacccccccccccaggagggttgcagagccccttggtgtacccagcagaggaacgcctcagactttgttgggaaacgaatggctctgaaagttagctgaagccgctggaatagccccccagccccgaggcggggcaggtgcctgccgttattggcttttcgaccccaacccttttctatctggagctgcctttgtagatgttgcaggggtgccccgagagtgcaggccagattttagaggaccaaggtcatctacttaggcctcttgccaacacaggatgtgtcaactagtttaccagagacgaaggtaaagtcccgtctcctgcagttgttgacgttcagtaggtcgtcggttaagaaaagtggctccctggttgaccccagctggatagaggctaattttgatccatatgacagctgaacgtagttaaagccattaaaattaaatccatttaaagtcatatttggtaccagggtcaccattttaaaaggtgtgtgtgtgtatgtgtgtgtgtgtgtgtgtgtgtgtgtatagctttacaacacttgctagcaaagccaaaagagtatcactaacaattcatagtgttacaacttgcaactttgttgataagcccttgaagtactagatgagtacccatgtctagtattcagattttttatatcaacagtcgtacatagcagtgtatcttttttaaatttatttttatttttaaacttagaaatggtgtc

SEQ ID NO: 61381 - DNA, 1373 bp, Homo sapiens
caaaaaacttcagagggaggctcctgtggcatgggatcttccatgctccttcttgtccctccatcctgttcaccatctcgctatctgccggccggaaacactcactgggggcatagagaacagtgaattgcctagaacgtaagaattcctttgtaagatttgacccctaaatattatcatttgttgtgaaaatttggtatgcaaacacagcaatgctgattacacagcccgttttgccggggttgtgacctacgaggtgagtcttcaggtctccacacatccttaaggattatgtagcttttcacagtcgtgtttttaagcttcttgctaaggcttataaatttacgagtttcactgtgttccaaaagaaaggtccagtcattcccacaccgggagtcgaacccgggccgcctgggtgaaaaccaggaatcctaaccgctagaccatgtgggagatgacaagtaaccgttgaattctaaaccaattgaatcatttccgcctgcccttgctttccgccttctgccacgcctccgacaacaaatccctgtctgcgcctgcgcctgcgcgggctttcggtgctgaccgcttgttgatagaggtgtgctccttctcgaaaggcggaggcagggctgggcgctgtggctgctggcactacccagttcttcagcagcgctgtgcctggaggcccccagcccctcgccccccggctcgcgggaggcggcaccagacctcctcaggccctggtccctaggaaactgcagcccggcctcagtttccagaaagctcctccgtgcgatttgggaagagcacggtttgaatggttgaaaatagaggggctgaagaaccgagccgcgcgggcctggctccggggctgagttccctagcgggcgccgagcggagcctgccattagaccccattttgccagtcaggccattttaactgaaattttgcatttagattaattctaatttcgtgagccaagcccgaatggatgaaaccccgaataacccataggacatgttttggagcgaaaggccttccgaaactgcgggctttaagatcttgttcagagagcatgctctttgcagggacgtggttggagctggagttctttatcctcagcaaactaacgcagggaacagaaaaccaaacaccgcatgttctcacttgtaagtgggagctaaatgatgagaacacatggacacatagaggggaacgacacacactgggatctatgggagggtggagggtggaggagggagaggatcaggaaaaatgggtactaggcttagtacctgggagatgaaataatccgtacaacaaccgcccatgacccaagtttacctacgtaagacacctgcgcgtcctgcac

SEQ ID NO: 61382 - DNA, 1358 bp, Homo sapiens
gtcatttaagcaagtactttctatgttaggctcttgctgaagctatcaccttttttatctcatttaaccttcatgataaccctgaaggtagataatattatcctcattttaaaaggagcaaatgggactcaggataggctcccagctgctgagggcagggccaacatgtgtccagcacctgatgccatcccccagcccttccctcccaccagaaggcaacacatcccagcctgaggattgtgccaggcatggtaccctctgtacagatgtactctgcatggagcagcagtcatggggagccacagcaagccaacagaacccagccctcctgtagccccctctgcccagcaggctgactagcaaggtttcacctgtctgtttctttctctctttctctttctctatccctatctcctcccttcgctatttctctttctgtatccctatgtactcttctctcttctcctctctttctctctccctctctctgacagggactcttgtttgcggcctgttttcatcctggcttcactgacccaagctgcctttccaggaggaaaaagcaaactagcaggcagtggtaaggctaggtttaccccaaaagcaaccacacagaacacagccaaacatgtttcccatagacagaaggcagatctgaggaagaaacatgagtaaggaagctgccagctctcatgggcaatttttcagaaggcttggaaggagactatgattcctcacccgtgtacagtcagagcctctgggagtctggcatcattctgtatgagcaaggtcagccctttaagtgtaacgtaacacagaaaaaatacagtgcaaagttcagcacagctttgcatagtggccctatgcacacattttcaggagatagagtcacagaacagggagagtacagattcacagacttctcaggaaagagattatgggtaaagatagaccacagtccatctaaggcaccaaggtgaagtttgaatgagactctttgggaaattaaaatattgaaaagtgtactgaaaaaccgaaaaaaacacaaacatgatcaagcaagatgcatgctcagaaaacatctgagaagactgtaagcactcacctcatgctggtctctaggttcaaggcacacccagccagttatgaaggattgacccagcacaaagccatttggcaaaacatggataaataactaaacaaaatcagtgtaaatggactaagctctccaatcaaaaggcaaagagtggcagaatggattttaaaacacacacacatacacacagttcaattatatgctgtctacaagagatgcactgtagatcaaaagacataaataggttgaaagtgaaaggatg

SEQ ID NO: 61383 - DNA, 943 bp, Homo sapiens
taagagatggttcttgttattgggaaatgctatggatgtgtaaagaataaggacaagtggtacactgtgatgtttttattgaaataaatatgtataaattacatacatacaacagaggcccaaaagacacaccctccaaaacatggctacctctggatggcgaaagtgcccacgggggtcctttttctttggttttgtttgatctatgattttcacattttttgcatttagcaaattaatactattctggtgagaatataataatacctacaataaaagtaagaactattcctatacctctaaagtaatgctgtcctactttggggcttatatttcaaaccactcaccattttattttttgcattttcaagcagccgacagcaccagaaatgacctttggccttgcagccacttggtttgctgtccagggttgctgggaagccaggactgactgtgcactttggccatgcaggatgtctggcgctgagatgcagaggcacgtgctggggctggagttagcacagtagtgtatcaccactcctaatcgcctgtttcacatacagtcttcacaatgccccatgagcacagaattccagtggacccaggatgaaaggagtttgctgtgactcaaagcaagtacaagacgtgtgatggctacagctgagtaagccaagcactgacagccccagacgcacacttcctggtggagccagaacttacttcaaatatagaaaaacatgacattcgaagaaacctgaacgaccaaggaagtccatatatccttctcaccattgttatttccctgctttaaccaaccacttatgctgagagtgatcactcacaaaccagtgagccgaaggcaggccatgtcggcagaatgttcttgtatcataaaagtgagataaaacagttgcattggttttagacagtggctccactacct

SEQ ID NO: 61384 - DNA, 1755 bp, Homo sapiens
ccaggttggttcgcgggccccactggaattcgtagtcgacggggtcggtgtggggtatccgccggtattccaggtaacgctgtcgcacaaagtcctcagtaatgagtttctttggatctccgaaaattaaatgcttcttggtggggtagacccctaagcgccgcagaaagtcccaggcttcagtttccttgatggtgttgcccttcataaagatgagccctaagacgatcatcaggaggcccgtagtgggcgtgccttggtcacccctcatctcggcatcctcctccacaggctccagggtgttgatgaggatgtaagtgttgctcttgggttcaagttccaccagcttatacccgaagacgtactggaggcgctcggcggcccgtttgaagaggtcggggaagatgtccttgtagtccccgatgacgtgcttcagtatgtcggcccgcttgatcggaatcttcttctggtctttaatcagcaagaactgcaccagctcggacactttcagctccagctgcttctggctcctgggccccacggcgggggcggcctgggcccggcgggcgccctgaggcgaggggccctgcgacccctgcgagccgcccggcccgcgggacgtgctcggggcctcctcggcaaagccgtctctgagaacccgggcgtcttccccggcccgcgaagccccggggtttccgctatggctccagtctctgtccctctcggcctggccgccagagcggccccggttcctcggtttttgcaacatgtctccggcggcaggtgccggcgcacactccggtaggcaagcagccgcggcggggattgcgggtcggcgacccgctaacgccggtgcctggaggcgcgcgcagtgtcggctgagactgcgtgctgcgtcatgaagcctgcgccttgcgtcagggcggctgggcggtgcgcctgcgcggctgcggcgggtaccaaaaggaacagcgttttccgtgcagccctgcaggtccgggcgatgatttttagtatagtgaagtgttgttaccaaaccatgcaaacagagagcgagaaccgaaactcctaaacaagtgtgtcgctaaattcagaccacacaggctcaggcaagttttacagacagtattatgagtttctaaatcgggagcatttgtaaacggaaagaattcagaggatgaacgtgtgagaaaaaaaaaaggtgaagaggaagggccgaccgtggaagtaaagtaaaaacatttatttctacacaaaatgtagaaggacataaaagacccagagggctcttagttttcgtccctccacccaatttcataccctccatcccactgcccccagttactttctctaatgccccgtggagtctgttaaaaaccaaagtcggctgcaggctttctgcgcaagcaggacttcagtttcactatttccgtatttatattctctgcattaaactcctttagctagacaactatgagaagaccacaaaaaacgtgtcagtattaggtaaatgttttagcttggtcacatgggtttatcttttggaaaacaactgctttcgtcacaaccacaattttagcagaaatgggtaagaggaatgctgcaaacaaacgtgcactctcaagagattactacttaatttggggcatcactgatcaagaattgcaataatgtggagctcttaaatttcttaattcataatatattagctttgaggaaaaaaaagagaacactgggggatttatctctcatcta

SEQ ID NO: 61385 - DNA, 856 bp, Homo sapiens
aactgagtatccatgatgacttcataaaacaaaactgctgcaaatgatgagaactggcaatacatatatttcctagttctgtcccctaatagagcatagaagcaatgatacccaatagtaaggagctcaactagcaccctggttttctaataccaaggcttcagacgatccaatcactctgagctatgggaggacattctctgataaaaggagaaacacataagcagctgatggtaggggcagggaaagcatcagaatgtaagatgaaccaggagcatcttatagtgctagaaaattggaattacacacacacacacacacacacacacacacacacacacacacacacacaaacagtagagggtgggagaagatgaagcaggagccaaatggccaaaggtcaaataacttgagcaacaaaataaatacccacactattgaattacaacctaaaggccaaaataaatagacaggagtccatattaatgtcacaatgactaaattaacaatggaggaagagaccaattttccttaaaaaagaattccaaatcagaaatgtgaaaaacaaaggagggaaacagaaagtcacccccagaacaccagggtgattgctgctgggcccagatccactctagaatgctaacatcagtgcttgaaattttaagaagaaacaggacatttgcaaggcctggaagtatctcccccagaatatttattaatcactatggctttaactcacgtccactaattctttgacacgctctcccccaggaggcaaagcttaatcctcctcctcttgagtgtgggctgaacttagtgactggcttctaacaaggagtaagggaggggaaagatg

SEQ ID NO: 61386 - DNA, 2076 bp, Homo sapiens
ctcctggaagggacccagcaggtcccccgtaagactctgattaaagttgtaaactgccacctccatatttctatctatagttgaattttctttaccactaaagaagtacttttgtctccttttccacattcagtgcccctgggtcatcaaaagtaagagctaaaagcactgattttttgacaagcaagccacagattcaatatcatgtatgttcaacacagccttgaaaaccgcagaatagatttctttaaatcactaaaaggagcctaagacaagatcaaagaatggatcccaaattaactgaaaaccttcacacacataccacagacagtcacggcgtgtgtgtgaacacgggcaggatccagcaaagccactcaagattggcagaggggctgctcggtgccccccactgccacgtttgttctatgtgtggttgagcatccggagggtcctgaggcagtgccagcccactgaggtcacaggtgaagcccacaggtcctgggccctgccaagggctacaggacactcatcaatcagcaggtgagagtacatttacctgcttcgtctcggggagcctcctgccagctcccttgcaaacttcattcacctcacgcctccctccttcctgccaagttcacctctgttgcaatccagggcaggcaaatactcgtcactcggacaaccagggcccatccttcaccgcggctgccgctactaatcaaccatatggtcttttccagggaagcccagacgcacttcgaaatccttcccagtcctacaaacgctgccggaagccacaatcaactgacaagcactggcagacaaggtgatgcgtgtgactcttccacagcatcctgacagtggccagctcggggctcatgagcctgaaggacgctctgccttcaagacgtctgacatgagacagtccctcaaagatatgctagccctgacagtgagcagttcctccttgattctcttcctagattaattttttgtttaattggtaattaatgttcattccttaataccaagtcacaattaaaaattgctcaagtcacagtcatttgacaaacgtcatgccttgtttcacattagcaaccactattacaggtgatctcactagaccaactcaaaatactggctatggctcgaagtgactctgctaagtaaacagaggtggggcattggaatcactccacattttcctgccgactcctgaattcattaagcagagctcagcccaatgcactggttttttatagtgccccacacagccccagaggatctaggggacattgatggtcctgggtggggagttgctaagtggagagggttgtaatgcctgggccccaccttcatccagatcaactccattttcacatactgagcttcctcataagatttcattggtagaaaaggctccatcactaagagtaaaaacgtttcccaactgttggctaatgcattgtgcagagagtgaatgtgcacatagaaaaagctccaagaaggacttctgaccacacagcggcccctcgagctgcaggggcagccagcatggactgggatgtgctacaaatagaaagtgagggcacaggtggctgagaataggcacaggagagaacagaaagacaagcacagaaaacagagagaccccgggaggcgccgggataacagagaggcagaacagcggctacaaagtggcaggaagggctggcagatccctaggaataaagggagtagcaaagctccaagcaaatgctcaccagagcccatatgcccatcataacccacacggcagcacgggggccaagggccacaaaaggcaatgcacgcatacaccggggtaatacgtaagccccgcacccgccagtaggacagcacacctctggtgcaaaggccctgggtgtttctttgaaaacaattagtcacactgatctacaacacattgtttctcaatcttttttctacctcatgccttcttctgaaaaagaagattctgaacaagctgcaggcagcccacatgcacacgtggagatttgggggccctgatccagcagccccgggagaatcagaacc

SEQ ID NO: 61387 - DNA, 7211 bp, Homo sapiens
gaatagattaacccattcatgaactgatggactggtgggttaatggattaatgtgttatcacagagtggaattggtggctttataagaagagaaagagacatgggccagcatgttcagccccctcgccatgtgatgcccggcaccaccttgggactctacagagtccccaccagcaagaagccctcaccagatgcagccattcaaccttggacttcccagcctccagaagtgtaagaaataaatttcatttcttagcaattactcagtttcaaatattctattatatgcaacagaaaatggacagagagagttcttaaggaattccccatcacatccgaggcttatccagaggtgatccttgtctggttccccaggaggctcctggaggaaaggaatggacactgtccaccaccccattcattggatgcagggcccgaagggaggacctgtggagggttttccagcggctcccttaaaaggaacctggagagaggtgattgaattacttcctcagtgcatcttatttgttaatgacatgctcatttcaatgatccatgtcatcccggtccctattaccataaataacgaagcattagctgtacgtggcagtggctgtctggagcagcaaagagccgatcccacggtgtgtctgccctgtcaaaatcatgttggctgtgcttaaaaatgacactccagcctgtccctgcaatccccatgcgttttcatcatgagtcagaacttcaagatgctattcattccgaagccatgtcagctcagctgtcaagcaagtttatcgcatcttgtatttatgataaacttgagtgacatgcagattttgaatatcatattctaaagccattttaatctaggctaaatgcagcctgtcaaattcccctgtaaggcaggatccatggtgggggctggggactgaagggaggtgacagcagtgcggttggcagacaggggagagggaaggtaagcaacagagaaaggtgcctgggttcccaaacagggttccagaggcaagtccactctgcctagaagtaagatggctctggggcaggacgcatgaagggtctcgcccagaacagtggttccagcggtgattcccagggacctatagaaaccctgaagggtggggaagcttgagtcacaagatgtttcaggcctttcgaggactaggtatttgtgaacacaggccagccttggaaattgaatatgctctcgacttacaatgccaccacttaagaggttgttgggctgggggttactcattcagggcactgttgtcccttctgggatgagaaaagccaaattattacacgctgaagcagatgtgtggggcccgaggtttatgccacccgggaactctctttaaagaaaatgaaaacaaaaattgtggtagagaattgctcgggtccctccaaggagcctacacaaagggcctgcagtgaggggtcccagtaccctaggcacagaggaccatgagctgcccagggcctcatgcctggggaaggctaagatgtgaagcatggtgatacaataagaaacatagatttggtccttgtctctgttcctggcacagagggcctaagacctttggaatctctgcagtgagaataatgaatgttttttgtgtactaatgagatgactggtggctgggagcccctgaacagcttcaggatgagggctggtcccagaaagaccaaggcaggattaggaggttggaactttcagccccactccccgcaaacctcctctggggagaggagacaggctggagattgggttaatcaccagtggtcaatgattaatgaatcatacccatgtcatgaaaactccctaaacattcctgaacaacgaagtctggagaacttccaggttggcaaacacagccatgtgctgacagggtggcacaccccgactccatgcggacagaacctcctgggctccggacccttccagacctagccctggctgttcgtctgtgtccatggtaataaactggtaatagtaaataagtgttttcttggtttctatgagctgttctagccaattattgacctgagggaggtggggattgtaagaacctcctgactttgtagccaagtcggacagaagtgtaggttctctgagtacctaagacttgggactggcgtctgcggtgtaggtgatcttgtgggactgagcccttgaacctgttcaatctgacattagttagtgtcagaattgaattgaatcataggacactcagttggtactgagaactggctggtgcgggaaaaaatcccacatttggtgtgagaagtgtttgagtaaaaacagctcaagcccattcttcatttctcagcagggtggcttttgtttgctttgctgttccaacatttcattactcatctgggtcccaatgggcctttattaagaaaagaaaccttttaacataaaaattggctccagatctgagccactcatttcccctgaacctctctggggtccttgtgggctttctgtttggacaggtgatcccagcgattctcccagcttcagaggctgagaggctgtgatccccatcaaaggcagcacatgccacagtgtcccccaaggagcccccgtctgccttgaattccacctacagtggcacagaattggcagtgggcacagctggctgccatggcttccaggggctggaaggagacggtttactgcagggattctttttttgtttgtttgtttgaaacagcatctcactctgtcgcccaggctggagtgcagtggcgccatcttggctcactgcaacctctgcctcctgggttcaaatgattttcatgcctcagcctcccgagtagctgggattacaggcacacaccaccatacccggctaattttttttatttttagtagagaggaggttttgccatgttggccaggctgatctcaaactactggcctcaagtgattcacccgccttggcctcccaaagtgctaggattacaggcatgagccaccgcgcccggtttactacagggattcttatccaagggcctatggatcccacaatggcatgtacaatttttatttttaaggtcttcttttctgaggaaatcagttgtccaattttcaaatgggtccttgactaccctcaaaggttaaaaatgatttccaggtgaaaaataaagaaaaacactgttgcattctctattttttttttctaaaagtcaaatcaagtatgggaaattccagttatccagggtgcctcaaccagggagcttctggctgcttgaacatggagtcaccacacacggtccatgtgtaattgcccaatgggctctccatacccactgcctagacagagccgatttatcaagacaggggaattgcagtcgagagtttaattcacgcagagccggctgcacaggagactggagttttattactactcaaaccagtctccctgaaaacttggggatctgggtttttaaggataatttggtgggttgggggggttggaaaatggggaatgctgattggttgggtagaagataaaattgttgctggaaaggggtcccaatccagacaccaggaaagggttcttggatctcacgcaagaaagaattcagggcaagtccatcaagttggtgactccataggcagggcagtggcatgagctgctcgagggagtatacttagttacttcttgattatatgctaaacaagcggtggattatacacgagttttccaggaaaggggaaggcaattccaggaactgaaggttactccctcttttagaccatagggggtaacttctggacgttgccatggcatttgtgaaccgtaatggtgctggtaggagtgtcttttagcatgctaaacattataattagagtataataagcagtgaggatgaccacagctcattatactctaattattaaaagacgtcgccatcttggttttggtgggttttggccagcttctttaccacatcctgttttatcagcaaggtctttatgacctgtatcttgtactgacctcttacctcatcctgtgactaagaatgcctaacctcctggggatgcagcccagcaggtctcagccttatttcacccagcccctactcaagatggagtcgctgtggttcaaacacctctgacaaaatcacggaaagtcgaagctgtcctcttttgctgaatcagttcctgggtagaggccacaggatcccatgtggtgccagctgatcatcgatcatcatgtgcagggtctacaaatcatctcaagcactgatcttaggccttaccatagtgagtttattctcaggagcaatttgggatggctcagaatcttggagtctccagatgcatgactcctaaaccctaatttctaaccttacagctaatttgttagtcctgcaaaggcagtgtagtccccaggcaagaagggagtttgttttgggaaagggctgttattgtttttgtttcaaagcaaaacaataaaccaagttcctcccaaagttagttcatgcccaggaatgacaaggacagcttgggggttggaagcaagatggagtcagttaggtgagatctctttcactgtcatagttgtctgttataattttgcaaaggcagatctaccatttctctgaaggttgagtttgggatgtggtagcctttgagtacccgtcctgttgctgtgtgtgtgttcagggcaatccaggaaatctggagaaaccagagtgtgtggtcccccttccccatttctctagtggatcaggtaggagggtgactgaggaaatgtgtcctgggatacttcctgcctcccagggtgtgtgggactcagcccttccccagcctgcagaggatgggggggggggggggctttgccagcagtcaagtcctgtgccccaggggaccaggaagcctgtatcaactcctcgctaccccagccagaagcagcaaacgctccaccctgtcctgctgcctgatgggcagagttgttttttttgtttttgtttttgttttcagacacagtctcattctgtcgcccaggctggagtgcagtggcgcaatctcagctcactgcaacatctgccttccaggctcaagcgattctcctgcctcagcctcccgagtagctgggactacaggtgcccgccaccatgcccagctaatttttgtatttttagttgagacggggtttcaccatgttggccaggatgttctcgaacccctgacctcgtgatccgcccgcctcggcctcccaaagtgccgggattacaggcgtgagccaccgcgcccggcttgagcacagacttttaatcagattttttctttctttaaattcctgtgagaccagccgcctgagggattaagaatatcgagggatggaagggagagtaaaagaacgggcacttttccctagggaaaaggaggcatgccgggggggcggagggaaggagggggtgtggaggagggaaggagggaaaagggggagggaggagagggaggagggggcgcggaggaaggggcgggcttccccctgccggcctcccttccttccccgctgcctccgcctctcgcactagcgccccgcacctgtggcgcccctgctccgcccagtcccgcggcctcctcgcccctagtccccggcgctccccgccccttcccgtgggatccgcccctccgccagccccgctggcttcccctctccgccaccccggactcagaacctcccctcccccgccggggcctgggcgcgcctgcccttcgctccccgacctcctgctgcagctctgggcccctcggccgctccctcccctcctcccttgctcaccccacggttggccgcggatctccagcacgccgccccagtcctcggcgtcccgcagcgcctgccagggtcgccgagcctcccctgcctcctggccgcctctgcagtgccgtcctcccggggctggctctctccccaggcccccgctttggccacccaggcactttccgccctgagcgtggcagctgctgccgggggtcctgggaccgcgggatgggaactcccacgcagcgtcccacaggctcctggccgccgcgagcccgcgcgactcgcacgagcatgtccacccgcagcgaggggccggtcactgctacggagcccgccagaaggcaaagccccagacagcaaatagggaggcggctggcacccagggaggccgaggcgggaggatcgctggagcccaggagttcgagacctgccttggcaacatagtaagacgcccccccaccccccgcccaccatctctacaataaatttaagaattagcctggcatagtggcgcgcgcctgtggtcccagcacttcggggaggctgaggtgggaagatcacctgcgcccaggacggtcgaggctgcagtaagccgagatcgcgccactgcactccagcctgggcgacagagcccagaccccgtaacaaagcaaaaatgaaggaggcggcggtttacttctggaataactgcagaagatcatcaagtgcagggagctgtggaactcccgggcgcccagccctcggcgcccctgcaccctcagccgtagagctggggtgttccggcccggagggataggggtttgcagggtgcgtgagcgccgaggctgcccgcgaggcgagagaattgcggggggaggcagggaggccgacggggagggcctgggaggctgcacgcgcagcggggacccggctttgtcccgagcagtttccaggtaagagctgagaggaggggagggagggagaggaggagaaccaggcccggattttcccgcctggggtcaaaccaaagcaaacaaaccaaagtggtgtgtccaaagtgatgcgcctcacaggtgccttgcttctgcccctgccggagttgaggtttggaggaagggcactgtgctgagtcccagcgggggttttgtaaatgctgcggtattggtctctcacggttcacggagcaatcaccacacttgcttgacctcctggaaagccttactctctttttataattaaaaacaattttttttggccgggtgcggtggctcatgcctgtaatcccagcactttgggaggcccaggccggcggatcacctgaggtcgggagtcggagaccagcctgaccgacgtggagaaaccccatctctactaaaaatacaaaattagccgggcgtggtggtgcatgcctgtaatcc

SEQ ID NO: 61388 - DNA, 918 bp, Homo sapiens
ggaggatagcaggtgctcctgaagtgtttctgaattggaccatatgcaaaatgtacatcaaacgagtcttaataacctattgctcctagagtaattgaattcaccactgttgaaaccccgactggcctgagaaattggctcaggtgaaggagactgaagacatgtggcacgtgcaggcaacatgggccctgcgctgggtctcactgaggggaagtgctctacagggtgtcagtgggtcaaatgtctaactggaatatgggtaggagaccagatgcatgcatgcatgttacatctcctaaggctggagttggaacggcagagtaaagagtttggcaaatcctctccctaaaaggtaacagcaaaactggataaaatggtcaaaaccatcattccaggactggaaaacagccaaaagcagacagcatgttgagacatgtttacttaaggaaaaaacccctgcatgagaaatggcatttttgcctgggcttctcatagccccacttcccacctcagttgtgtaaatctgctaggcagggcatgccatggagcccagcagctttactgccctgtggggctggctggatttgaagcaggaatagtggcaatcttgggaaaggtcaatattgtagctagcctgatgtggtaatctgagttgggcaaacatcggaccagtagactagccagaaatctgggagatttggagaatgagaaccatagtgggccttgataagtgcccacatgtccatggcagtctggaagaccaggtgcatgtgcagggctgtgcacaatacccaggagagactgcacagtccccgctatccattgagtcagccttgcatttgcagattcaaccaaccatggattgaaaatattaaaaaatggccaggggaggtggctcacacctgtagtctctgcact

SEQ ID NO: 61389 - DNA, 2191 bp, Homo sapiens
tgaagagttgctagggtgaatacttggcacgcccctcaacactaaacagcagcagcatactgaccacatgtcagtttccacattttctttccttctctgtttttaagggggtatgaaatgatttatacctgcatgttttcaaatccacttaagaccaggaggtgctatgtggacaaatagatcaaactacctcaaaactttacggtgacaatcaagccaaggtaaaacacgctaaaatcaccacctgtgcacccacctcttcctatttttccgcgggtgagtgccagaggagggcgttccacatgggggctctagtgcgtctcacgaggtgcacttctctcatgcaccaagtgaaaaccttacacatcttccctgcctggcattgcgccagtaggcagaaaacttggtgcaacaaaactcaatttttgtctttattggcacgtggtttcctagacaactatggacacaattccctcagaacagcctatggtgcaaagggagggaagggagagtgtcagaatgtggaaggcttgtcgtagttggttacagacctctcttctgagcaccttgtttgtgtcaacttctggctaacctgaatgaacacccatcagctgggagaaacaagcactagggggcaccttcatggtcactggtaaagaaagccctaattatctacaaaatggaaatggaaaacaaacatttaaagttttatgcattttagttttgaactagaaatcttccaagtttaatatataccttcctagtgaattcccctgccaaaaacaaacaaaaaacccctcccctaaaccaaatggtattcctgcatcttgggcaacagctccttcactgtcaagtagttccaaaggaaagcacgagtaggtaagagtcaaaaatgccactgagtttttgctgtgatcaaattgatcaggagacaacaatgtggttctgtaaaaatcagcacatcaacaatgtgtcttcccacactccatctggggaaacccggctaagcagcctggaaacagagtgccaggtcactctctacatgtagggctgctgggcagccgcagtaacgtgtgcccggatgcatctgtgtacacagctctctggtttgctttctgcaaattggacggaaaacagagcctggcttcccatccagtaaatggttttcaaactgcgagtcaagaaaaccgaaaacttactccccatctgcctgctaggtggccttcctgcatttactgccacatcccttcctagccaactgctccctgtctagacggaagccacccagtgtcaacgtctgtgtctcctcacctgagtcatctccatctgctcagtgccttgtgtactgcattaagtacttgctcagaggtcaagaggaggaactgactcacgcagcattagtggatgttcactaagccttctgttgattgtaacgttagtataggggaagggcaaaagcagaattctgaccctaaagcttggccatctgaatgaactcactgcaccatgctcagtgctgtgggaagatggttaggcaacagaaatgtccttaggaaggagctctaggtatctacacctgaccaggtgttcatgccacatactaaaaggtagggggacaaaaaacagacttactgagttgtgtccctttcacaataaattgtttccctaatttatctaaatgaaaactgtcttatttaggccttatatatgtgtgtctgtgtttacaataaggacacatttaaaacagaaaactcaacacctatatcatactacacataaagttaactcaaagtggatcacagacataaatataaaacaaaaaattctgaaacttgagaagtctttacactttgggctaagtgaagatttctcttaggatagaacatcttagtgaagatatgacaaaagcataatctatgaaagaacaaactgattaaactagacttcatcaaactgaagtcaagcgaaatgaagtaacgtttacacaaaaacctgtacgcaaatgtttatagcagtttactaataatctcccaaacctggaaacaacccagaagttccttaactggggaatggataaacaagctctggtacagccacacaatggaataccacctggcaataaaaaagaacctgcaacatcatacatgaatctcaaatgcatcatgctaagtgaaataagccagactcaaag

SEQ ID NO: 61390 - DNA, 1174 bp, Homo sapiens
aatctttttaaaagacccataattgcaacattgccatctaaaccttactgctgaatgccaaagctgcactagctttatgtgcaccaacaataacatatacatttggaatactcctggtcattttcataaattttcattgaagaagtcttatgattggcttttttatcttgctttcatgaatttagactaagcccttgatgatgacattaaaatctgaaagtgcacataatgccagtgacacagtgagggacaccttatggaacagcctcacattaattgccagtcttaccacttgacgttccttttcaagtagtcatagctagtgtaagagccaagaaatctaggtgatggcaaagcaagcgcaatagaaaaatgaaagaaaatggtcaatctaactaagtaaatttgcagcaaatggaactcaaatgtcatttaaaaatatcaaccaacatccaccatttcaccataatttggtctataaaggaacatatcactaactctcatttggccaaggaaattgaagataaataaaacacaatcacttagttatgtcccgtctgctggcccatccttcatgtactttaactgttactgcagtgaaaagcaatgtgtttgaactttgctccttctccacctctgttgcagctgctaatagtgagcaaagaaatttatcaaatcaaagagtggtgatcaaggataattagcaggttctgaataagtgggagtgacatgtcccattaaaaaaaaaaaaaaaaaggctgggcaaagaaattctgcaagtgaagacacaggaaaaagtaacacaacagaagagctacattgagcccctgggaggggaatggtaaatggagagatagaaatatgcctggcttgaaacctggccaggcttcacatgttcctttctagcaagacctcctccatctccaatcgtaagctgggccctgtggtggtggagtcttactggtgaagctgcatgcttgatgctcaggctctctctcatctaatgatgtctcacaaacacaaaaacaactgaacatcagtctctcacatttagttctttaaaagctacaaaccaccatcatttattgagacctggaagtctcacatagtgagttgagtcctgaaaggtagatttgataacaaaaaatccctggttgtcctgaagaagttgact

SEQ ID NO: 61391 - DNA, 2565 bp, Homo sapiens
tttaaatagtattcagtgtgtcctgacattaaagatctgtgtaaaatttaaccagtttagatgaaaaaaggtaactttttacaagttgctgagaaaaaaaatcaaaagaaaatgggactaaaaagacaatctgcactgtagcaaccctgtaagagcatctgtgtaatgcaggctcagtgtttgccaagttaatatttacttctattagaagcttctaaatgccaaaatgaacttattaaaatgtcaccagtgactgtgtgcaggattacaggcaggttttcttctttccaccttttggaaattttccagattaaaaaagaaaaaaaaaaaccctagaaacaaaaaaacctgacacgcaccacttacttttatgatacaaaacaaaagtgaactattaagaaacattttttagccaggcgcagtgactcatgtctgtaatcccagcactctgggaggccaaagtaggtggactgcttgaacccaggaatttgagaccagtctgggccacgtggtgaaaccctgcctctacaaaaaatacaaaaatttgccacgtgtggtggctaatgcctgtggtcccagctactcaggaggctgaggggaagaatgtttgagcctaggtgtttaaggctgcagtgagccgtgatcacaccactgcattccagcctgggtgacagtgaggcgctgtctcaaggaaaaaaaaaaaaaaaaaagaaagaaacgtttaaaaaaatgtatgccctgattacttcaaaacagggttaagagatgggtaagaaaataggtctctttactttccttggtatagtgaacgttattatacatgttgtatttaaatgtttttgacctaacttgattgacaacaatgtaaacatcatcagaaagaatgaccatatcagatcagatggaaataggtctgaagtcaccatgatgccttgactttttgacatgctaagtttgaagggaaaaggaggaggattcaatgagaaaatgacagagctcaggaaattgctaagtgaaaagactttgattacgagctgctcacttgagcaaccaaacccaagaaagaggcagtgtagcaagagaagcagagagttaccaacattctccaagttttaaaagtatcagtaaagaggcaggaaaagaataaaaaaatgtaccagaatggcagtattatggaatctaaggaaaaaagtacttcaaaaaagattaagacagtcaaaacgctgctaaaaaataaaggaaaatgaggcttgaggatgacattaactcagcaatggcttattgaaaactgagcttcagtgtggtgaaggtggaagccaggctgcaaaactgtatgaccacaatgattgaaaagaaaacaggcaagggcctcaaccacatccttcaacaagttaaacagcaaaaaaggacaaataagacagtggaagatagatgaagaaccagtggagagagaaagacaagaaagtgaacaaagctacaagattctggagcagacaggaggctgaatccaggacactggcaagaggcaggctgagtacagaaagagaccagaatagagaggccacggcaaagactttgtggtagagaagcagaataaatgtaggagctcacaatggacagataccttctgattaaaatgggacatagtttaatctagcaaatcaaatggaggtttggatattttaaaaagaaacaggagacagattaagatggtactatgtcactaggtgaaaccgtttatggggaaggaagggaggactctatagactctactgatactctgcatctaacctgggctttcctgatttgtgtaactaatcctgtctcttgtggagtatgaagtttcaaagccaggcagcttacacatttgcctttgatgtgaattccatctccctgtgtctgagccattatctggggttaaaaaggtcccagaggttgtgtggattgcttcaagatgactcatatgggagaggaacacttgatgttgcttgctgccaagttgtggcccatggcagagtcctgccagtctgaatgtttagttgaacttccaaagactacctggtagatattatcatcgggatataagacttattttcttttatttccatgaacacgagtggtagaaatgaaatgttacattctttactaacacaaaatatagcagtaaacaagagcaagatacaagaatgggaagtgagaagtccagcataaggtagacctgatggattttgactttcaaagtttaactggctcaatggagactgcttacagattacaatctaattacaatagtaagcttgttgtttgatacctttttctggtgatccaaatactttttaacccacataagttgcaatactgacataccctgagaatttgatcaccttcctctaagccttccttggctgcagggctatcttctagaacgccagctacaaatattccaacatcatttccaccagccagccgcaaacccacactatctccttttctgaattttaccaatttcatgctgggcctgttaaaacagatatttcatttgaaacagttaagaagagcttaaaa

SEQ ID NO: 61392 - DNA, 736 bp, Homo sapiens
agttctagacaacagtgaggatactttgttcatctaattataatgaagaacaagcttgtgtgtttttctcagaattctctccatatgtttgctctctaagaaaagaatatcacacagaggaacataagtaggtcatgacaacaatggaacgctggtagattttagtttcctgaagattaagtagtaattaagctatgaaatttctttctctacaccagtaaggtcaaagatttgggtcaaagagccaacagttttaatcctggccccaatcccaggtcaacaacataaccctggactttattgcaacctctcaattttagtttgcttaactatatagaatgaggaaatctcagaaaatggttaaatacaagcagataagaaagcacatttggaaattctaacttatgatactattattactactatgaatcaccataataattacagtagcgaacacatgtgccaggtattgtaataactaatttctcaccattctgtaacgtatgacctgcctgcttcactgcatatggggatgctgaaacacagaggtttcaaggttatgcaagtaaccaaaggcaggctgggacatgaacccaggaagtccggctccaaagccctaagaattcactatattctatcacttctcacaaaatgaagatgaagaggttattattctcagcagataatcgcacatcctaaaaatatacaaaagtattcagaaatctaggaagagaac

SEQ ID NO: 61393 - DNA, 3023 bp, Homo sapiens
aatgggagcttattttaaaaccaaagcaaaatgttgccttttatcctaaatctctggatcaagttttacctttagattgttcttcctcaatgtaaggtcaaaaggtgcaagttaaatttttcttaaacgaagaatactatatcccttaaaacaatctattcattaataagtgtaaccgctagcttctcccagccagcaaacaagcttctgtgagagttcaaaagtttcagaggcatagtattcctgctcccagatgttacgggtaagcatttcaaacaaaaatacacacagaaaaccactacctgcccaagtatctcgatactatttgaagtaatgaattgatattctttaaaggggagattttttactcctcacatttctgtattcctttgtttgaaataacaagtactattttatgatgaaaaaattaatatacaaaatgggaggagcatcctagctgtttttcaggaactttggctttttaatgtaatacacaagttagtttcaaagcaatgggaaaatgcaataatatttcagagcacataggaaaagtaacaggaaaaacgttacttttttcggctgaactcaccggcctttactaatttttaagtgctcatcttattgtccattcgtaggaatactttgtattacttgtgaaagtttaattcaagttaaattattaaatgttaaagaggttattttcaaagttaccttaaataagtaatacagcatgaaagaaaacccgacctactacgcctcacaggctgagtggagtgttttgcagtctcaaagccttatcgctggcgtgcgcataccgcagggagtgacatcagatcgaaactacagggtttcgccggggaccaaccactcctccaaagacagcagctcccggccagcaggaggtggcaccccaagccccgacccgctgagagccggcttccagcccccgaaccctcactggagccgagtttctccgcgagggacctgttgcgtgtccccgccctcagcgagccgcagccaggcacaggcgccggcagctatgcacctgcccagtacggcggccgggcgcccgcagccccctccccggccgcccccagtgcggcccgcgccgcccccgcccgaggggctccccgcggcccgcggcccgcggcccgcggccccgcgccagccctgcccaccccgccgccccggggcccagacagccgccagcgagggagggcgggacgcgggccagatgccggtgggcgggcggcgacggtcggcccggtctggccctggcggccgcggaggcgctcaccttggcggccgcagctctggcggacatcttgtctctctccagcgccgcgcgaggctcctcggacccgaaactccgcggcgctggcccgcccgctcctcacgccacagcccaaataaacatctcccgagagcgagcggggcacgggcgggggcggccggaagggcccggcccagggggagggaattcaactcggacaaaagtccgggaagcgcccgccccgcccgggtcttctccacggggcgcgcccgaccggcacctccctccgagcgcggccacccactcggcctcccgcagctttcgcagcccggccacgtcggcctcgcccggtcgcccgcccgtcagcagcacccgtggcctcccggcgtctcctcggaagccggcttcgccacgtaacttcccgggaaccggcggccgccaaggaacgcggcgtccgctggctcagccggcgccggcaactcagcggccacgcaaacctgccggcccggcccactgagcatgcccggcccggcgggggcggggctggacgaggcgaggcgaggcgaggcggggagggggcggggccgcggcgggggagggggcgggacgagcggccggggtcccgaccccaagcgcggaaggaaaagccgggtaacccaagtaacttggaagacagtttccgctgccgtgcgagtcttcctgtttgtttttatccaaggtctggcagaattcgcccccaaggagaaagcgcctgtgcaccaaagctttccttaagagacttgtccacttgctcctcgacaagccacgcacatcatggggtgagccccatgcatgagtgcggctggaaaggccggcagagccgatacccgacagttgtttccttcactgggcaaacagcatggtcacggctgtcaccgcgtgcctcggcgttgttcccacggaaggcggaatgcattttctgcaaggcgcgtcatggctttcatctccgaggagctccggcagggtcagaagcgttgctctcgttcaccggcgccgactgccaaggctgaaactggtgatgaggtcatgggcacccggaggcagcagcctgagaaacaccctagagacctgtgacatctcggcccacaccccacattagacctcaagatatatccaaagtctctttcccgcccatctagacaggaatcttgaaaagtttatttttggccatcaagattgctgaaattcttgttgaccgaacgggtcaagctgccctgcattccaatgctgtccctccaactcaaagttgggcagaaaagggtgtaaacacgtgcagtccatggtccagtttaatcagccactacacaaacttcccacaatgttgacggctttgctaaacaccaaggaacatggtaagaaaccaatcctagactcactaatctacacttgtaaatgtaaaggtcttcaaaaaatgccagaaatccttagtaacatcaatgataacatctttaaagtatctggtatagtgccacaaccggcacagaagaaatggaagaaatcataaacatcaggctttagacaatggttttctctttagaattcaactgtatgaaaagaacaaatttaacaaagaagtatgtgtaggtgatacataagtatcaattaaggcttcgaagtgccacacatcttgcaacccaaagctgtctgaaccagaaaagagccttctgcaaaccaaacccttattcctttttgttcttcataaaaatggttg

SEQ ID NO: 61394 - DNA, 1625 bp, Homo sapiens
ctgtcttggtgtaatgtgaccacactgcctagtctcaggagcaggggctaatctggggatggggtgggctaatgacaggctctttcccagaaatctcagccatgagattcaacttggttgctctcctaaacggagatcttaaccctagggccggtttgcaagtcggctgcagttagctgttatctaaggaatgctgggaatgctggtaggggctaggcccacggggcagctctgactcctccccatagtcccagtgcttaaattccaaggtacttagcttttgctgaaatgctggggcaggaagtctcccagaatgcagtggctgtgaacagcaaggctaatcccatgggaatggtggctgtgtctacctgtgccagcagttccctgtagcatcttcttgttgaacccactccagtcacaggaaataatcagagagctgattatgctatgcaaacaaccaggggttgtggcagtctacaatttccaaccacttgtctaaagcgtgattcagaggggcagcaaccagtcctggtcaccacaagctgttacactttctgcaggctgggtatgcaaaatttacctttctttcagaatatactgtataattttacttggaattcttattctactctcacagcatgttccagatgtcacacagcatgaggaagcaagtgctctccagcccaggatctgatagcacccacatctttgaggactgaggacagagggcatcaggaagccctgacaactctggcacatctgccaccaggtgtgtggtgaggtcatgagggcagacactcaggcgctactcctcttcttctcctggttactcaagaaagctactcagtacttccatacctgagtttcctcatcttcaaaagggaggttacaccctctaagccgtggcattcaccaagaggctgggacattattcttagaaatacacaaatacacgcacccttttttctagtatgggctgttcttaaaggtatgtgtcacactgagtcagcaggctcctgggtccataggcaggtcagcagtctctgacacattctccttcagctcttctgacaggtagaccttccatttttacagctttatggaaggatatttcacagaccataaaattcaacactgaaagggtaaagttcaacgcttttcattattgacacaagcagatcttgactgtcacagagagaaagataaaaaacatattagctcctttctctagtggcctgcatcctctgttccctgccatctcttaatctttccctccaataatgtttgcctgggcatcccctctaacccacagccactttcagacccctcagcagcacctcctggtggccagcaagccttggagggagggagccgccagctagtgcagcagttagctcaccatgccaggacccacactccccccagtggaataagctctatgctcagacaacagacttaatgaaaaccaaagaaacaaggataaaaatgaggtgaaagaaatagaagtgtttttgtgaacttttaaagtacagtaaataagtctagagtttataagcaaaagctgatatttttttaaaagagctttactgcataatctttatccttattcccacaagcagtcaaaa

SEQ ID NO: 61395 - DNA, 869 bp, Homo sapiens
ttgaaataacattttctctattcttttcattaagacccaaatttctaaaaggcctatattttcttctcagttctgatgaataaaattctgcctaaagtcagagtcaataagctcccgaactagcagttgctaatgaaaagaaactctgaagagatgagagatgatggcacaggtcaactggaatggagacaaaatactgagctgcaaaaccgatccagaaagcccactaggtggagatgaaggccggtaccactcacaagaatggagtctttgcagcctttgtacttacaaccattttttaaaacaagagttcttgcaaggttgtctagaagactcctttagaaatatctgaacattcacagtttaatcaagaaagtatccattaagggcaaaaatctcctaccaattagttgtcaattggcaaactgcattcagactggcctctggaactcccaaagttataaaaatagctggattcctttttctgcaaaagagcctcaagtctctctgactcctctccgtttggaagattaataacggtgataattctggaagactcctttaccacacagcggtgcgtacctccgcagagggctggcagtgggccacagcacactctgatgtcccgtgcagttcactgacacccaggttagcaacacaggctgtatgctcagtgaactggggctggcaagggcaggcccggggggacctgcaagggaggggacttgttcataagcacctataagaaccaactcccaagtcatttttcttttcttccttttttttaagtgaatactctctgtattttggttaatcaacaatctttagcacccattatggacaaaacaatatgctgcacacataccaag

SEQ ID NO: 61396 - DNA, 1249 bp, Homo sapiens
ccagacatttttctttaaggatgttttttcctcattacctcagtaacagtttccaggtcggaggaactggaacgcatgcaggtggaatacagtccctgacaatgcaataataatttcccaacttattccccttgccttgctcgtcctctactatgcactcagcagcagacgaatttttggaaaataactgaaaacgcacaccgtgataccaatgaattcttctgctgtctccgcgagagcctggctggaaattctgagccagaacccgccgtaatggagcagaaaggacagacagaggcgggaggccgacgcccgggtgcgggtgccaggcgtcccggccgctccccgtcgccctacgcgccgcgggcacagcgagggtctcggcgaaaccagtcagcgggcacgcggtacaaggcggcgctcggccctgggctcggccttggctgctgcgccccgcgcggcgcgccccgcgtcccgtcgggcccgacagtcgcggcctcgccccccgcccgaccgccccggccgccgctcgctctcccactccggcccccgccccgctccgcgcctagcccggctggggctccgcgcccgcgcggccgcctcaccacagcttcctcttgagcggcaggaggctgccgcggttggagggggtgacgccgatggccatctgcagcaccgtcaggtatttctggtacttcatcttgtccccgctccgctcgcgggcagggccccgccgcctccgccgccgccgcagacacagcccctccaggcgccgcatagatcagctctgggccatccgccgccaccacagctcccaccgctcccgcgcccgccgcacccgcagctgcggccgtgcgtggcccgggctcccgctcccgccgccgccgtcgccgtgcgtgcccggccgctcccgccgccgccgccgtgcgtggcccgcagctcccgccgccgccgccccttccacccctgcaggccgtggcccggcggcgcgctccggtgggcgggtgcgggtctcgcgggaggccgggctggcttggcccccgctccggagccgctgggcgaggccgggccacctgcgcgccggccgccctgcccaggccctgcgcccgcgtgccgcggtgttttcagcggctggcaggagctccttctcaaccgttagcacccaaagagaatcccaacagcacacttccagcgcggattaaaacaaacaaacaaacaacaacaacaacaaaaacgagacgctgcctgt

SEQ ID NO: 61397 - DNA, 993 bp, Homo sapiens
taatggtccacttagggaggaagctattgtttggtacatgcctccaggcaccctttctcctgctggacaactgcttctccagtctaatcctgctctagctttttgctgggaaataacactccactcactctttcaccttggacttcctgtgctcccaaacttggcttgggtccagactgtagtcttctgtgtccctgacctggatttctattccagaacctaaatgctgcatgtctaagctgatctggtcagcaaattttttatcgctcttgcatttgatagttggattgtggcattcctgaccttgcattgcacccgcacaaatcaaaacagccttggcagccctgtaagataatttgattccattccctagcaatacagggccaggtccaaagttaccaaatcagggccctgactgctcctggcacccagccctggcccatggcttcctgactgatcttcctgacctttgcctttccagctccaccacctcaaggaggcatgaacgatctttcagaggcatgtgccaagttctgagcttggtcttcccatccttccagggggtgtgggatgggacttggagttatgccagctcttcagaaggggatgtgcatgcaccagctccaagtagagttggcaataggcaccgctactcagtggcacagtggtgactcatgaaagcagtggggagtaggacatggtggcagagaatcagttcccaggccctgctcagcaattatgaaaaaggctgttaacttggcaccaggaaaatagagtaaaggtcgcttttcctgacttccaaggacttccacagactgaggccaacctgctcgcccaatgtgttctctactgtgagccctctgctctcactgtcactttctagtctggaagtcaaaaaattcttctccttcttcttctctttcttcttctcctccttctcctcctccttctccttctccttcttctttctcttcttcctcttcctctcctttc

SEQ ID NO: 61398 - DNA, 849 bp, Homo sapiens
ttgctttgtgttctcattttatgcaaattcttcctatcagacagtctgtacctgcaaggaatagccatgaaggcttaccgcagttcaagtgttactctagcccacaaaacacataatttatgagccaaaagagaagctggaggccatttatgttggagcaacttcaaaatgtctcaccagcaattaagactatttttgttttcctttcggagaagcattagcacacattttagagaatgaccgcttaatttataacctcttactcatattttagaggtttactactgaagggcagagttatttggaatgttcggaatgagttgcatcatcttgttttaggctccagcaaagaacaaaaactaagaacagacaccaggcacacacttcaacggcatcaagtgcccacagtcaaatggagtcaagtgcccacagtcaaataccattcttctcatactgcggaacaaccaaaaaaatcacacagtggcctaagtatgtcctagaaaatattagcatcagcaaaacaacgtgtaagtagccaaaggacgcagtggaacaagaactatgaggagaggaagaaaatgaaaagtaaaaagacaggcctttttaaagattacaaacacaccgagaatgttaacatacttgttacataattggagactttgttcttgatcttcagtgtcaaaagcactgctacgatcgggttgagttccaacccttgctttttcttctgcagcagatgcattttgtaaggtcctatgggtttattctgcattataacacaaatgggtatcacatttctggcaagctcacccactggttgcttttcttttttaaaattataacaatatg

SEQ ID NO: 61399 - DNA, 1532 bp, Homo sapiens
actcaagacgcatcacttcctagtcgccacattttatttcttggttcttgatgttattatttcaagggtatcagataaccggtgattagtactatcttttggaaaacccagctcagtggttttccaactgaaactccctctcgcttattcgcaggagtcagcttaagtagagctccgcgtgttggttgcagaagtcgcctgtcttccccgcaggaggctgtttgctcgctttgacactgaatgctcccccaacaaacacgtttagcttgcttgcccttctcaccgactgcggagaggagtctcagagtgcacagtcgcagagaaggcgtgcgggggcgtgcaggggcgcacaggcgcctgcctctgcgggtgggaaaggaaggaggtgcccgggtttccgctcccagggctcagcctgccttgggcacctacggtatgggagcctttaacgtggaaaggaaaggagatcgatcactcgagcctccacttgccaagcctgtggaagcgagacgcggggatcggctgggaatgcctggaagcgccggcgcgcggagccaggtgggaggtgcgaggtggccgcgcggggatcttgggtgacagggcaccgagggaaggaggacgcgagggcagccaggccctagggagcagggagagtggctcgggctcagtcgcgtggccccaggtgcgcgtcccaggtgcgcggccttgacccagcagcgtccgccgtgctggccggggcctcggctccgcagcagaagccgcggtggtggcagccggcgcgggcgcagctgcccgcggctggggcgtttcatctgcgccggcctatggtgcgggcatcgccctgggccacgcgctgatcgtctccatctcactcagaaaaagttactcatacagtggtcttgtaaagggtctgaagtggtcaaattgtccctttttagaaacggatagttttaggtcttaaagatgtcctagaaattacccttacaagcccagctctgtcattttatagtaagggacactaagatcgcgtacagagcttgtcggaggggcttggtcttctgtctcacgctcagggttgtctcctcgttacaggagaccttgctcttaaacgtttcagagttcgcttttccccttgctgaattcataaaaatgtttttaatttatatgtgtttcttcttgtaggaagaagaaattgtcgagacgaataacatgaggtcatatagaatcccacttttggtgatttcaagtcaagaaagtaaaagtaaaccattgctatctttcaccttaaatatcctgtgttttattgctcagaacatccagtttttctaatactcatgatgtcagaagggaaacctcctgacaaaaaaaggcctcgtagaagcttatcaatcagcaagaataagaaaaaagcatctaattctattatttcgtgttttaacaatgcaccacctgctaaacttgcctgccccgtttgcagtaaaatggtgcctagatatgacttaaaccggcaccttgatgaaatgtgtgctaac

SEQ ID NO: 61400 - DNA, 508 bp, Homo sapiens
atggcgctgtacatttgcttgataaactgatttttaaaaattaaataacaagaatatgctcccatttcattaaaatatgtaatgtgtcatgaacctgcatgtcatctttgtgcaagggctatgctaaccttccctgtatcattccaattttactactggtgttgcccaagcaagtggggggttgacattcttcgtggggtggggtagatgataagataaatgggctgtggtgaatgccatggatgatgtaatcatgagattacaggctactttaggtcacatggtgaaaaacagctgctctgtgaagatggtactgaagccgaaacctaaatgaatagagaagcaatgtaaagatctggggtgaaaatgttctaggcagagggcagctagtgcaagggccctgtggcaggtaacaagcatggctgctgagaaacctaaagaaggccagtggggctagatgacacacctgagggaaaaaggttaggagacgaggttggacaaaaaagag

SEQ ID NO: 61401 - DNA, 4024 bp, Homo sapiens
ccaggtgtggtggtgggctcctgtaatcccagctacttgggagacagaggcaggagaatcgcttgaacctgggaggcagaggttgcagtgagccgagatcacgccactgcactccagcccaagtaagagtgagactctgtctcaaaaaaaaaaaaaaaaaaatttaaaaaaaattttaaaaaattaaaaagcaagcactgacatttacagctaagaccatgttgtttctgagtgtgaaatcatagtatgcagagtggaggaatcaaagcctaagaaccaggcctgttcagagtaaacgaagtcaaagttcaatagctcataggcactcattcaagatgagtactgtttcctcgtccctgcattttaaatgctcagagtgactaagactaaaacagagcacacagggagcaagggttacttagtaattctactgttcactctgaggaaaagtacaaatgattaattagtacacactgttgagtgaaaagcactaacaaaatcaagggaaaatatttatgactcccatagtaaagtttaaaaaacactttttaaactttcatatggaaccaaagtttggtgtttttaatattttgtccctatataatatttaaaattttaaagtttccacatttgttcaatttttacctacaaaattctaattattttaccgatttggctttaagtaatgagtcagattttgcaatgctgatagtagccacacaaactagtatttgatttcaggttttttttttttttgagacggtgtctcactctgccgcccaggctggactgcagtggcaggatctcggctcactgcaagctccgcctcccgagttcatgccattctcctgcctcagcctcccgagtagctgggactacaggcgcccgccaccatgcctggctaatttttttttgtatttttagtagagatggggtttcaccgtgttagccaggatggtctcggtctcttgaccacgtgatccacccgcctcggcctcccaaagtgctgggattacaggcatgagccaccgtgcccggccgatttcaggtttaaaacaggctttcctaagtatctggctacttcccctaataatcgcattaaacaactgacttttcctaattattatacaattgttatacaattcaaaataccataccaatattctgtatgctctaaaacaaacccctttctaccaccaatccctacttccatctctaaggtcacctatagcaaattttgttctaaagcagtgattctcaactgtgagatttttgtcccccagaggtaggggacaaaaaaaaattggcaatgactggtggcattttggtgtggcaactaggtcgcaactaggtggtgggggataagggtactactactggcatctagtgggtggaggccatctttgttgctatacacaggacagcctgcccgtccaactatgaattatctggccccaaatgtcaattaagtgtctctgctgggaaaagcctggttctaaactgaaacaagcaaatttgcaaatacagctgacaacttcaaaaaacaattgccaagcaagtaattcaaagttcactaagctctgttattggtatagagacacacacataataaaggcgtctttttatactatcaaaatgcattaaaatgattaatcattaatgcaataagtggcaaacacgtcagcaaagagtacttttactacccaagcaattaaacatatacatcttttcaaaaagaaattcgggagacaaaaaaggaaatgaggtaatgacattcttgacagttcctttttctcctctcagtcactagacttttaactggagaaagtttaatgagagaagggaagttaaccacatgatactagtcggcagaataatcttaaaccaaaatacgttgctaaagtatctgttagaatcctaactaatgtttacctggcaaaaggactggctccagttttttaatcttcggttccgaattgatcttatcgtcagtctgaaatacattagcaaaataaatcaaaatctcaatccccccaccctccgtaaaatgctacagcaaatgttgttttctaagtgatgacacatgcgaaagacacacagccccccatttaaattctttcgcatattaactgagctgtttttaagatctgctcattatcgacttggaagcctaataataaaaaatgtttaaactgccagtgtcgcttccaggtgttcacatttatgacagacgggtaaccgcctcgaccagtgaccccaagcgctgcaatcatgctggcggtcatacgagggagggtcgatgggttggaaactaaagaaaaccccagctcccaaggctcccctgggcctcaacactccgcaaaactacggacgacagaacttcgggcagagaatggctgcagaagagttttacaagttttcgccgagccagtgggggctcccgagaaggcgcatttcgcggcgccgggaatcaggcagccgcgctgctgtgggcagggagacgcgcgcagcctcctggggtcctccagttcccgggggtcggcctggaggctccacggaagcgcagaggagagtcgggcgctcgcggggaggggttgtttacctggggcggtggcaggaggtaggacctgaaggtgggtttgggcggcttgagggagaacatggtgccgccgccttttcgccccgttcccgtcgcgggccagtggcagcgccgacgcctccgggcgtaaagctctcagtgcggccgcccaggccctttctgcggccagccgagccgggcggactgacgggcggggatacggcgcagcgcccgcccgagcggggaggggccgggcacagccaggccgacgcgggcgccggggcccatccccggaaggggcccggtgccccgccccgagagacggcgcgcgcaaggccgcggcccgccgctccctgaccgtgtcccgtgctagtgccggaacgcagcggtggcgccaggtgcccgctggcgggccctcagccggggcgccgcggggagcggagcccgacggccatctcaagagcgcggcctctggagggtccttctacggcggcccgcaggggtcaggcggcccgcgggggcctacggcggcctgcgggggccacggcggcagcggtggctgcctgggacggcggcgcggggcgtcttctggccgggctgcagtcctgggacagttcccttgacttacacatgggccgacttcgccctccggcctgggcgagcattgttttgaagctctcaaggaggagctcagggcagggaaaggtgactcgggtccaggggtcaggcggtcaccccgtctgcgcccaggatgcgaggaaccggcactgggaaagtgggccggtgccgccaagcacaggtcacttctgagctcttacggtaattctgactggagcagattttggtgggagggggctagtggtgttacattttggtgaatctattacttgagactaggtccttcttataccttgaagaatcaaaccccaatccagcattttatgattaatgccacagggaagcttccatgcagccataccagtcacaatcacgctgatgagtgttactcacaggaacatttaacaatttaaataaagattcaaaaagttattctttttctgaaaataatttatcctggatttagaaccctactgatctttcaggttaacctgtttgaattccactctgcccaagaaccgtaaccataattgtattttttagagtcagggtctcacaccatcacctgggctgaagtgcagtggcatgatcagggctcactgctgcctccacctcctgggctcaagtgatccacgtgccttagcctctcaagtagccgggactatgggcatgaggcaccgtgcctggccataattgtactttaaaatgttagttccattggattagaagtgttaaaatcactgtcgtgcacactttttaaaaaatttttatgaatatgctgttattcctctatattcaacggatattttctacaaatactctttaagc

SEQ ID NO: 61402 - DNA, 539 bp, Homo sapiens
gaggaggctaataatgctcagatgccttgtctcctataaactgcttctttgtgtctgggctaatatgtagggtgccatttcagaagactgtatattgcagcatttggaacacagctaaattttattttaacaatgatgttgggccagtgaaataaaatgaaattgcaaaaagtctgtgactgggcatgtaggagtgtaattcagagtgagctggaacggatcacagagctgaagcctcccccacgctggcagggctcactggaagggcagagggcactccctgtttacatgcaaatgtgagggaccttggtccttctcgggccagctgagcgcaggcccagggaagctgtggacagacctcagaggaaaatatttccaaagactctcaacacatctaagggggctgcaggtccacagttattagaaaaatgaatttgtcttcctttactgaagatggagcaatggagtgtgtttgcagggttgggccagagcctggtttgtggattcagagctttggtatggatttacgggacactaga

SEQ ID NO: 61403 - DNA, 751 bp, Homo sapiens
cactgagggcaacatgtctcttgctactgtctacttaatggaggttttaagacgttaaatccccttaatctctaggtcatggaaggcttgggggtattgtgtcctcttattctcctggctgagggcttccatcttcccaggtccagcatttacacacacacacccagacacacacacatacactctcaaattataggacatcttccaaacattgtcaatcaaagccaaagccaattttctaaaaacatctactgcccccagtaggaggattttaggttgatagaaaatctgttttgttttcacttagttcagaatgaagatgactcgcatcttaaaatgcctgagtgtcatttcacttcttgtgcttatcagctttacagagcaaataaatgaggttgcacagagccaaaccaaacacaactccaaacttctcccagaaaataatcaataaaacataaacaggtacagcaaacacattcaacatgagttgatatttccaattacattttctgggggaggagggctaaaaaatacactgcagagaatagacaatttatgctataaatataattgcaaatgccatgaattaaaactgctgctggatagttcaaaacaatggtgttttgagaacctgaccaaaggcagtctttcccagaatcagtcccgtattcatcaagtgcactcatagagaggcagggctccgttcttaattcctccctaaatatctgattcagacagagaaaatgtgtct

SEQ ID NO: 61404 - DNA, 1137 bp, Homo sapiens
gtatgttctgaggtttatccatgttgatacaggtggcttggttcatttgttttaagtgctgtgtagtatttcattatgtgaataaacaaaagcttacctatactgttttgaatgaactgtttgttgtttctggtcttctacagcatgaatgtgaatgtgagcatttttgcacatttccttgtacacatgtgctagaatttgtctaaggcagatgggtacaattgctgggctatcctattattaatcgtatttaggatcttgaactttgactcttgactttatgtgtcttttagcaacaacaaaaaaaatgtagacagggataaaagtgcaaggcagaatctcatttttcttctcctgcatgagtacttggaggtctttcctggaagagggactgttttggccagtggggcctccaagcagcaggctgctgagggatggagctcaagggtccccagtgtccccagggatttgctcactgcctcaggattccacgctgtgcaccccagttggtctaagaccaagggaagagcttcagagctgggaagagctggccagccaaggacaaagggtcagatctgccttgtacaaatagagggccaggcgagatgaccctggaagactcgtacatagtgcagtttgtgtttgtttttcccacagggcagctggtgtgtttcaacaaacacggtgcagaggggtgctgctttcgattaggaaaccgggaaccgacactgagctgctgcgtcaatgaagggcctagtgtgcaacgagatagaatgaaaacagcccactgtatgctcatgtgatttcacggctgtttcctagtacttctttaagaatggcttccttaaagccagaggtattgtctttcattcttccaccaataattttacttcttaagtgagggcttttataaataggccttagggcaaactgtgccatcaaggttcttaactcctacaagtttttgtaggagtttggcatgcaccactgttacaggacaggggtccagatccagaccccaagaaagggtgcttggatctcgtgcaagaaagatttcagggtgagtccacagtgcaaagtaaaagcaagtttattaagagagtaaagtaggctgggctcggtggctcacgcctgtaa

SEQ ID NO: 61405 - DNA, 1568 bp, Homo sapiens
gtctgtttagtaaacattattaatttgttgccataactgtaaacatctagagacgaggaatgcctaactttctgagaatgcagcccagcaagtcccagccccatttccccagccctcactcaaatggagtcgctctggttcaaacacctttgaccccaccacagcatgggatcacctcagatagggggaggaggtcaccttcgtccttgggcttgaagtaatgcagtgtgaggtcctgtaggaatggctgtgcgtgtgcgggtataaaggaggtgctgtttttcagtctggaccaaaatcgaagtgattctcccctcctccccttttgctgaattccctgctcccagaccctacccattgcaatttcaaggcaccaaacatacagcagtacactgggcacaggtgaacaggtgacatcaaattcaagaacaacaaaagcctgttccttttcagagcttatcagcaagaacagtgtgggccagctttgtgctggggaggaggaggtcacgtggagccacctggcccgggctgcacggccagtggcatgtctcttgtttctgccaaatgcagcagtgcatttgcgaatgtgaacttacacaagaacatgggtatgtgctgtctctaaaaataatgctgactctcacacatgcgcacaaaagcagatatatgcgcctgtcccccactgagccccaaggatggatctttcccattttggaatggaggcgagctttaactctttattgttattattttttaaagagccttttattttttctatttgcattttcaggttcatgagatgtcagagacttgcaaacacctggttcaacatctgcttctgccccattttatggacggggagactgcagcctggtgagctgggtatggatgggaagcagttcccgcctagggctctgtttttagcccagataaataacctctctgagtgtggtcacctggctcacactgcttcagcggctccgttcccagctctggggtactggtgggcatgtcgtgggtgctcagtaagtgccagctggggggctgtatcctccccagcccacacaagggctgcacctactgccgctctgccagctcccttgctgcctccccccacccttctgtgcacaatgggcagccccctggaagaagcagagatccccactgagccctcagggcatgcaagtggtgtccagaggcttccggtgtggtctgggcttgcctcccactgcatgcgaggggcagtcagggagttagggtgaggtggtggcctgcccagtctccttgggctcaagtggtcctttaaggcagccctgggtgctcagttcccaggctggctcagagtcacctaggaaaagcacacctaagattcaaatcagcatgtgctgtgggaggtcctgtctggggttcctgggagaggccgttccccacagctggtgcctagtcctgggagcctcttgccctcccaggttctcacttagggcccctctggccctccctcctgttagatgctgctgcctgctttcctctgccagaccccatcccctaagggcgaggcccaagcctga

SEQ ID NO: 61406 - DNA, 1217 bp, Homo sapiens
aaatgcagatctggtcaggtaatgttcctgctcaaagcccctcagagctcaggactgactcagatcctcacctgcctctaagatgctgcctttgcccgcctccctgccgtggcatcctttgcccttctcccctgccatgctccttgggcagcacagcgttctcttgtcctcagcagtactgagatgctggccatggcatgtgtgtgtaacgttacttggctaacctgtgcctcctatctctgggcctcctggcacctgtcctggatctgttgggctcaccagttctatcatttctttgagtttcagagcattgcaaaagtatggaaatgctccaaacttgtcttatgaagctagtacaatcctaacaccaaagccagatcaggagaggtcaccttagaccagttcactggtgaaaacagacacaaaacttagaaagaatacagtaacggctgggcacagtggctcacccctgaaatcccagcactttgggaggccaaggcagggggatcacttgaggtcaggagctcgagaccagcctgtaatcccagctgctccagaggctgaggcaggagaattgcttaaacttgggaggcagaggttgcagtgagcagagatcatgcaactgccctccaacctgggtgacaaagtgagactccatctgaaaaagaaaaaaaaaaaaagaatatgggaacaagttgaatctagtgcagttctaaaagaacaagaccacatgaccagcacaggcaacaggcataccttattctcaggaacgcaaggatgactcaacactggaaaatccattcatgtaattaagcatattaacagattaatgaagaaatgccctgtgatcatctcaatagctgccaaaaccatatggtccatctcagtagagccaaaaaaaaaaaaaaaaaaaaaaaaaccacacaagaaaaagaagtctaaaccaaaaacaaacaaaaccccaaaatatttgacatttagaaacaattccttattaaaatagaaacaaacaaaaactctcagcaacctaagaatacaaggaaacttctgtaacttgatggcagatacctcctagaggcatcctgcaggcatccatgataattggtgaaatattagaaacagtttcataaagatcaaggacagaataaagcctgctgtctccatagttttattcaacattttcctggaggttctaaccaatgcagaaatatagtaag

SEQ ID NO: 61407 - DNA, 2710 bp, Homo sapiens
gcagtagacacatggtggtctcaggagctaacatcggcccttctacaagccagggggacaccaaacacttgcctgtcaatcgagctccactcagctgggttcagacaagctcaggggctaccccaggctcagcagtgccgactatagccttgtgcagttactgctgcacacacgtgaggacacacaggaagggtacgcatttgacacaagcttcccatggaaataccttctcaaacctggagcagggtgagaatgttgcagccctgggcccctcctgggtcagaagctggctcagcccagcgttcacagaggccagcctcccagagcctgagaagaggcctgcaccaggcgtgggcacagaaggatgcagattgtgcaacaggagccaagggctggagaggcattctggcgagagatttggaaagcttctggaacagggtgaaacattcatcaggtgacccaggggataggctctccaggaaggaggcccagctccagcagtagccagagttctgggcatgttaggacggtgaggtcctagcacgcggggggcggggggcacaggacaaggtgtgcggcagtgcaggaagccagctgaggcaccctgaccctcaggccatgcccttctgctcctgtgcaggggacagcagaggggagcttggggactgacatctcaaaggcctggtcccctccttgctctcgcagccagtccttgctctaggacagtgacccatgtctgcagcccgacccagcccacccacagagcccggcgtcccagagctgctggggtgcacggtggtcgggaggtgagtggctgggcagtcctccgcagggctgctgccaggtatcagcctcggaggtttcccggaaacagagccaacgcccccccaagacctgggcagaccgcatgagcgtaggggtcaggggaccgggtcccccagaggtgtcagaaaaatgctcccaggaggaggacgccaggctgctgaggcctgtggctgacaccagggggcagggcggggcggcggggacagcgtccggaggagggagccgcccagacctagcccgggtggggcgaacgaagagcgggcgtggtgggcgcctgctagctccggctcgcggtgttaggccttggggacatcgctcggggacaggagagccccgggcccccgccgccccgagccgtggccgggaaggggaacacagtccatgcgtgcggcgcccgacagcctctccccgcacgcccgagccccagtgcaggcggcggcccggcccctttgtgcctggagtgtcacgcgcgggcgctcctgccgccgcgcctgggagaggcctccggcaccccgggcccctttccaagcacaacagcagccctgccgcggccccgcgctgacccactttccctcctgcctcctcagcccgaggccgagaatccagcggccgccgccaagcaggtgcgagccgtcgggcggggcgcgcgggaggcggagaggatgggcccctgaaccaccccgcgcgccccacctcagcctcccggggcgagccaggtttccggggcgggggccgcgaggaggaggaggagggcaaggcgggggaacgggagggagaggacccggggagggggagggggaggcggaggggaagggggaggcggagggggaggggcagaagaagggggcaaggagggcagagagatgagcgagaaagaaaggaggggtgcgggaaaggaggagaggaaggagcggtgggaggaggaggaggggtgcgggagagaagggctgagggagaggcggagggaaaccgcacccctgcctctttcctgggccgaggccagccggggaggaaatgttgaaatgggcgaagtgcacatccgcctccaggcctaaggggtgtaggggtcaggccgcaccgaccccgcccttcccagcccttcctgccagacctctgcctccgatgggcgagcccggttgctgggaggcggttcgctgtggagcctggaccctctccacagttcagcccgccggaggcgtgtgcgcttccagatgagagcacttgttcactgaatgaccgtgcgtacttggggggacatctggccccagaacctccaggagcagggtggctaatgctgagtgccgtggcctggcactgggaagcgccggtcctcagtccctttccctgctcctgggcatcccaggccccttggggcgttcttacactgcctgagttagacctggaagagtcccctgtgccagggcaggggctttgcctgcttggtccttgttcacccctgtgtatagctactacctattacctacccacctgtccacaagtgtcagtgcctgatgtaggaagttacagtaattcacaaataaatctatcacaaagggacatggatactcacacttccttcttacccctacttccaggcagccattgttaatgggtgcgtgtgtacagttctgggcacataccaacatgcacggatgcatgttaacctgctttgtatggaagaaacggggtcaggatatcataaaaagaattaatgggtaatcagtattcatcaaatgccaagatctagttctgagcactttgcaaatattaatttaatcaccacgaacctcagtaaagtttattactattactcgcatttttcagatgaggcgcctaaggcacagagaggttaagtagcctgcccaggatcacacagctactaagt

SEQ ID NO: 61408 - DNA, 819 bp, Homo sapiens
tgtgaataatttactctttctcaacaaatgtggttaatacttaagggtaaaaaggaaaagattgagcccgaaattaaaaaatgaagacaaccttcaatgatgtatttctgcatcaggcaaggtgtcttcttatgggaacagcagagtcacccagaaacaagggtgtaattatagcagtgccatctgcggcactaaaataagaatgattatcaacactatctttcaggtttttcactaagtcagaacaatttgctaaaaataatctgtactgtatccgcaacgcccccaaacaatgtgtgttttcccgtcaccgcggctgccagctccccacgggccgggccagggggccgagggggctgttcagccccgctggcaaccttgtcccctgttggctggctttcattgtgagcattgtcactggagcagtgggagatgggtggagggaaagttaaggctggattccagccagctcgggagggccacgcagacaccagcttgattgaagaaggctgggtgcatttcccaagagcctcctggtggtttcagggcccatggccagatcatcagttcctggaatcccgcttggtccagagggaatgagtcatacccccaacccccagcataagggatgaaaatacagaagccagatacgagttcccttgtgctccatgcagaggtttccttccagattagaatacttaggtccccaatccagagccccccttcctgaagtcagaattgccgtggagtctgcagggtcacaaagaggcgcagtaagcatagggactgagctcaaaaaggcgggtggagtgatgatga

SEQ ID NO: 61409 - DNA, 3774 bp, Homo sapiens
ttcaggaattactccaggggaggagtcacccctgtctttggggatgtctctggcgtgttaagagtttcaggtaggattttgcttggggaaaaaagttcttcaatatacacacacacacagacacacacacacacacacatacacacacgcaaaaacaaccaggggcaagttaatatctaagctctctttctagtgcacataacagtgacctatcaccagttcctcctggatcctgggtaatcctttatggacagggaccttattttacattgtaccctcagggtacagcctggtgtggcaggcaagcccttgatgactgtttactgtccaagctgaacacctgaaggggtcacactacaggccaggcttgtagacatccgacaaaaatcaagaagcctatctggccctaaatctgttgctgttcatccatgtcacacatatcacatgcaaacaaggctgcattgagattctggaaggcaaacacacggccatatgccatcttctctgggcatagtaaatcaggttctggggtgcatgtatatgagccccacaccttcagcgcctctcagcactttcctggggtctgatctttctgatccggatgaggtgactttgccccagctacgctggattagcgcagggatgtgcacttgaccaaccaaagccccctcctcaggagtgcagaactggccccaggagatcctagctcactttaccgagacataaacttggggggatttgggacagtcatttcccatggcagggtctgggagcacagggcatctgtctgcagaggaaggagctccaagccaacgcagagagagtttgaggtgattctgctgcaccctccccagggctctctggagctccagcgtggcttccttgtctcaagttcctctttcagtgtaaagtcagctagaattggtgacttgcaaaagacctgaatcatgcactgaccttttggcaggccctctcttgctctagagaatctggcctaagcatgcagactctggaaatttatcccacagcacgtgcatagttttcgatgcgtcatttacccaatgaggctgaacctggaattggacttctacctgcccgtcctttccaggttttaactatgtcctagctctcttgacttgagctgggaaattccctatgccacttagactctgcagctcagctcaaaggccctgatgtgatgcccccctgaaagccagggcaatcccacctctgcaatgctgccgccgccaccctgccatcttcccgaacctctgctctcagcttgtctctccccagcctgggtcctgaaaaggttccactgagcacagtgcctgctcccagccatctgtcttgccctcagctgtgtgccagccacatgctagccaggcccggcctgtcctgctctcgccctgttccctccctggctgattcgaaccccacactcccctccccacccagccaacatctggggactgcttcttcggggaccagccccactgtgtcttgtctgatctccacgtgtttctgcagtggccctttcctgggtgacccgtctgctcagagcagaaactgagatgggcaggcctgcgccaccttccccttggcgcctttccagtgctgagtgttctgcctggcacaaagccagggttccgcaaacgctggttgaaccgaaacccactgtggttgccggttcctgagctggtctttcttctcgttcccatgcccagctcccagccacgaactgtgggctgatcctgtggccggctccctgtcctgtggcccagagagtgtcttcggctggggatcctgctgtcggggccctgctgtgcctgctgccagggcctcaccagcctgctctgagcagctgggccacactgagcacctgccctgccctgcttggcagtcaggaaggacttcctgtttctgcttctgaaatggactgccagctccagggggcggcaggggaccggccccaacacccctgccatccgagtggcacctaggctgcccggcagccctccctcaccccttcttgtgtctcctgctatgggtgggcttcaggaaacgtgcacttagcaggctgaggcctaaactcagctatgggcttaggatccagaggaggagccctggagagcagcacgcagaaccttttggctttgagaaggagggggatgaggggcagggggcaggggcgactgtgaggtcctgggcttggggaccctagggaaggagtggagcagctttagggaccccatacaaaggtccccaggcctcacatgaaccgtacctccccagcacctcccatgatccccatctccccaccctggactaagcactgggagggggctgccgggaggaaaggccccactgtgggagataggggagtagggagtatcaaaggggcacagagagaaggcatttcaggaagcaccttcaccaggactggccacaaataatccccaggcagagtccattccagtggttctcacctgcagacctgtccctgcctcctgcctttccctgtgcatgctctgagccagaaaggacaactaagagacggtgacagaggggcttcaggacgccgcctctgtggggagctggtgggctgtggcatcccttagggggtaaccccactgcccagactgctgggctccagggagtggagggggcagagggcacccgcccccacctctgcactcggtggtcctagggcccccggtctgcagggtccattggggcagcagctagaaaaatgtctggctacaagggacaggggcccaccccagaggcttagggcagcagctcgttttctgccacagagagaggtctggggcaggcagctgtgcacgttcagctctgctattcgagggccttccggggggcctccctcctggtgtggtgctctagacactgggccgccagcaaggggtgaggaaggcaaaggccttgcctgctgcggcattgctgatatcagggaagcaatagattttcccagccgaccttgtttagggtctcaggccacccaagctgtgagctaggctaggagagtgaacggggctgtcgaaatggactttgaccgcagccgccgaacagcactcaggagtgggcgggatattaggatattggagggttctccacagtgagagctcttgtggctgccaccaaacagggcagggtctggtgggggggcaggaggatcagggacctggagtctggcatggggtggcctgtctaggcagaagctctggggagtccctgggaaggccccaagccccagggtcaggagtctctttttaggctgagggggcatcgacacccgggtgcaggagtctgcatgggttggccgagcacacaggtgtgaaggcagccctttgatgtgccttgatggtgcaaggagagagccgggtggtcttgcagtcaccaggctggggctccagccccacgttacagccttgctgttgccctctagtgaccccttgcatcttggaagtgaggcgacatgtggtaaacacctggcacctgcagggactccctgggtagccctcagaggaggccacggggtcagctggggacgcagagggtgagacagaagagaaactgggatggggctgacttccaggaagccgggacatcatggggccccagcttagtctggcccagctgtcagaggggctgctggttcagagcctggggccttcttagttgagatgccagtgccgggcgactggtgataaacgtggcccctatcccagagcagtgcacaccgccttaggc

SEQ ID NO: 61410 - DNA, 1205 bp, Homo sapiens
acactccacggatgagacagagccctgggcacctgggaggtctgcacatgccccacagggatccctgagcccagggctgattttaaatagcagagaaaaacacccttcctgctttctgaacaacggcccacactttcatttgctgcctgccctgctctcagagtgtcttctcaatggacaaaccagaagggcctgcaagctgctgactgtggcccacacagcccacacactggtccccaaatctcaccttcttccccatcttctcttcatgaggaagaggctcagcccctttctccctgcccaaacctagaaacacactccaaggccgagtcctattaacttggggagggtgggagtgttaaacttgagctcaccaaagatttctgtgattttccgagattgcatatatgactgatttgggaaaacttgcagggaacacaagccacatcctgcccgtaggcccggcttctgtagcgcctatggtgaccaggttggcactgacaccgctgtgccgctgctctgtcctggcccagacatgctgtcatggccttgggtgccaagttaaatgaggtctgtcacctgtcccctgctcatggagctgagtatgtttgaagttcatttactgtgtattttcccctcggggtgtgacaaatgagccctacccccagacaacagtgccagaaatccaaacagggttgggctctatcccatctgcctggggctcagggagtccctctgctgtccccaacacccactcctcatatcccaccccccagcacatggagctggagctgggaactcgcaggcccctggggacccatctgcgctgtttgtttgggtgagagctctgtattgacagcagctctcctggcagccctcggcagagagaaggctgtgccaagtgggtatcaagcaacggtcgggcacacgctccagatgacacatgcgggggtgggggcgcagccctctcctaccctgggggagccacctcccgataatccctcccatggctccccggggaggggcaggagaacacaggatgattgtcacagatcatgtgctggggaggagagcctcgcagacctgaggccgggaaagggggcaatgaaaacagccctttgtccagggcctcatctgccacacactgggcttgtgtttcttgctttatgacaattgggcgaaacattagactgggcatcaattat

SEQ ID NO: 61411 - DNA, 1721 bp, Homo sapiens
caaagccttgttgctgtgaataagcttaattatttaaatttgaccttcttggcagtcaaggcaaaaaaaaaggaaaataaagaacatttataaagcgcttgctatctaacacagttccgtgattctttattagaaacccttgggggtggatgcttttctgattcagaacatttggattttagaccagtaataaactgcatatgtatgttaagtaacatgctaacaggatcggggtggcaactcatgaccaagcacattcatacatttttgctgtgaaacatgcaaatattcacactaagactttaactatccttatatctgaccaggtcaggttttgccaccaaatgagtttgccacaaacttatggaaaaagtcttggttttcaggaatatttagattttggaactgtgagttagagactgcagacctgtaatagaagctgttaattaatctctagggagggagaaatgttttcctacttcacaaatctaataccatgtggactttaaagatattgcacaacaaaaggagcaggttcacagtggatgttttacaaaaaaaatgcattgtgtcaacaaactcaactgaactctattggacgggcatctggcctgccaccaggacgccgggaggggcaggagagggcaggacgcagccctggatgcgggatgacctttgcctttcaggtacacattggcgggtggtgttctgcctcagggggccagagcacaaaggcagcagggattgagtcctgggaggaggccagggactgaatcagacgaggctctgcagggcagtgccaggtgtagggtgtttgtttggctgcaagtgacaaagacccaggctcaagctggaggagcaacagggactgaggatcttgtagcagaaagtgcagaggcagggtggcagtgggcaccctatgccaggctccagggtgtctccctgagtgtggccctcctccgggtgtggcctcacccttggctggtaaaagatgtgatatcctgacaatggcaaaagtccagtggaacatgctagactatttcttcctgtgggtctcttttatcagagaggaaaccttagccaggaattcccagccgacttttgtttatgtctcatcagcaggacagggtcctcagcccctctcagcaagtggggagagagtcaaacagctggtagtggccagccaggacggtccccacatcactggcagggaggagggggcacatcaaggtgagcctcaaatagtggggaaacgggggtcacagccaatgggccggccacccattgagctcaccaggggtggggagaagggtatgcggggataagacagagctagtgggaagtcagccttaaaaccctggggtgggttgcaaggacatgggtgatgacaaccaagggaagtcctaggccttgagctcgtggggaaaggggccaaaagggcctgggtgagtctggtcagagctgctccttcagcatggagaggcttgggaaagcagtgggtttgggactagcggaagtgaggggctgagccccagctcgggcagtgatacgggggccagatcaaggcacctttcagggctgcagggctgagcgcaccccaaagcccacctgctccacacctgtgcaggaagggcaagccatgtgtcttctgtacctgtgtgcaccactccagtctctggaagtgtgggttgcttctcccacaccaagcaatgcagttctct

SEQ ID NO: 61412 - DNA, 4411 bp, Homo sapiens
agtgactaattgtgacatgtggtgggaatagaggaacattccgaatcattacttggtcaggacacacgtctcttattaaatgtcatcaacacaatctgcctggaagaaacacgattactttctaccaagcacagaccctcctaaagggaccagacccagtccagcacctttagtctccccagagggtagcaactcaatcagcgagaccgcatttcagggttttagttacagatactgagggtgctcaaacatccatgcagtttgctgttcaccgtaacacgcaacccagaatggccgtttcggtccctcgtcggttacctgaaaaccagtcttactgagctccaaccccaaattaatttggtgagaactcgaactcggctattaaccttaattctgagagaagaatgacacccccctcccactgcgagggtccactgagggtgagtgcccgggctccttcattctccaggctcctctcagaacacagcaagggtggctgactccttcgaacgtccattaagcacaatgcaacggggcgaggcagtagggggtttgctgagcccggttccgcggcggtgggaagttattcaccggcgtctccgaggacggcccaggcctggagaatggctggggccgcgggctggggtaggggttaccgtgagagtcaagggcaaggtggcccagcccgggctgggaggcgcgggctgggcgcagccgagcatttcctccgggaggcccagacagcgggcgggtggggcgcggtgggcggggtcctcgcagctggtggcgtttgaagcccccccgaccgcggtgggagaggggcagcctagaagagttggcagcgggcctgcggcgggatggggaggaaggggccccgcgttccctcagcagcggcgccggccgccctggcacgtagttcgcttctggaggcacaggccgcggtgggcgcgccacccgggctgccaggctcaccgccagccgaggccagtcctgctcgggctgacccgagctgaagggcagcgcggccgcaccccggaccccaggaacgagcccgagtctgtccctcccgcgggagctgccccgcccggactcccggagctctgcaaggcaggggcgtggggagggcgagcggcctgaggctctaggcgcggccacccggcaagccggcggcggagggcgcggcgcgagtgcgttccgcccctaggcagccccgcgcccggccgggcagacacgcctccccgccggcgcccatcgcgggaggaacaaatggcgccctccagaaaccgctcccctccatgccgggggccaaggctgtcaccacataaaagctccggcagagaagtgctcgctgtgtccccgccgcggggggtacaagcagccgctccgcgccgcgactacccggcccgccgcccccggacgtcatgcgtcagcgcgccccgctccagtttccgcccctcctcccaccggcccaggggacacgcccactggcgcgcgcagggcccgggaccgggcacgcccctctaacggctcggattggcctggccgtgcactcacggaccaatggcgtctgtcccggccctcggtcacgcccccttgcccaggcgcgggcacgcgaccgctccgttccgccggtgcgcgctctggggtccccgccccctccgcgcgcgcagctccccgcagccgccgccgcctgtaacctgcgccgccaggatgtggctgggggctgacgtcgggtccagatgtggccccggccccgcccacccccggggccgggccgcccacacggagccgcggcgcgcacggcagctgtcccgcctgccacaatgcgcggcgaagctgcggccgcgacttggcgaggtggtccctaacgttgccgctcggcatccttagaaccggccgcccctgacgccgcgcggggaccccagtcgcccgcgcgccccatgcgctcactcttcggtgcccggccgggccggcgcctcgcagacgcggagccgcgcgggtgacggcacaggcggctgcgcgcccagcccagcccagcccagcccgaggagagggcgcgccgcgcccccgccccccgcccgctctcccgaggccgtgggtgcggatgcgcggctgacgactcgcagcaagagcaccgccgccggccccagcccgcagcatggcagccgccgcctatgtggaccacttcgccgccgagtgcctcgtgtccatgtcgagccgcgcggtcgtgcacgggccgcgggaggggccggagtcccggcccgagggcgcggccgtggccgccacccccacgctgccccgcgtcgaggagcgccgcgacggtaaggacagcgcctcgctcttcgtggtggcgcggatcctagcggacctcaaccagcaagcgccggcgcccgccccggcggagcgcagggagggcgccgcggcccggaaggcgaggaccccctgccgcctgccgccgcccgcccccgagcccacctcccccggcgccgaaggcgcggcggccgcgccccccagcccggcgtggagcgagccggagcccgaggcggggctggagcccgagcgggagccggggcccgcggggagcggcgagcccggcctcagacaaagggtccggcggggccgaagtcgcgccgacctcgagtccccgcagaggaagcacaagtgccactacgcgggctgcgagaaagtttacgggaaatcttcgcacctcaaggcgcacctgagaactcacacaggtcagtggggcggcgcgggcgcccggatcgcgcggacggggtcggcgcgagctgcccgaccacgcccccggagtccccgatggggcgcgaggtgggggccgggcgggccggaacgcccggggcctcgccccttcccctgccgctccgacccgcggctggccccgcgcgtcgcgcgaggcgggtcttggctctcggagccggcgcccgccaggcgaccgcgcccccgccgggcacgccccctccccgggcgcgctcgggtggggccgcgggggcggatatagtcatctgggctgggggcggggacccctcccggccgggaggcggcgcgggcaggtgcgggcggcctgggtgtggaccgcaggcggcactcgtgacggtggggcgcccggagcgggggcaggggacgctctccggggtccctcctcgtttcctcccccgctgcccgggcgcgcgctcaggaggggaggggccggccccggcgcgcggcgggcgaagttcacgcagggacaaggtttccttcgccactcggcacattcttcgctctcttcttcctgtaatttttccagcgctctaaggtttaatttgtcgtaaccaaagtcagcggcggcgcttggcgatgcggggggcggtcccgggtcccgctccccgcctgcggctctttgtgggagcccccgcccatccggcccggcgggggcgcgcccggccctaggctcctcggcctcgaggctctctccggaaaggaatgccctggccgctgcccatcctccgtgctgccctctcgcctgcccacctctcacctgccctgggccggtgcggggcgggcggcacctgcaccagggcgggcgctgagcctccagcctggggatcaccgcccgcccccgccagcccagcggcaacagttcccacgcgcggcccgatactttgtagttgattcatctgtggcggttccctcccccctttttgtttcgtttttaacataaagatgaaaatattttaatggacggcaatccttccccattttggtgtaaagaattgtatgcttcctctgagctcacgtgagttcttctgtgacactcacctcttctaccttgggggcaggctcaaaacccgtctactgaatactgttgtcttgtgaccaagggtggtggtctctcatttgtaaaatagttcacatagtgattaaaaggcataaaaagaagctgcagccttggataccctagagctgaaggccccttttttttaccatttggaactgaaagggcccaaggtctgcaggtgaggctttcagatctcggactaactttccccagggaggcttttgtggccgctccaaaccacgtggcaggtgatggggtagagggtgagagcggggccatttctaggcattcggggtcagttaagggtgtgggggctcaggttgggggtgggagtcagtgtgggctcagagttcagctcgggacgcggctgcagggtgggtgtggccctgggggaggggccaggctaggctcagctcggctccaggtggatcctgagtatcgggtgggggcagcgattggggcgtggctggggttgagatccgctttgggggatgatgcccgtgctgggcaggatacttaatgtttgggaaatttttctacggcctctgtcagggtggcctgccactcggcagcaccggt

SEQ ID NO: 61413 - DNA, 1021 bp, Homo sapiens
gtgggcacctaggctttcccctctttgtggcaggactggaggagtgtcagcagagtggcctccttcacctgccttttaagccagggcgtgctctgaaaacacgccatggctggacgttttcatgtgtctggctggcaagggctccaggggaggtggcaggggtgccaggaatccccagccacccagacatttgccaagcttggctcctcagtgccttggctggtggcctttgggggtgacttcaccctactgtcatggctggcccatggcgaaagggttcacctgctgcttaggagctgagactgggctgggccaggccaggggccctgtttctcttctggactgtgggggtttgggccagtggggagggagagcttccccaagggaccattacagaatttgctgtaagaatgtggagaaggagttctggtccttgggtttacagatttttattctaaacctaatggaacctttcttttaacaaaatctcctggaatccagtgcagaaaagagctgggaggattgctgggtggggcaggatgagggtgggaggggttttgactttgtcctgaggctgtgcgggatcctccctgggtcccccaaggaagccgcctgagtggggagggaggggccgcaagtaaccaggagcaggccaaggttccagggttcagcccaggacagccagtctaggtgcaagccaaccctgggggctggccagggagtgtgagctgttgcagtttggggcaggtgccttccaggctctgtgggtcagggttctctcctggcccttctgagggtgccaccctggcctccccgcctttgagcaggtgggggttgggtctgggttccatagggctgggcaggaggaggcagctgtgagatcccaggcagagccaggagaggagcaggacagatggcatgcaggcgtgctgcatcgggctgggattgtggggtgccagcagacaggggtggagtggggacttgggcattcctcactcattgcctgagtgtcatgaggggc

SEQ ID NO: 61414 - DNA, 880 bp, Homo sapiens
gggcttagtgtgcttagttctgacccgggtgtctgccctgccagcctggtgtaaagtcgtcagatgctgtgggccacacgaggtcatatttgcaccgtcagtttaccgggggcaaatgaccttctggggagggctgcaactgctccccacctctcacccctggttgtctctgtttcccggagggttccgtttgtaggcactgatgggggttctggttctagaggaagagtatctgagctcagagggagtgcagctccacaagtgtgcccctctgtgccggcatctggctcaggcatgcgtgagcccctctgtacagatgcctgcctcacgctgagatgcccacggcccaggcatatctctcaggagcccccgagaaccctgacgggaacccagagctgttccgcacagaacaccaggtcaatgatcttgactctgtttctgggaagattacccatctgtggcttccagaaagcacctcttcgtttttctgaaactcacagccttctcccccgacctcctgtcctctgcttttctctgaggccagaaggagagatttccacaccggccctttgccctggccacaggcctgagctcctgcatagcagctgctgtccttccccttctggactagtccactctaacctgaccctttggtaaagagtatgatggaccccccaccgctgttaccagtattcagccaccctggagctgcggccacccacacagctgtggaaagcccccaggccacagccaggcaggagctcctccccgggttctcttcttcctctgcaggagcttccaggccagagccccaaggcctcatgctgccccctgccccagctttctcaggacatgaggcgtcccctccttgcaggccccc

SEQ ID NO: 61415 - DNA, 1212 bp, Homo sapiens
gagttttgctggggcctgttaaagggggagtgcctggaggtatcaaagcaggggcttgtggccctggtcatccagtagttactgggggtgtttacagccgcctgtgctgggcctcccctggagaggaagtcacgcccacgttaagtgcgtgggaaacctgtcccaggcgttctgtaaccgtagctgcaggtgctctgggtgttgcctcctggctgtagagggcccccttgtgaagaggggagccccaggttggggggcctgggctggcaaagtccctgccatctggcctgcccacttggggctggctgtgttgggcctggtcccaccagggcttgggctgcttccagatctgttttcattttcaattccctttattgctataaaaccacttcggggctgcagagaacaagctgttgtcctcagctgacctcagattcctggcctcaattgtttgcctcttgctaattttagcttctgatcatttccactcttatcctccccccaaagggagacacagaccaagaatagctgctgggaaggggggctgtggtggctgtggccagagttccaacagtgagctggcagggctgtggagtggctcgctgtggccaagcctggggcagggggctctcggcaggcaacccccacacccttcccctctctcaccgaggactctatactgcaggcatgggcctcagaggagaagaggacttcactgttccttcttttaaacagaaaccaggctgcttctggggaaaaagtacacccccacagccctgcctagcttgaagacccctgagagtccctaactcccctgagcccttcagactccaggacccaggttgtagtgtggggtcagacgtggcacttgactacagccaggccctggatacagcgtcagtgtggaggcctcaggcctatccaatccctacccagcttggccccagagcctggcacagctctgccctcccagtgagtgtcaggctgcagttgactgacagcaatgtccagtccaggacatcagcccaggcctgcaggatgggactttgcctgcctggggcagggagagaagcagctgaccaaaccccaaaccgtggtgtgctggtgagcaggcctggggagagccagaggagggatgggctgaaatccagcgaggaggaatggcctccaggcagggcctagggttgcaatccttgtccatatattaatagt

SEQ ID NO: 61416 - DNA, 1935 bp, Homo sapiens
ccctgtgtttggccatgctgacctgctccagaacaggagggtgaacagtcttcctggagtgaaaaacattgcagtcttgaggttgggagctagaagtggccccaaaccagtgcccacagggcagagctgtccatcagtgaatgacagcccactcactggtggggaatacctggagactggggacagtggcctgggagcctgagggcaagcaatttctctttggaagcctctccctgtgcctccctttgagtctgaccagcgctgcccctgccattgcctccagatacacacccacatggacccttgcgctccagaggtctgttgtatccaagacatccctgtgagggtgatggctcatttgcctttccaggacctcccggtaggagttgcatttcttcccttctcccttccatgaaggggagctcagcgaggcttcctagagaagacccagcaggaggccggcagaagaggcccttgcggcagacgctgctctggccccagcttggtaccgggcattggaaacattgcaaaaatgaccactcaacaggcttcccacaggaggttcgcagacagaaagatctgcagtgtggtttatacaggtgcagctggagccgggtggggtgggggggcccactcacctgtggggggttgggggggagtttggctaaggctggattgcaggagataacttggagcgtgccctttgcgcaggagggcagagcagagtggagtccatgccacagcccgagtctgagctcaggctttgagctggagcacgcacactcctgagctggctgcatttgcatgtggctgctgtgggggagaggggagggcctgggacttgggtgttgaggcggattgggggctcagctgaaggagagagagcccctgcgccccccttccggctggctctctgagagaacacgttgtccccgcctgggcctgcggcttgggcaagagcagcatgtgggacgctgtgttcctgataagatgaggcaattgctctcactcggggcgctgctccgctcgcggcctcgctgtggcgccagggaacatttatgtaacgcgcagccctgagcagctgccccgcccaaccatactccaatccccacccaccccactctccccgcaactgcatgcggtcccctaccctgcatcacccggccatgcagcctggtacccgaagagtcccccctctgcttggcacctgtaggacccccaaaccccagcatggcttagcccctctcccagctccccacagttcccccaaccctcctacagcctcccttcagggctccagggcacctagtgcccctccaggcttgaccccagcccccttcctctcaccaagtcttctcacaaggcctaaccccgccttgtcccacggcccccaccccatgcacaggcacaggcacacatagccagaacccctggggccctcccacctggggagctggagtgactctgagatccggcaggaaggctaggagctcctctgcaggagtctggaatctcctactggttctcttgtcattttggagctagagggagctcctgtcctggtgagtccctgtcttgctgttgctgtctgtgtaccccatgcccgggtggaggcagatgcagggtttgagcccagcaaggagggtgcttggatttgtttaggccattgggctccctttgccttagaatgggaggcgggctcactccctgaagggccgggcctggctggcccctcacctcactgtgtgcccccctgtgctcactgtactcggctgcacgcagccccgcctggagtctgtccccataacagcagtttttagagtgaagcttgaggacactcgcaggtgcctcagacccttcagaggggccatgagatcaaaactgttttcataacaatagcactgtttgcctcattctcccaaaagagtacagtag

SEQ ID NO: 61417 - DNA, 1221 bp, Homo sapiens
cggggacctgggtgtggggtctgtgggggctgggtttgtggggctgtagggctgtggaggggggatctctgttggggggctgtgctccaaatttccaaaactccacgttttggaaattcagtggagtctgctcgccgcattttaacaatgggggccctgcaccggcccaagacaagggtcagctcggggctgggccaggagccccatctggggccccacacccatttctgggattgccccccaccccgcccccgcccccgcccccgacgcttccgggaggtctaggcggctgccgtgggccggtccgaaacggctctaggtgcactgttggggggctgtgtgggggctctgtaggggggctgtggggggctgtgtggggctgtgtgggctgggtgttactgcgctcctcaggcagtcaggagccctcgaggagtccgcggagttgggttgggggaggcggagcccggcgggaggcgcttcccgggcttcccaggctctagtaagttcctggaattcgtgaactgccggcccgggggaggatctgtgaaggccccgggaaggcagaggattcctgcgcggactgccgcgttcggagggcagccgggacggctgggccggaggcgggggagccctcggctgggcgggcgccgagcccggccgggccattcactgcctccgaagcgagcggccagacccgccagctgcccactcgcccccgacccccgggtcgcggtctccatccccctcggaccccggccagccccaggccctcgcggccgccgcagtacgtcgtctccacttcgcagcgccctctgcccactgcgattcccccagcccacggcgagctcagatgacacaaggatgatgctgtggtccgggagagaacgataaggattgtcactgtgctttgcactctgtcattctaagtttcttctcctcacgtgagctcatgtaccgcgggcagcgactatcagtgagactggggtagacgccacctctttggccgcgggctggggcgccgagtcacgggtcgcggggacggggcggcggtgctgagcctcgagccgcccaggccacgcccctcctgatgtggccccgccctgctctcccagctctcacccgcgtccttttcccccgggtcccctgcgctcctcaggaccctgacggcgcatcctgggtcctctacgcgcgcgactgtcccgcccctgaaggggcctgcag

SEQ ID NO: 61418 - DNA, 905 bp, Homo sapiens
ccctaggcaggaaggaggtctgctttgggaaagggatgttacagtctttgttttaaactataaactataaaccaagttttctcccaaagttagttcagcttacacctaggaatgaacaaggacagcttggaggttagaagcaagatggagttagttaagtcagatctcgttcactgtctgggttataattttgcagtggtggtttcaacagtggctcaggggctggtgcctgtccctaccctgagcccagaggacactttccgtcctccagtccaggtttttcgtttgactttgccacaggaacatttgccaggggtcatttcccaggcggaaatgggcaaaggggggttgggaacaagcctgaggccctgaggccaagagggtgtccaggttcagggtggggcggggtggggtggggtggggcgggcagggcagggcagggcaggggtgcacgtggcagggtgggcaggcttcccggcgctccgctcaggccacgcccagcgccagcataattaccgggagaataattacgagcccagagagccgccgaccccgcccattgccgaccattctcaggcctggggcggtggcgccctctcctcctcagtgacgcgcacttgcaaaggctgcaggccaagaggtccagacgcctcggagtgggaggggccgtggcctgccaacgttgtctgtcctcaagggaggggcgctgggaagttcctgggcctgtttcccctttggggtcagggctgcctcttgcttccagctctagcagctgctagcaagtcctttaacatccctgagcctcagtttccccatctataaaatgaagatggatttgttgaggactaaatgagctactctttgtacagtgtgaggctgattttgtaacattattattattatgt

SEQ ID NO: 61419 - DNA, 1368 bp, Homo sapiens
tagttttagtagagacggggtttctccatgttggtcaggctggtctcgaactcccgatctcaggtgatccgcccgtcttggcctcccaaagtgttgggataacaggcgttagccaccgcgcccggccgaaatttcgtatcctttgaccaacatctggaaccccttccccgctccccctaccagctaagttcttaatggctgatgtgggttaatcgtgttatgctattggttagccttatttcccaccaaaccttcctttaggcttaacctagccccttgagcttcctccggggtcctctcctgggcctgcgctgtcctgctccctgcgtgggccttgctcccgggtgcacaggtgcactacggccatccttcaaggcaggatcaaattcctcgtggactttcccagcgtccagaccccaagcctgggctctggcagctggctcctttcttgcaggtctcttggaatcgcttcgcgcttgccggcctggttgtggactgagggctcctggagggcaggtcaggggtccagccccaccccccacgcctgtggattctcatctgcgctcgggtcccgcgttggcggaactgtggaagcttcaggccacccatccgagtcacgcggactaggatgccccgccccagtctttggctgggggtgggagggtgggggaagggccggagtaccgggggcctctgcgcagtccccgctcctgtggccgatgtggctgccgggcgggcagcaggagagagtggtccgcgctgacccgcgggcccttcgctgtccgggcaccgccccagcggagccagcggaaagcgcgagtcagagtcgcgcggtttcgaggtcagggtgacccgcgagcgtgggcggcgcctgcagacccgctccagagacgcccggtgcccgcgcccgggaccctgtccacgcggcctccgcgctgcgccgcacctccccccgcaacccacccggcgtcagcttctccagaacctagatttaaatcgggaaactggctggacaccaggatgcaaagaaagtcctttaattaaaaaagaagcacatgaatgaaaggaaaagcgagggacattagggtgggcgagttggtcccagaaagcccttaatgtcttttttttttttttttttgacggagtcttgctctgtctcccaggctggaagtgcagtggtgcgatcttggctcactgcaacctctgcctcccgggtgcaagcaattctctgcctcagcctcccgccaccaagtccggctaatttttgtatttttagtagagacggggtttcaccatcttggccaggccactcctgacctcgtgtaacacctgcctcggcctcccaaagtgttgggattacaggcgtga

SEQ ID NO: 61420 - DNA, 869 bp, Homo sapiens
actcctgacctcaagtgatctgcccccacttggccttccaaagtgctgggattacaggcgtgagccaccatgcctggccagttctctatttttatataaaatttaacatagatatgactcatatgtcatagcctataaccacaaagtcatatgcacactcatgttacacccagattatgaaggcctgttgagactcccaccctccctccctcccgtcccattgccaagggcacagtcctccatggaatatggcttatgtccctacagcagtggaaagatcaaaggtacaaacccagctcgaagctagactttctcacctagaccaagtaaggcttcctttgttccctaatctgggctctaagacttcctcttcaacagttagatgacctcagactatgacctcatggcctagaaatttaccagattgctcaagaaaatcttggttttgggccctcaaaccgatctcaatcccaggagctcaaacagagcccaaaagccccaagagagaacctttgccatggtgtttcttcaacctcacccacccaccagcctgcatgtggtcctcaagaaagactgtttcccttaaaaaaagaaagagttcacatgacaactgatgtctctgaacaaacgtgtgtgtgtgtgtgtgtgtgtgtaggtgtgtgtcggggggtcggggggtgggggttgacttcattagcagtgtctattcaatcagcgatattgattacattattcaaggccttcatatgcctgtggatttttaatatactgcctccatcaaaaaggtgtgagtgaggctgggcgcagtggctcaggcctgtaattccagcactttgggaggccgaagagggcgggtcacgaggtcagga

SEQ ID NO: 61421 - DNA, 1782 bp, Homo sapiens
cccaagccaggtatctgggtgacaaatgcaccgagtggacatctacacagatctgtgccagcaggagcatgaagaccaaaaccactattgctagtttttaaaatttcgtatttattgcggacagtggagagcagttggaagcgtcacctggaccctggctctctttgggtctgtccaatggcagatactccattgggcagcagaatgggaaaaaagctattgctgcctctgctatttctaggaaggatctaggcaggttaggcacactttgggaggccaccttgcaggtgggcctggggctcagctctcctgtctcgtcccagagaagggccgaatgtgcaagtcaggtgagcaagggtgttgctgacctctactggtttgtaattttgtgccacaagtctgtatcagtgcctgggacccatggacccacccgcccctgcccgtgggaagctcacctgtgctggggacagataagcaggttaacaaacatctcataatgtcaggtggtgatgagccctggaagggtaaacaccaggcagaaggcagtgatggtgaagcctttttcggatggggtcagggggtccttttgaggaggtcacatgtaggtggagattgcagtgatgagccactggctggtcatttctcagagggattgactcatcacaaaacttctgtggtgaaactcaccacccgtgggaaatcctggctcactccagaagggctagggtggagggggtatctacaggtttgggatcttctaggagcttctgagctgctgggggacctgatgagaggagtgcctagtgacacggttgactcctcccaagggcattgtcagggacaagggcaggaggaactgggagatggtctccccaagtctttcctcgcaacaagcagcagcctcctccatgggctccacttagctcccctgcaggccccacacctgggagtcacacacagcagagaagcacagccaccttggaccagctgctttgcctctttgctggtgcccatggttcatggcaagggtgccatggcaagaacaaaaaggcaaggaaatagatcaaatcgaagactgaacaccaatagttgatttggtaagaaattggaaaaactgactcaatgctgccctccagtgttgcttaagaggaaaagtgggtgcaaataattcccctctccacccccgcacctcttcttctccagcttccccaagctgccaataagggaaatgcagctttgctgaccaatgaccagctccgggcttttcattaatctggcttgggattggaaagtgcagtgctctgatttgagaggtcaggggtggcttggcctggctttgctgcagcctgctgggttctgccttgacgtggccaccctttccagatctgagctgcagggcagacacacccagggagggctgcagggctggctcagggacaggtctcccttgggtggtgcccagcagcctgtcccatagttctatgagtcactacacaaacagagaaggggttagcctcgcttcttactcatggggcagggggtggcacaggctctccccatccacaatgtttcccagaatagagcagtgcagctcctgggagttccaagcccccatgaatggatgggccaaaccaaagtgtccaggaaagggactcaaaaagcaacattttaaataagcatctcctgtggcttttaaaatcaagcaaattcaggaaatattgttctagaacaagaataatctgttagaagcagttcctgtgggtgcaacttggacattttggg

SEQ ID NO: 61422 - DNA, 664 bp, Homo sapiens
tcttttccaggtgattgttcacttggacatatttgattataagctcccagagtgtcagacacggacttctcatggcaagttagacgatcccaggtgcccagtgggtggcagtgcagtgagtggcaggaggaaaactttcctgctggcttttggtctgaccaagacagagtgatacttatccagggcctaaaataaccatagcaataggccttgccagaagggatctgtggcaggctcctggcactactggtcagttcccccagtggcctgttcaagtttttctttgcatgagacagaggttatggctgaggaaacagccaggccaggaggctagcctgccctgcagaagcccaggggaccttcctgatgccatctttctggtatgacagctcagcaggcctgtgtcaacaagccctgcacggtttggacaagatgtgagtgactaacgttttcctctggagcagcaggaatggatgggcctgctgggaagaatccctttgctgtgagctacctaagacgcctggctcctgaattgaaccagcaggtcccttctctgtatcttgcttgctttcctttaaaaaaaaaaaaatcctcagcagatgatgggaggaattatttgctgagtttgtccagactctgaatagcccttggtcactgaagtgtg

SEQ ID NO: 61423 - DNA, 1856 bp, Homo sapiens
aagatacagaaaggttaaaaataaaaggataatcaaagatttaccaattaaacacaaatcaacagagtgagagtggcaagctaatagaactataaatcaacatctgatttatcaatttatatttagcagccaattgccaacacaattaaaatgaaacatttatacccttggatatgctaactagtacagcatcaaaatgataaaaacagtaagaaataagagaatgacagtcacttattgttagtagtagattttaacatatagccatcagattatgatagactagagataaaatatgaatatggatataaaaagaatataattataaatgttgataaattggctatatttagatgtttatgggttatataaaataccttatattacatattcacatggaaattttacaaaaataatatggtagtttacaaaagaaatagcattttttttaaatgcagatattttacagtttctctcattacaaagcagtgacctagatctgggctagatacttctcatcattctcattacaaagcaatgaaatataatataaatgtaaacaaaacaagcgaacaaccactcgatgttgcctgaatgcgggggctagaggaatcagcagaggtaagattgtccttttaaggttaaactttaatcaacacagcacacaaagccagagtgatgcaatgtcacttcagagagaaaatatgatccccaggacactgagatctagtcatgattctactgaatatattaacatttccaatgggggaaaaaagtgtgaatccaacgaagagctggctcagccaaaacaaacaaaggcaagtgctagtgttcatccagggacaagggagcctcattcaactagacttaactaatccagcctgtggcaggatcctccttcatgagaagatggaagcatggtgttgtttttgcctggttttgctcaaatgtcatgcacaccaggcaccttttgattgtaaaccagcctttcctgtattggtctgcgtacaccatgattgtcccttaggggaactgtgagtgtggggctcctctgtcctcatggagttggtaagtatgaaatccttctaagaaatgatctgctgtggtcctggaaaaggaagcttcatgagccttatagaatgttaaggctacaaggaaagaaagtccagaaattaacatacattggtatgttaacttggtaacttagtaaaacaagttatggagtagaagttgttcttattcactgctgtgttttggtgctcagaataggttttcgtatgtatgagacacttaagtatttggtagagacatgaaacaagtaggaaaggacagaattatttagcaaatgctggtgggataattgattaactgtttgacatacactgaaataaataacatggattaaagagttaacttacaaatagaaaattaaaagaatgatccaaatgtcagtagtacttctgaaggggcaacgattttgtgcatttagaaggataagaagaaatcacaaggggaataaaaatgacaaatctgactacataaatattaaaaacgtatgttagcaaaatactataatagtaaccagaattcaaactcagacaacatgggaaaatattttcagaaaatgcgacagccaaaggccttgcatctttattatgtaaaatgttcatacaaattgataagaaaaacactgaaattccaagagcataaacaaacagctcacataaaagaaattaaaattagtaaatatatgggaagatatttgacccagctggtaatcaaagacattcaaaataaaacagtaattttaaaaaatttgaattagcaaagaaaatctaaaaattgattttcataaa

SEQ ID NO: 61424 - DNA, 3309 bp, Homo sapiens
ttttaaattttttgtagaggtggggtctcattatgttgcccaggctaaactcaaacttcagagctcaaacgatcctcccaccttggccttccaaggtgctgggattatgggtgtgagctaccacaccgagacttttttttcttatgatacccataactagtctgacatcagcttttcttaaacacaatgcaggctgtctctgaaagagactgtcttagaaaatatgctcctcctttcatttaggatgaggcctctgttttccgtggggcacaaagcttccatcttgaggcagaacaaccaaagtagttggatgtgaccaagccaatgtgtggctgctgggccaggaaggcaggaaaacctgaatccctgcctggctctaatcatttcagccaccttctacttgtttgtagggttttggatgggtaggaagaaagactagttcagagtttagagagcgacagtctccattgttaagtccattggatgtggtacagtgcagtggttcttaaagtgtgattccaggaccaccagcagcagcagcacctgaaaacttgctaaaaatgcaacttctcagtccctaccctgattcaacctattgaatcagaagattctgggggtgggacccaggaatttgttgcaaccagtcctcctcatggttctagtgcacactgaacttagagaatattataggagaatggaaagaggtccagagtttgagccaagagatctgacctctagtgttgactgtagtatgccactttcactttcttgagccttaatgtcttcacctatggaaggaagacataggcaatgcctccaaagagcatacagtgtagttctagcttgtctgaaaacaaaaacaataaaaacacaaaatcatacagacctgtggaatcaagctctagtctgtgcacttaggagctctgagaggacagcaatcaagctggcctggtagaattggacaaaatcccaaatccagacactttcttgtcacaggttgtctgccatttcctttgctgttcttccatgaaactaacatattccctcattctttgttctgccacaatctgcattccaagaatgaaatcgcttgctaaatttagccattatttgtgaggaattgcttgaattatgacacaacacagcacagttgagcaatccaagaataaaaccttgatttctcctttcatgccatgctgtcctctgaatcatggcccactcaccctggatagagcagcagagctcaaagagtccatctcagcctcagagataggatgtgaattctagggcacatttttaagcccggagacaccttcggttcccagagcaggctttatctgcatctcagtcagggcccactcagaggtacaccagaaacaattatgaaaggttataaaggtgccatatgcagattgcctgaactctcttgaattggtatattttcctacatgttaattgctatatattgtgtaagttagataaatagctcactgaaaagtggagagccgcattagggatttgttcagaatgctgatgacttccacactagctgtatactgctaagagctgagagactgtgtactgaaagcttaagagcagtgtcaagaactagacaacctggctaattgtaaatggcccccctttcagcattgactttgatgtctcattatgtctttcaaatgagaccctccttcttccccctaaccctgcacaaaattcacaatccctcctctgtccccctttttattgctgttgtctaaaatatattagacatgggaaaaatgactcatttttagagcatcatgcctagtaataatagaatttacataaaagcagcatctgagagagatagccttctttctttggtttcaatggaaaacttgcttgatttcaaagggcagtcatagtataaactgtcagtcaaagggagataatgggaagggaactaaaacatattgcaaacctattatgtgccgggtgttctaaatgtaatcatctctattcctcacagcaatcccgtaggtaagtatttgattatttgcatctcacacatacatgaacaaacttggagagaccaagttaactttccaaaggaactaagcctatctatatcttaggagctgggatttgatccttgagctctgctcttgtctgactccaaagcttaagctgttatcacaataaaacacaacatcaagtgctgtgtggagattgttgttgttgtgtaatgtactttctccaagaagccaaagtagtttctaaactgcttgctcaggagaaaacagagtgggtcatgtgcaacagaagtatgttacctaaggaaacacttgctcttgtaacaaataaaaacattgtatggctcaacgcaatagaagtttatttttcacccgtgtgaagtcctgccagaggcgcgtgaggctgtagtgcggtggatggttcggcaccccagactgccatctttacacttgacccccacagttgccctggcaacatgtaacaagctgaccaggagatgggggtggggaatgaggagaagtggagcatggtatgagaggtttttatgcttttaggtgatgtatttcaattccaggcctgggaatggaatacattacttgtgcccacattctgttggcctccactcaggcaaatgactccacgtgattgcaaagcaaggctgggaaattagtctagctgggtgctaaggaggaaagggaagtgggtttggtgaacagccagtgagtctctgcacaggagtgggagtttgagatgagtaatcctatctaactggatcctagagggaaggtggctgctagtgttctaagttactactgatgtgaacagattctgacctttggctgcctagttgtttttgataaattaactcttagaataatgatgaatgtcttggccgttcctcaaaaacctttggctgtttgcagcagatgatggatgtctagaaaacacccctgacactgcagagttcagtcgagagttccagttgcaccagcatctctttgatccggaacatgactatccaggcttgggcaagtgggtaagtcctatctcaattgttagtagattttgcactttggtactctgaaggtgctgatggcagggatgagcaatatgggcagaaggagagaagaaaaattatttagaagctaatttttcagaaatctctggttgacagagcttcaagtcatgactactcaaaaccacacttatgtgtccaggcagcactataccaaatccaactaaagagacagcaacctaacattgaccatagtctccagagtcttctactctggt

SEQ ID NO: 61425 - DNA, 874 bp, Homo sapiens
aattgtctgaggtttaccttttcattccccctaataccttgcatataaggagtgatctactttgtttagttaaatcactgtccctccctatggtgggtggatgacttcagtgtgtgacctagaaaatcagaagaagtgatcaaaaaagaagcagagaaacaagatgcagagaaagaatacattctggcggctccatttgaaaggactccaagctggggcgaagaaaagacatgagatgtggcaggtgacatcatctgtggctttagggtttcaccttcccattatgtgaccagtcagaagcaaggagtttcttttacttaagagctgatgtcaaggaaagggaatttgttagaactggcgtgtggatgtcagagagactagctaaaagccggagtgaaaatgggattcgataccaggagtgaatagtgggaggataaaaggggcagtgatatgaacagcattccagagagcaatcccagggaaatggactttgccccctcacagagacagaccttgctctcacaggaatgagggcataacaaacacttctagaaagagctcaacatttcaaaatcccacctactaattatgtggcgcaacccaaatcaccttaaccaatctagacctcagtttctccttctgtcactgaaggggaatgatgaagttatcccaaagcaccagtcacaggaccactgatgttaatgttctttgctctgagctaaatttacacatgtaacattctctaaaatagattttgcatttatttcaaccccaagacaatctatgagagggaagggccatccgtggaaaacgttaaacatgaaaccaatgattacatccctctgaaatgtaggacacagggagtaaacctaat

SEQ ID NO: 61426 - DNA, 1017 bp, Homo sapiens
ttccctgaaaaatacttaatggcatcaaaatggcgatctctgcaacagatccagggatctcagatacagaaaaacaagtgtttgatgctgctacattgtcactcaacatgggttcataacctggggaaaggtagatcagtccgtggaaaagtcagaacttaaatagcaattaaaatcctcataccgccagaataatacctcttcagattgagggactcattctctctgatgcatcatccatacttatttatttcccagctcattccaaaaaggatttgaaatgacaaattatctttgaaacattgcaacacgtaggtgaacgttgtggaggctgatgaaatgtttgcagactaacaggatttttttaacttgcctacagaagtcttaaaaatatcttaaatgccacctgaagcaccatatggagaaattactctcacttagctacaaccataattgcctttatgctgtcgttttgtacaaagaaagcaagaacttgaatctgaaactgaaacttgaaatcactcagattttctgaaaaggcttagatttgactcaacaggaaaagtcataatgattatagttctcttgaatattggggagtagagaggagaagaatgtgaggggttcatgccgagagatatattctcagacactgcagcaggacttgtactcagtacaatgctactgacttgtcactagctggcaagacgggcttggtgtgccgctttgtccacgggtcatttgctgagtcacaaaagccaccaggctgcatccctgagggcaggaaacaaagaacagcaggcttctgagtcacctgctttgtgaacaacccaaaggtaatgctgaggaagaatctccccagagggggcagaatttgagacagtgcagcacaatcatgttccatagcatgaactagctggaaccgtagcagtcagaggaatccgagccaaaggtagcaggctctgcagagaacagctgcagcctccaacagaaaggaaaagctttcctttctttttt

SEQ ID NO: 61427 - DNA, 758 bp, Homo sapiens
tgacacatacaaaaagttttgttatatcctttccttggacttttattcttccactgaaatcatgtgcattctttttagcttattttcagacattatataacattgctactttctttccaattttcctgttattttgatgctctcttttaaaacaatagaattgcttgttttaaaatcattataactaataacaaaaatagttattctggctgatttcatttttagttttcctctcgtggcgtcaagcaggagtccatctgtgtgccattggtgaaatggtggtgtttactttggttttcattcaaacacatatcagagccagccattcagtctgagttcatcctgccttctattccttcagcaggcgaacatgaaagcagagtctccacgcccgtctccagacaaacagcctatcgctgcctgaaatcggtgctttgattctcaaatgcagctactgggcaactcacagtcccctgcgtactgaaggcagtttcctaggcagaccaccggcacagcccagaccgcaggggcctgtgagcggacgaacctctgaagttatgtggctgctgtcccgagtggtgtacacgtttctcaccgcattcatccctaagaatatctcatggagacaatctttcctgggagacaggtcacgcagcggttgcaataggtgtgacaagcttccaagctatgtgtcgcactgcaaatatgtgggcattaaggagtgtgttttcctggctccagacccgaaaactaactct

SEQ ID NO: 61428 - DNA, 2004 bp, Homo sapiens
atacaactactctctttagggatatcttatctgctatgccctcaagatattgtaaatacttcagtaagagcaaattttgcctcatgcaaaaaagaattttttaaatcagtgtgcataagaatgcagaatataaagatggtcttgtcctacagatgttaaggtaacagaacaactcataaaaagacagtcctctaactcctttagctgagatatggttagctttgcccccatatatatcatcccctgctccaatctccaaaaacttccttctatgaatgtgtcaataagactgatgatattgctattaaaactcagaacttgactgctcatttataaattgaaaattcaaaacgacaaagcccagtgctcgctgatttctacacatacaggcataataaaagagaactacgctattacaaagaactatgcatctggtcccgcccccaaatactagagtccagtcgtaggggtcattctttcactcaacaaactttttattatgcgcctactgtgtactaggcattgcacagacagttaacaaaacagaccaaaaaatcctttccctcctaataacaggagcgtgcccgtaaaggctgccgagggaccacgtcgtggccgcgcctccgtcccatagtggtactcgtacagacagcccagccggcccacgggccgccgagacttgcagccctgacacacggccttggcctctgggttcctaacccggaccctggggcaggctgggaagccctcctacccccactgtctcgcgccagcccggccaggaggccacgagggccaagcgcatacccaggcgcgcccccgccaccaggcgcgcccccgcgccaccatccgcccgtcccgcgcaggcgccggcgccgccgcccgtctggcgcgcgcctggcacgctctcttgcggctcttgactggcggcctcggccccacttgccccagttacacgcggtcccagccccaccagccgtcgcctcttaccggcgcgctggcccctgcgccccagcctcccggctcccggcggctgcctcgcggggcgcctcctcctcctcggcctccgcgagcgccgcggaagccccggccacggccacggccccggcgtccgcctccgtccccgccgccgcctccgccgccgcctctggctaccgccgctgcggctccgggccgctcgctgtggcgatctccgccaggccggccgcggcctggccgccgcccacggcctccccgagctcctcgctccgcctgcatctggccgccgctggcggtgctgagcgcgcgggagccgagctgcggcggagacgccctggccccaccggaagcgggccgcacggaggagccgcgagcgaaaggcgcccggtagcagcgaggcgcggggtgcggggctagggatcgaggccggccgcagcggagcggggcggggcggggcggccggcgtcccgcaggtggggccggaaccgggaccgcgggaaggccggaccgctgggagctggaagtggtgggggtctgcagcggggcggggggattctcaaggcatcagagataggttgggggagagaccgtgctaagtgcaaggacgagtcataaaataaaatttgtatgatgtgaactctcggaaaaaaaaagtttaaacgtatgtatttgcataagaaaaggtctaaacaaatacatactaaaatgttagtggttaactgctgagatttgaagtgagttaattttttttcctccgtttaatctaattttcagcaacgaatgtgtatcattttaaaactataccgaagtcagggttcaggaggtgtggatgtaaagacaagagtttgtgtctggtgagaggtggactgcagcacgtgggagagagaacagtgcgaaactgggagatggctagaaagggcgtcaaagtcctcagcagaatttctgtagaaatgactactacagctgacatttattgagcacatgagtatttcattctcataacagctctatgaggtagggatgact

SEQ ID NO: 61429 - DNA, 1800 bp, Homo sapiens
tagaggaaccctagtctcacataaatgacaagtgtgatatagcaaatctctcgatgaattcaactgtaaaaaagaacaacgatcccacccccaagcaaaaaaaaaaagaaaaaaaaagtgctttgattagggatttcagagcctattaattttagaagcagtaacattagcctcccagtctatgtcgtcactagaagccctttgggttttgagaattcccacttgtgtcgcatctttctacataataacaagctaccaaaagactgaagtgaatgcaaaaaacgactaggttctagggaaaccagatgagatataaaagaatccaacaagagactaataagggtccacctgtccccagggcccaggaatgatcgtccccacatggggccaaaataaggttggaaataactgactccatgctctgaccatggcagggggtgagcgcctgccatgctcattccagaggtacaggaccaggaaagggaaagcatccgactgcctcccaaggtctcccggcatagaccgttagcggcaccctccccttcagtctgagacagcgacgttgtcccgtcctgacacttaactctcctggtggggtccctgtccggcctccatcccagcctttttcccgctgccctcaggatgctcacttaaggaaaccgacgtgctcttctccgtctaccagcactcgggccgccgagatccagtcctgaggcttcacccctggaacaactgcacgcccctcaatcttgaagcgatctcctatgccgaccccactccctcccgatccctcagcagcagccccgggcacctccgagctctggacatcccccgatagcagcagcagcagcaggacgggaaagaagccccacagagcggccgccatgacagcagctctgcactcagaccggcagccccggaagccctcccagtctcccggccgccaccgccgccgctggcggcttgatgttgtcatcactgcgcgcccgtttctgtcataagctgtgggatccaaccagagggaagagatcatggccgatcgactagcgaggcggaagtaaggcggaagtactgcccttaactcccggcactctggattggaagacggcgcacagagcctgtgtcaagtgcctatgaaggggactgcccatgaagtgaaagtcaagtgtgtgttgctgcggcagccacggaggccaaggacctcacgggagtaaaagatgacgagactggcttcgggagaaacaccatccagaagagacctttcaaaaaacttctagagactccccaagacgtatgagatgaaaggcttcttctgtctgtgtgcgtttaactcatttctccttagccccgagattacgcgctgctgtgcctgcgactgcagcgtttacgccgagataactcgtggattacagtgccaaccttactcccaaagtttgccacgaaatatctcgcttctgttattttcgcatggttctggtatattgacttttgaaacaaaagacatcattctgtttatagcattctgtttttagtagtgggatttccatctacaaaatatagtaattctcgatcgctgaaatgtcaaatcctagaaaacgtagcattcctatgcgtgatagtaataccggtctcgaacagttgttggctgaagattcatttgatgaatctgatttttcggaaatagatgattctgataatttttcggatagtgctttagaagccgataagatcaggcctctgtcccatttagaatctgatggaaagagctctacatcaagtgactcagggcgctccatgaaa

SEQ ID NO: 61430 - DNA, 1042 bp, Homo sapiens
gcagaagggtgccaatcgtgcctggagtggtcgcaagagcataccgggcatgggaggagaaggggttcttatccctaatgcagctagtccctactactgtgtcattcccctattggctagggttggaccgcacagtctaaactaattctgataggctatctgggtatgaggcagagtggcggggtgagcagtttaggcaggaaggatggttacagtgcaggtgactaaggatgactaaggacagagcaggtgactaaggatgactaaggactctaaatatgtgagtataaaggctagaagggggttgtttactgaaactagggcaaggaggtgtaaagaatgaggaagttaaactttaaaatggagaacaaagtataagaaagctgaacatactgacatactggttcccagaggaactcagaactcactgtacttaacaatatcccccttttgaattttacaggtcttcctcttcaaatttctttaacatgtcttggcatagctgttctgcttggttttctaaaagaaagagcttgtcagaatatggtggaggggaactgagagaagttttagtaagggctgtttctgtatgtctttggactagcccacggatgcgaggtatgatgcagcatccaacaaggataagcactactgctacaattgcaagagaagtaaggatggtggctgtgatccctttccatttaccaaaccatttttctagccaccctgtgaaggggtcatttactcctgagttttttgctaactcattggacagagcagttagaccttgcaatgcctttgttatactttcatcaggggcggtattgtttgggatgaaggtacaacactgagttttaatcatgatgcaaacttcccctttttctgctaaaatcatgtctaaggccattctattttcccaagccatctggctagtaagccctaattgctcagctattcctttaacagcatctctagtatagttaataaaccgctgttggttgtaataggtggaatttatctaatctacgtttttattaattgt

SEQ ID NO: 61431 - DNA, 1364 bp, Homo sapiens
tctcgcaagtgctgaactgatgattattacacacctaatttctcttacaattttttttaaatcagcaaagaaactgacataggtatctctgttttcaaggaactttataagccacaagaaaacaaaccaactctttgttatctccatatttaagcaatataagagcgtagtaaaagcctagatactttacagaacaacttttcagaaaatacagtaaggtttttaaagttgcaatcgacaattcttatgcagttatgtcaagtttttgtcctgcgaaacaaaagctcatccgtcaggaatccgaggacccgtcggaaaataaggaaatgcctgggccgggcctaggcgctctgcggaaaacctgtcctcaaaaatgctcgccccacactcgttctgtccttccccttccccaggtgcagctgtcgactccacccgaagataaataagtgacaacaggttcggtccacgcctctcccggcccagtcccctggagccccccagcgcccgctgcccgactctccccgcagggaccggcagaggggctccgccccggccttgccgccccgccccgggacccggcagcgctgccgcgagcccggccgagccgaggccgccgcggggcctgcaggtgggcccagggcgcggccaagcccggctggagtagccctgccagggcagggcagctgcgggcgcggggctcgcaccggctcggcagtcacttaccggcgcctcatggtaccgcggcgcctcagcccagcctcggcgctgacgaccagcgcccggcagcctagagagtccctcggcttctgggccgagtcccactcagggccattcaaacgcggccgcgcgcgcggcccgccgggatagctggcgctgtgggcggctcgcgggctccgcccaacgttggctccgcccctctgggggtcgctaagggccggaggggaaaaggacctgtggccacagtgccccctggtggctagagcttcgcacggtagccttgctatggcgcgagaagtgatactgcgataggaactgagggtgggtaaaggtcaacgaatgaccgaccgtgcgctaggaacaacctagtgtgggagaccgtgccttagtggtgtaccaggaggtgcaaacaatttcctataaagttatggttccgggagagatttattcattcacacctatttaaatacactaagagtctgggcacagtggctcacacctgtaatcccagcactttgggaggccgaggcaggaggttcacctaagcccaggaattcaagaccagcctggacgacatggggacaactaccccccaccccccacctccgcccccgtctctataaaaataaaaatgatactaataaacg

SEQ ID NO: 61432 - DNA, 1974 bp, Homo sapiens
aacaaattcaacttgcccaaggtcatacaattattaagtggtgaaaccaggattcaaaaggaggccatctgctgggtgcagtggcccatgcctttgtaatctcaacattttgggaggccaaggcaggagaatcacttgaacccaagagtttgagagcagcctgagcaacatagcgaaaccctgtcaaaacaaaacaaaacaaaacaaaacaagactggggcgtggtggcgcgccctgtggtcctagctcctcggaacgctcaggttggaaggaacgctcaggtgggaagatcgcttgagccggggaagtcgaggctgcagtgagccgtgatagcgccactgcactacagcctcggcaacggagtgaaaccctgtctcaaaaaacaaacccaaaacaaacaacaacaaacgcaggctaactgaataccgagcccatgtccccttccatgcccacaatgctgccttgcctttgtgcagaatgtggttagaactgtttacctcgcaaggttactgtgcaagtgaaatgaaataaacacatgacacagtggacattcaatactcagaaactactaagtaactcgctcaaggtcaagctaggatttaaacccaggatttgaatcttttgttccagggagcgcgtaggaggttaagaagcttttcttggcttccttttttttttttttgagacagagtttcgctcttgctgcccaggctggcgtgcaatcgctcggtctcagttcactgcaacctccggctcccggatccaagcgattctcctgcctcagcctcctaagtagctgggattacaggcgcccgccactaagcccggctaatattttgtatttttagtagagacggggtttcaccatgttagccaggctggtctcgaactcctgacttcaggtgatccgcccaccaattcttaacgctgagtcagtatgggctttccttcagccccataaagtgcacctcagaggtcagggaacacataacaaggacattcaaaaggggagcgcgcggaagtggctttaggaagcactaagtcttgcctggttttttttcctccctgcttttctaaatccaaacccggactcctcaacccacagcaccaccaatttccagggcggaaatgacgtcgtattcacgcgccggaagtgcatttgcagagtgagacaaagcggagaacgctggtgggcctgttgtggagtacgctttggactgagaagcatcgaggctataggacgcagctgttgccatgacggcccaggggggcctggtggctaaccgaggccggcgcttcaagtgggccattgagctaagcgggcctggaggaggcagcaggtgaggcacctgggcaagctgtacatcactgttcatcccagaactgcaccagagtaatgagacctgagccctcaggcataactctgaaaaagatgggtggcacacagacatcacctggggaggtagcggcttttctgccgtggaagtttctctgctcaaacaatgcttacatcagtcctcctgataagtcaaaggactgaggaacatacgagggggcttggtctaatctgagtaggtgcatctgaagatctttattcctatgattggtagatcaggaaatgtgggataagaagtatcggaggttgcagctttagtttcttggtttggttttttaggggtcgaagtgaccggggcagtggccagggagactcgctctacccagtcggttacttggacaagcaagtgcctgataccagcgtgcaagagacagaccggatcctggtggagaaggtacagaggtatagatgttaccgtagcccatgggccagtcctgagttacacactcatcctcttctcctaggtggagttaacgtagatagctcttatcctgaagatttggaaactaaactgcttgaggctggtatttcggtattttatatatcagctacaaaagtgcttaataatttgaaaaata

SEQ ID NO: 61433 - DNA, 1169 bp, Homo sapiens
tgtttttgatgtcgacaatccacttgggtctggtgggaaaggtgcacatgcataacgggaaaaataacccacactactgagagaagggtgagcagaggaggatgcaggggcagagcggattcctgtctccgagaggtcggtgggggtggcgcgcccgctcttctcctagcagaaaggtcctcggggtctgggaggaggttagcggatcaagacacctcggactgcagctcagagtcgtggcaagtcgtagctagtccactgagccacggtccgctcgctaggtttctcctgcgtgtgacaggacgagccaccccctttgccggaggcgcgttctcccctacccccgccccggcgcaggtcaccccctcgtcgttcttcctcagggtcccagtagaggaggagacggccacgcaggctggcctgactgggcagcagggtgagggagaaggaggtcgcaggtgcagtatcccggcgccagctgatgcgggtgcgcgcgcagctgttgtttactagccggtaactgtttcagagccgcggcgcgcgcagggttcgcgctgccggggctggcgccccctccccggcccgacgccagagcagcagttacgtgacctggcctcccccagccccgggcccgacggggtgcgcccgcgccgccgcagcccttcccttccctccccgcttgttcctcattcgaggtgaaccttgcgaagagaagcccgggggtgcagtgagagggcggaaccgtcccgcgggcgcccgaaagccccgcccagccgccgcagcccgcggtgaccgagtgcagcgcgcctgcgctcgccgcgggacacggcaggcggggcggggccgaatacgagtggccaggggcacgacgggagctgtagtccagggcacggcccgacccgcgtgaagaggggaataatccttttcctcggtccggctgtgctgcacactcactctggaagcatcctagagggcgggcgctgctcctcaccctcagaacccggggagccatttctctttcatgagtgtctctgaaaacatcattcatgatttctttaaccagaaacaccgctcctatacctgggaataaccctcattgtaatttttatgtagaggtctacatacaaataaaccacttttatgtaaaaaaaaaaaattaaaactataaa

SEQ ID NO: 61434 - DNA, 1119 bp, Homo sapiens
gcgaaacctcgtctctacaacaaacaaacaaacaaaaccaaccaaccaaacaaaaaaccccaaaaccaaaaattagccgggtatggtggcgcacgcctgtagtcccaactactcgggaggctgaggcagaaggattgtttgagcccaggaggcggaggttgcagtgagccgagaccgcaccaccgcactacagcctaggcaacaaagcgagtccctgtctttaaaaaaaaaaaaaaaaaaaaaaaggaaaagtgagtgcaatggcgctatcccggctcactgcaacctctgcctcccgggtttaagcgattctcctgtctcagcctcccgagtagctgggataacaggcgcacaccgccatgcccggctaattttttgtattttagtagaaacggagtttcacagtgttgcccagaatggtcgcgaactcctgagctaaggcaatccacccgcctcggcctcccaaagtgctaggattacaggcgggagccactgcgccccgccagaattttttcttttaattaaaaaatgagtcgcgcggtcccggttcttccccacctcggttctggactttctggttccccgcacccagctaggtaactccacgtatgacctcacccactcctcccatctacatttctcgccatgcctatttacaccctgttttctctcctcaccttcagcgtatagactcgatctccctgctcgttgaggtaatactggagaaacatgatcgcttataagccagcggtcccaattcggtccaccgctcagtctgcagtggtccgcccgaccgcgtcacgtgttcgtcaatttccttcctgcataaccggaagtctctctctcctggcactccggaaaatgtagtcaatttttgccttgttttcagctagccagaagggggcgcacgagagcagggcttggcttggggccctacttgcaactttgcaggctaaaacacgtggagtgtccctactgtgtgctaggtacacggcgttagaggggggtagggatggatgtggatagaatattgacgtatagaagcctgtctttgtctcaagatacacacccatttcaggagcagtgagttttcaatgcctgaagaaacaagggctccag

SEQ ID NO: 61435 - DNA, 1755 bp, Homo sapiens
ccccacctactcagtttttccacatcttcgagcttgtctatcgcccaagcccgcagcgtcctctccaggactccttgcccaaccgcggccgcccccacgtgcgcacccccggactcccgctccgcaagcctctcagccatctccttctcgtggatccccaagcccacctttgccagggctcaaatggccccattttcctatcctcacgggtccttccgacgcccgctccccacacattaccttaaccctctggaggcgagagagatgtaactcatgcacgaaggggttgggggatgctgggggtccgggggtgggatctaggggggcccagtcccccggacttccctggctcatggcgggagaaggtgggagggagggcaccccggccctggccccggccaccactctgcagagcagctgctgctgcagcagcggcggcggcggcgctctggcccgggccccgcccggtgcaggcggccgaggggcggggagcaggcggcgcagcccagcccgcccgcgttgtcagggcgccggccgaggggcggggcttccagcgccctggcgcccctgctcctccgcgcccgccgcggcgcccgcagccgctcgggccattgttccgcggctgccagggctggagcgggctgcccctgggcttctgcgcctccgtcgttcctctctgaagacctggcctccgcctcggagtgggagtgggtctgggagctgagcgcagagctcagagcgccctctgtccccgcccgggcgtcgaggtcacccagcaagcgcagatcggggtgaggctcttgggttggtaggcagggagggacaggtgggccggatgcagaggccggcagctcgcgggtgaggcggcgccccgctcttcctatgggctccttggcccggtccgcgcctcctcgcaggcggaccacctttccttcccggtccgtggggcgccatcgcgcggggacttgaggcacttgcgtcctctggcggctgcatggcgccccgcaactctccacctccgcgtcctgcctgtgctaggcagggccgcctttactggtgtgagggttgcttgaacccttgaggcgccaggaatccctagtacactgacgcatgtgcttcccatgagcccgacaaggtctggcaggggagaggcagtggttcctgatctctgtcactctctgggtgaacgcagaggacacagtagtaattcccctcacccacaagctccaagctaccctagaaaacaaattgtttagcctcaggccatcgtttgagatcagggaccagggaattaagtggactctgagatccattgccatgacaaaaggggtaagagtctcattgcttgaggaaagaatacgccttaagttcactttatgtcttctgcccattgcatggcagttaggggagctgaaggaagaaagtgaaagaaaaagagacctctcataaccaagagtgtttgccgccactggcttctcctttaaaccaaactccaaattaatctgctccaggaaattttctgagcccaggctgagagggttgaaggctcatgcatcctactgagaccaaggagctgcactgggatgtttttgtatataacacagaggtcccaacacaaatacatcatttccacattttatttttgtatagatagggtctcgctatattgcccaggctggtctcgaactcctagcctcaagtgagcctcccacctcggccttccaaactgttgggactacaggtagtgagccgcca

SEQ ID NO: 61436 - DNA, 1416 bp, Homo sapiens
cccgggttcaaacgattctcctgcctctgcctcccaagtagccgcgattaaatctcctgccaacacgcctggataagttttgtatattttagtagagacggagtttcaccatgttggccaggctggtctctaactcctgacctcaggtgatcgcccgcctctgcctcccaaagggattacaggcgtgagccactgcgcccagccaaaataccgaaaatcttaaaggtctttccccttccccgcctgggctcaaaaaacgccggagccgccctgcaccgccctgtcgcggtctccggagcaggctggccgactgagggcgaccatgggtcccaagaaggctccggcagtcgcgggctcccacctcggggcgcggcgacgggggcctagaggggccaacagcccccaagcttacgccacgcgaggagtcggagagacgcgccctcccctctcctcccacccaagcctccggcagtcccgggccggggctgggccagttgcgggagaaaggggcggggaactggggcctctctggggaaggctcccctttgtcctgggactccgggcgccccctctctgccctcgccctgccccgcgaggccgccgccgggcgcctcacagtcatgttgcagtggagcgtgagcgggggctgcggctcctggttcttgtggaagatagtcccagaaacttccctttggccttgaaccctgacacggacatcttccactcatctacggcgggaggggcgcggaaggggagcctgtccggagccgctgtcacggccgcgactacccagcggggccgcccagccgagctttcgcgactctgcctctgcctgccgcctggacccttgtgggagcgcggctggaaaatggcaagggcacggaggccttggcgggagctgtgtggcggcctggggggctgctccctttgtaaccgactccacccacaggaggcgcggctcctgtcaagccgcagcttcaaagggcaacataaccactgcccccactaccgcctgggaaagggctgcccctaccctgcccccgtcaccctcacccctcacccctcaaccaggcgggccctgcgcgcaccagtttcggcgggtgcacgagtccagagcgtgcgcgcgctcccggctgccccctcctcccttgacccagcacctttctgcccgacccatctggttccttcctcacactcgccgactggaagctcagggcggcacagccactaactctctctctctctctctctctctctctctctctctctctctctctctctctgtgtgtgtgtgtgtgtgtgtgtgtgtgtgtgtgtgtgtgtgtcccaagggaacagagcactgctgagttcaggcagatgataactcgttcctggacggtcagcaaaatacagtcccaagaaggctctgtgctg

SEQ ID NO: 61437 - DNA, 2123 bp, Homo sapiens
ccctcggcgggcgttccccgcaccctccctccgcgtcggccccggggaaaggaagttcacccctcgcctgggcttaccaatgcccgccgcccgacccatggagccctgcttggggactgggggcctcgatgttctccttcaccatctgcggccagatctccctccagcagccttgccaggcagtgcctggcctggagaaggggccctgccccttccggggcaggtctccgggaggggcaggtccgcggcgtgcctccaacccggcgcctgcagccccggggcaacaaggtgtggggtttttaattgagaagtttttctctctgggccttattatacaggaaaagggaaggggcgaagatccgggctcgggttctcccggggaagcgaacccagaggcgaccccaaactcagtagttgccgcccagctcggggacttgatgccggcgtcaagcggggcagcggaacgcaccagcggcccggccagcccagcgagatccgagcgggcggccccgccagacagcgccacttgcccgcgccgagagtggcccctcaccgcggtgagcccctcccgggatgcgagagtattgcctggtccccgccgcacccgcccgcctgtcgtgggaggaggatgggccggtccgagaggcgtaggccagccgggctgcacccctagatcccagcggcggcctccccgcagccccgccgagtccggggggcagcgctcgggagctcttggcctgcagcttccgcgccgccccccacgcgtcggggtccccgcggcgccgcgggcggccccaggttgccgccgccagggagtcaggcagccaaggttccccagcttacctggccagggcgcggggctgccccggtccgccgccgtcctcgccccgcagccgccggctccgtccgggaggctgagctccttgagagcccgcacgtagcggcacaccgcgactgctaattagcccggaagctgaatagcggcgggtacataccgcaagcggagtacggaaagcacgcagggctgccgctacctggcgcacgcgcactgagctgcggctgccgagcccgcgccccggtccctgccgctttacctcacccgctcttggatcactggggccgggaaacgcttcccggcgacaccgcgcgcggggaagagagggaagaaaaagatgcgtccgtgccgggcgttcacgaggccctgcggcccctggccccggcactgggacatcggcagggcgggcgggtgcacccaggacccgggtccagccgggaggatctacgggaccggggctggaacccagacgttggacggctcagcgccccgaacgtcccgggccctggggagcacacagatgcccgaagcacgtcccggccttgctggctggggagttgcaggggtctggtctcgcgggtaaagccggtgaacgcgaggctccgcatcctgccccggccgcggcgctgcgccctgctcgctctgcccggtgcagctgtaagcggggaccttagagctaggaaccctcggggatcgcggcctccgaaagccccatcgggcaggggaggccccctgctgcctccccaccgcagcacccctaggcgcatgctggactccaagtcttccctgctggtccccagtaaccaccctagcaccccatttctgatactctgctgctttagcccccagccccagggcctcactccaggcctttctctccttgctgtcctgaatggagaggaccctgacctccgcggggccctggggagcacacactcccagacactcacacacatccccaggagagccggtcttccgcccccacagcgcgagaaatcgaaatcccctggaggccctgggcgaaggtcgtgctggagactccggtgtcaccttcggccctctggccctttcattgagtcccaggcagatgtggtaagccgtgggagaggcacaaggtgcctagtctgtgcagagtgggacctcagctgcctcgctcccccaaatcctggtgatttgccctcgttttcttttctccttgtggctggactaggcgaagctgtggcatgggaagttctgaagacgggggggggggcgggggggagggggagcacagaaggacagggggcct

SEQ ID NO: 61438 - DNA, 894 bp, Homo sapiens
cctcttctttaagtgaaggttccatcaaagaaataccttggaagctgaacatttaaaactttattatactctgagctagtcctgatgaaaaagaacgagaccatcactactttagatattttttctcaaaacatattaaaatatgacttgttgaaggataatatattttagttaaacaattgccacttaattcacagactacatattttttttacctactgaatgcattttgtttttcgtctgatgtgttagaatttcttttgaaatgctgaagctctgtaggctgttgctcaggcattcctggtctttctgtgtctttggttgccatccagtggcagcagccatatactgcagttgagtaacagaaaagagaaaccctctactttccaagatgactgtgttttttcattcaaaagtgaacaatacgtgtattagtccattttcacactgctataaagaaatacccgagactgggccatttataaaggaaagaggtttaattgactcacagttctgcatgtctggggaggctttaagaaacttacaatcatggcagaaggcaaaagggaagcaaggaccttcttcgcatggcgtcaggaatgagagggaagagcgggggagaccgctacttataaaaccatcagatcccatgagaactcacccactatcgcgagaacagcctgagggaacactatcaggagaacccccatgatccaatcacctcccatcaggtccctcctctgacacgtggggattacaattggagatgagatttggacagggacacagagccaaaccaaatcagtaggtattaattttgtgtacctaatttatgaaacttttagcccaaaattagttcagtattttcccttttgccaaccctatgaagtaagt

SEQ ID NO: 61439 - DNA, 573 bp, Homo sapiens
taagggtcacgttccaagctcttacatactgctctgcccttgtccctgcagaggccccatggggtgtcttcaaaggggagcctttggctgacaaggtgacttgtcacctgctgcatttgggcctactcagcagaaagtgccttcccaaggtggcacagaaggtataaccctttggacacagtgactcatctgtaatctctagctggctgggcatttaaaccaaacccactttataagaccaaagtgtgtatagtgggaggtcagtctggggcacagactattcaggtcaatggcggcactgggaccggagcctaaacacacattctgtccccctgcccttctccagcagcactaggtgctctctcataatcttcaagcctttggctcatcttttctcattgcccttttcagccaccattttaatcatctgccttgtggcttttcattcctgctgcccagtgacactcaattccttctctttccccagcctcctgagccagggccaaaggttgtttaaggtccccgaaaattaacttcagtctcctacaaggtgaactgttgctttctggtgaa

SEQ ID NO: 61440 - DNA, 1458 bp, Homo sapiens
aatggcaaccaagcttagggtgacagagatgtagaacaccagatagattcaaaagatatttagaatgtagaaatgtagggactaagggaaagggaggattcaaaatcactccctaggcttctgccctggcaaatctgttgagacaaggaataaagaataaagaagcaggtgggcatgataacttctacattgaactacttacactcttatgcaattcacaaataaataataagaatgaggaatgatgctgacaaccacaggactgtggttccctatccaaagccaactgtggctcacaatgcaagatagtaaacagattctaaatgaacgctctcaaactacagaattactctgtttttagataggtctatttggaggtgtcttgtcagtttctcatcgctgctcaaaaactcaggacactctaaggaccaggaaaaagcctactcctacttgaagaggcagtccagcatcactctgctgcgaagcctacttgccagtctcagatagactggggtgttccctcctctctgaatccattgctcctgagacaaactccaacacagcaaaactcatacagtagttttattttcatgcgtctgtcttccttgggccatgaactccccagggcagggcagcttctttcaccacggtatgcccagcacctagcatagtggccggcacggagctgatactcagtaaaaagacgtgtgtgaatcaattaacaaacgaatgcctcctccggactcctaaatcctgaaaaaaaaccccaccaccaggcctcggggccacgacgtccatacccactcacacacaccagactcgcccgagctcacctgggtcacgaactccgcattgatttgggacaccgtaggggccacgatcttcttgggctgcgcaggggctgccatggcagcactcttccctccactccagtggaaactaaaggaccgctctgggcagcggcaaccctggtccacttcccttaagttactgccggggcgcttaactccgcgccgcacaaacgctccgggccggatatcctcagccttcagagtcccgtagggaacccgtacaacagcccaagcgttcctcgggaagcggaatggcgtgtagccggaagttcatgcaggcgttggggctgagctagcgagccaagagctttgacctcctctgtacacgccctctagcgggcggcagagagaagacacctcgctggcgggattaggagggcaagggagggacccggtggatggtgttgggtggggtttctcgtggttagtgaagagtgccgtgtgcggtgaatggggatttagttttttttcaaccctaaagaaaaaacaaaacaaaacaaaaaaaacagcctgggaatatgggctgggttttaactgcccttaacagtgttttagtttagttttgttttttttgagacggagtttcgctcttgttgcccaggctgca

SEQ ID NO: 61441 - DNA, 2402 bp, Homo sapiens
gtacccaggctaggaaagaagttatgggatttgcatatctagcaggaggggcagggcaagtccttgactgcaaccccctccagaaaactgcaatgcaccggcccatatcgagtatggtgtgggaggacagcttggcccttgaggccagtcaggcaaagcctggtaattgtccaatgtcaggactgaatgatcacacaggattttggtataaagccagattcaattccttttgtatgtttcttcttccctttaataaatgctttcgtggaacacgcctaaaagaaaaaaatcacacaccacaactacctctgattaaaacagggattggctacctacagctcctgtaccaaaaaggagctacggttaatcatccattgttagcactaagattggataactgttgtcacttgcctcccaccacgtggaaaagcacttactgggagccctagattgttagaaccattagtggcaagtggtgatcctatctcctgtttatgagagtcaggttagggatcctcacctcacgcactcatggagctccaaatcccatttcaaccgatttttgttgataacataaaaataaaaaagactgtaatttttcttatcttaaactgaaataaaagaatagtagatctgctcagtggttcaatccagaatttatcctgacaagaacaagatactctacgtgaagactgtaaaaactgtaaaaactgacctcaataatatccaatgttgcctcaaggctgaaagcctgttgattttcttgtcttgactagtaccattaaaacgatgtgaggatttcacgaaagtaagcgaacaagaaatgaaagacctaagagaaacacacacaactttcagttggggaataatctccggcggctgcttctgccccactcgccccgggcccattctcttggccttgaaccctcacctctccctcccagtggactacactggacaaaggacactgacacacagtcctcgttctaaaggcccacaaccaataataagcacgtaatggtcgagccgagtccagaaaccacaaaatcccacgccaggaaaggaagggtaagggtaaaaactgctttggctgcagccaggatgaaaacgccacatgtgatacaacccacagcaacaacaaaaaaaaatccctctacgccttcctctcaaatttctgctccgcgtgagacgcactcaataggtggggaagtgagaaagcaaaaggagctcaggaactgaggttgtggagcccccgttcttgggtccccaggcaccttggcggtattgaggcaggtccgaccctccctgggggtcgctccacttctcagtcgggtttctgaagtcctcctcacgcatctggagctggcgagggcccgggaggcacgcacctcaggcccaggtgccgcgaaggcagcgcgcgcacgtccgcagggccggcgcggcaacgggctgagcgcgcaggcgcggcgctctggcgcgcccagggacacagtccggctggaaacaagctccccccaatttcagggccgttgtcgcctccgggcggtccgcgggtcccgagcggactgggactctggagacgtgcccccaaccccaccgccattcaccctgtcattgcaggggagagaacagaataaagacgggtacattttccatctcacctctgaacctcggttaggaaaacgctgtagccctgactagtgggctcaagggccgactggaaaagggcgagtcagcgttcaaagccgattcggggcagccctctctaacgcagagggccgaggataagaagacgacaatgtgttaggggccctccgggctaggactgtcctcaccactttgtacattgccaaagtaaatataacgtagaggtcaagcgcaggcgctttgtgggcagacatgactgagctccactcgcgactcctctaatggcgtgccagctgcggacctcattagccccgcctcaatcattcagtatgttttggttgtctacagtgtacgaagccctgttctcacaattagataaaatgagtgtgaagtgctcaacataattcctagtgtagtaggccttcaaagaactattatcattattaattactcatatagaatacaactttatgaaatgataggatcccattttaagatgaggaaaatgaggctatcagagacgttaaggaacttaatgtcacacagttaataaacgatagaggtgcgatttgaacacaggttgtctaataccagacctgcatttataactgctgcttcccaagttatagatatttcagcattttatgtagtcacaattgaagaccaaatatttagttacagactaagttggcatgttattactgaataagatgctaaggtatctactaaagattttaagtgcaaaaggcattaga

SEQ ID NO: 61442 - DNA, 662 bp, Homo sapiens
atattgaaggcattttgtcatgctatttactgttatgtcatgggaaaaaagcatgacctttgaagaaataaaacaagcagttttttagttctcctgcatatctgttaagcttatggatatttaggctttataaaacttctatcaggcagctaaacaatttagactcacacagcatgtaaattctatcaaacaagggctctttaccctttcacctattgccctacatgtgcttggcacagtggtacaactattcagaacaaacactaatagtctgcttaaaatcttaaatacaagtaatgcaggcatgctagaggattctagtgaatattgaaaggggtttttacccatttaaggcagagaatggcttgaacagttctgtttggagccagaaaaagagcaacctggttcagaggtgaaggcttcttatagttcctgtatttgataaaatacaggcgttgtagcattccctcatagacctgtgacctcaagccctggcctttagactttttccctccttgagagtgaaatgattagtgaggtccttctattagatatgttagcagtttctgcaaaaaagaggattttaataatactaaattgcaaagaattatgaggcagggcttactcctggatactaagacaaacccagttgaagctgacta

SEQ ID NO: 61443 - DNA, 852 bp, Homo sapiens
agaattcatattttatcttaaatggcttaggtgtcctcctgtttggggggcagaccaggtataatttcttgagattctttgcagatcaattattctaatttttgtctattagtatttcagatgtcagagcatagtaaaatgctaatttgaaactgtgcaatgggcacaagacgatgtgtgagcctagctagggaatggatttgtcactacatttaaaaaactattttgacctttgacaattttaacagcctctaaaatttgtatacccttcttatgcttcccattatcactgatcctccatttgatgccaactaatagccttatgtaaaattttactgttgttgggctcaagttctgctattattacaatgattatttatccacaatctgatttctattttagtctcagccttaatttattacagaccttgagtccctgttactgtttttatatttacatttattcaactagccctttcattttataaattggcattcattgtatttgcatatttgcatagttgcacaaatagaccatttatatcctctacgttagaggcataaggtcatctaggttctcaatccaacaaggagtgccaatttctttgtccaaaagtgtgccggctgaattcagttcatgatgaaaaaacaagacctttgattcataaggtatcagcaataattgctttggtgttttttgaaggcactggaaacattttcaactattttataatgttctgactttgtcaggaacattttgccttcatgtatttgataggtaatcttatctgtatattttgtatccttttgttctaaactcataaaaatgacaccagtattctacaacatcca

SEQ ID NO: 61444 - DNA, 709 bp, Homo sapiens
aatgaagagttttagagacattcttaattttgatttttaaaaaagtctctttctgtgaccatcactactgtgttctggtttgtaagtactccccttggtgactgttttctatcatgttaacaatttatgtttagccaatagttaaaaaaaatgtgtgctggaataattgttgaaataaactaaatgactctggatcaattaccataaggctgtcttaagaagacttgttttgtctgccttaaaagaagaccctttaatagggtttaagagaaatttgtgtcttcattttattttttaggctcagaataactaattctgactgaaactctaaaaagaattggaaacagcagttaattaaaagccatatagtccatggtcaggaggtccacattcctacctaagtagacagcatatttcaaaatgtttattaatataggattttttcaaaacaaagttcaaaactacaaaactactcttttgctgttgcttaagagggagttaccccttatgcaatttatgactcagattatcttcttaaacaatgttacccacataaaccttacttgaaatcaatggtactggcattcaaacattttccttatatggagttaactgtgtcctctatcatctgactgaaccaactaaagtcatttctcttaaagacatcaacagctcaaggaaaaaaaaagttttctccctagggctgggg

SEQ ID NO: 61445 - DNA, 1100 bp, Homo sapiens
aaatagtatatttcaacagtttctaaaaactttaagcttcttgtacagaactcttaacttattgcattggggaattaagataaaattagtgatgactataagtttctatcaagtaattttctttctcaattgtgcacagccaattacgaggcagaacacaacagctcaatcaaaccttattattccagatttagttcaaacccttatgaagtgcactgagacttgatattgtctgaataaaaccttttcataaattgctctttggtaggctagaaataaaatagatactataggtaccttttaatgggtctttaagttctgccaggtatccagagcagtggcagtgagctggctgttcattaacataacatttcataacagtgagccatgaaagtgtgctgaagtctggtgcttccatgtgtagcttccaggattttcagggtatggcttaaggacagagtagcttttgtttgtattccaccacgaacaaatttcattgtgcaaggtaccagggcaatttgcccagtaagatacaggacttctccaacctgatacaggaaagggaaattaaggactaaaataagaaaacactactctcttcattcaagctattacccgagttcttacttaactggacaaatggtgataatatctactttggtaggttattctggggattagatgtatataaaatatctattatatagagtttagagccagagcagggaatcaagaaatgtagcaatttattattatattgttattagccatcattattatttctgaattaagactttgcccccagtgcaacgaagttgactgagtttactcatggaccaataaaggtacagcgggaataattaaccactgtatttgttttagagggcaaaattaatacaaggatgaacagtcatacactacttcatatgtcatacactattttaaatagtgtataaacagtcatgcactattttaaaacccagtcacatgctgggccttaaaagaattagttctgagtatatgtgattaatacttttataatatcataatatatgccccaattaattggacacagatcttactaggatattatttatcct

SEQ ID NO: 61446 - DNA, 1859 bp, Homo sapiens
ttcattatttttttcggctgctggccttcatgacatggaagtaggactacagagctaaaagtcaatactgcaaagttagtgatgattttacccactggtaggatcaggattttagaaagtgccaaaatgaaaataattttatatttattcatttgaacaacagaaaatgcatatttttaaaaaagaaatgctgggaaacttgctactttttagaaaatgtacttttttttaaaagtgaacaacttttttgagatggcttttgaaactcagttcagtttctcaccctttgcctgaaaatctggcatttctcatctgtcgtaatatgtttactttgaatataacattttaaaggtattattttgcctcctaaaaacttactcctaggtttgttttcctttacaagcataattatatttagtttcttcaatcattatctcatattttaataatatgctgccatttgggtacagctataaccataataatgaacataaggttcaaagatcactagatatatagatggcatgaaccattagcaagaaatattctacagcatagagagcacacattttaaaaactctgaaattcactatagaatttgctattctgactaaggcagctttctgtgtaattaacatatatctctttataaaacatgctagttttaataacaaatagggactttttccaggaaaaataaagaatagagcacaaataaaattgtaatatgaataatttagttatctctttctcatatctcataatgacattgtgcagctataatggacctaaaccggaactattttctttaaaaaaataggcttatctccttttcctgtatgccattgaaattcatatcatcacttccacacaaaaacacataattaatcctaattgtttccaacactctgagcaggagaagtggagtctgtggtttctccttttatgtgtgttgagtctttctggccacaagggcaccatttagtaaattacttcctccaaaacgctgaccagtgccctcttggcctgaaagagttagtgtagttgcaagaggtgagtcattgaattcctttgtgacagaaagatgaaactcagtgattgctcaggggtgtcctattctgctactgaatgatgatctagcaagggggaaaaattgcttctgaaatgcaggtcttcataagacaaaggaagaggatgcactgtaaacgcacagaggtggtggatgtgaaaggaatgtaatggtgtccctgactggtgcagaattaaaatggaaacagaatgaaatcttccctagtggtgattcttcaactttgttaggacttttgtccaagattagctaattctgcatcattgtcttatttatcttgggtgacacttgttagcataaggggcacagttaccataaaaccattggcaatccaacctctagcctctaagtcctactcagtagggagagagcttcacatctcagccagtccagttgtttgctccaactttgactaactcagccctttctcagtgaactggctttggcacgaccacactcctcaaagtgccctagttcctgaattgactccgtatatagccagttgtttccctgcttcgaaaatgctgtaatgccactcctatccccctttcctcctactccatccccaacccaaatgcccctcttgtttcctgaatctatcctactccctcagtccttgaagaactataacaattgtttccttagttaggactagattcttgagggagttgcctttgaagctgccttagacttgctgttcccctaaatttccatctcatatccctctggcgattactgttgctattaatatagtctttaaatagttctttgc

SEQ ID NO: 61447 - DNA, 680 bp, Homo sapiens
cacacttgagttatctgagattatttcttgatctgagcaacaagaaaatggtctcatttccaagttaaaaaaggaattatatgaatcaagaaccaaagaccttaacactaaatcacactaattattttacatagtactatgtaggttttgagaaatttaaaaccgtatgtattactcaaacatttcttccaatatttacttgatcacatattttaataggtaaccatgactttgtcatccaagccaggacacttatgaaagtgaaaggaggagctattgataattacaggaaaacaccaggactgtgcagacatactgagctctaaggtcactctgtttataacatgatgccttaagaatgaaagctcagacaatatctggctttatttagctaagtcaggtggtaaaatacgaagaataacatgaaagaaaaattaggaattctgcatcttgctcagtgacttttctcctctttgtttttcatttagttgatttaaatacataattaccaaataagtttttgaaaagtcagtttattcaattaaatttgtggtacaaatccaaattaagattcttatttaattatattaggtcttatattagggcttaagaaatctaaagaggatgctatagacatatcatctatacattaaaagaaaaattaaaataacttcaaaaac

SEQ ID NO: 61448 - DNA, 3182 bp, Homo sapiens
ttttatttttgaagtgacactaacctgagaagaaataaaaaaacagtatgtttaagccattcttcaaagctcatctctatgaagctatttggatggtaaaaaaaaaaaaacaaaactcagcaagctgcagctaaattacatagtctcaccctcacattctctgaatacaaataacaaacgaacgtgatatacttacagagtttgataatcaaacttgtaattctgcttattttatgctgttctgccctagaattgaaaatatagacaactagtcacagagggacacttttaatattattgttttcacatcttcacatgacagcaagggagatctccttgtatggtatggtgaatacaacatggaatttttacatgaccaactcatatactcattaaaggtactgagatatccataaaggtttgaagtgtttgataatgtctgttgagtaagtaaacttgttgtctcaagtcaggtagtacgctgttggttctactatagatgatgcttcattttaaatatctttaaagggcacacagtaactcttttctagggtgtgttttgcctccaaataattattaataacaccccttacactcacaaagtgttcaacatcattaaatagaaaacaatgactaaggtcttaaagaatgttgagctatttttcatgactttaaccacatactcacactgtgaaacaacaaaattaacattttccaaatctcgtatgtttttagttcctgattattcctgtgattcaaaccactttagttttcagttttagattattctgttttacattcaattaccaatttaggaagttcataattgacttgagatctaccatctcttgacttgccataaaaccacctgtattaagtatgaggaagtttgagataattacacaggaaattatgaagtattggttattgtgcttagaccatttaaaaagcacgaaagatctttaagatctcacatagacagaattctatacatatctctaataaagatcagttacaatttagtattcaacttttgtaagaaattttgtttttttatagccatcaaccagaagacacaaaatataattacattaaagtagtaaaaaattagcatgacataaatactcagacctcaagggtcaaaaagctaaatcgagtcttataattttgtagtggttattctgttattcttgttttgggtaattgtattgctggaacactaaggttttaacatctgtgcactttggatcaccttaagccagctggttcctttcaaaactgctcatcttttgttcttcctatgttctgacctgggcccctagccttaagacagcagtgtgctttctgcagccaggatatcctcttcaagactgtcagacaatctcaaatgattgatgtgctagtctggtgctctggtatttttccctttagtaagactccagtaaatctacagctcattctataagaatgctaattagatcacttttactaacttcatgcatgtttttcttgttctcctgtatctttggaagtgagcttaaagtttataatacagtgtgtttctaaactgttttttataatattacatagaaataaaatacatttcccaccaagggaaataattcaagtgatgcactcaattggctcttttctttctagaactgcaccatgcatcctcactatgcttactcttattgggagcctgctctaccctctctgaggtcatgccccttattgagtcatggtgttctatcattcaaagccaaagcagggcagagtcaggctctgttaggctatcaggcttgtgtctttgctgcagagctgttttcacataaagacagacctctatcaacctcagggcattaattctaaacctattgccttaacacaaattgtaccacgtctctcaacctgttgattttggctttgaatttcatgattgattgcccttttggggccttacataacctcccattctgaggctaagaattgactttctggcttcaaacttttgctttcattcttgaccatatttggactttatctccaaataggttacctccctcagtaaagttcaggtcactatggtttccagaacctgtaattacctcagcagagctctctgcagagaacacacccaacatgttcagtctgattccagaagtcaggctcagactgagaaaagtcaggaagcaaaaagactgggtggatgttgtcacgtggcccttaagaacaaaggcagtttcagagcgaggtggccgagaggaaagagagcatttcagggataaagaaaagtagataggaaagtctgggcaactttagggcttttatagtatgactgtgcacagtacaatcacaaaaatatgtttagttcaagtcatttaaaaagctgtaatctagtatatttacattaaattgtttccttattagtggcaagagaaaaactgataaccacacagtagagaaactgggcactactctgactaggtcatcaaaattaacatccccgttgagggcagatggatatagtgtgcctcctgatgtgacaccctgagaagagcacatcatctctcactctgtattgggcacagaacatgtcacctcaatctacccacaaagaaacatcatgtaaaaccaaaacaaagaattctctattattaaagatggaattacagttttcaaaaatttgaatgctataaaagcaaaacaaagctttatagaaatgctccagattaaaggtgactgaagagactaaatgtaatacctgatcctaggttgagtcctaaaaacagtcccgaccctgtttttcctgaggaaaaacaacagtataaaggatatcgttgggttaactaacaaaattgaaatacagatgaaggattagaaaaatgcatcaattttaactttacttgtatataaaacaatatttttatttttaggaaatttttatttttaggtattgtagtatataggagtaaaggaccatgctactacttttcaaaaggttcagaaaaaatgtgttgtgcatgtgtatacacatatacatatatgcatatcttatgtgtgtgtatatatatgcatatatacaaacacacacacacatatattcagagagataaaagagaatgagtgagcacagttatctggtaatgcagatggagcaaatgtcagcaacaggtgaatga

SEQ ID NO: 61449 - DNA, 2433 bp, Homo sapiens
aatcattccacaatgtaaatgtatagcaaaatatcacattgtatctcataaatgtatacaatttttatttccaaccaaaaataaaataaagtaaccctcccaaaacaagcaaaacaaaacaattgtcaggtatggtgaggggtggggaagacctgaggaaggcaggggaatttttacagtaacagaaatctcttaatttaagtgcctggtggccaaaaagaaaaaaaaaagtacttggataacccataattggaaagacaattcctaccgaaatgagtttatacctatacccagagaagattctttcttctttatatgccataaacatttaggagctgagatagtttgtattttaaggagacatatgtaaaaatgattttaggtcttagtgcttctgttatttgtacttctacacactaaatataataaatgtaatttgaatgtaacaataagaggatcaacactatggagatagcaaatatatgcttatctgaaagttagcagataaggaagtactgccaaaataaacaagctgagagtgagaacggacattcaaagtacattattgtgttactggaacatctggtactaacactgtcaagtttacatacattctcaaatgcttatttatgtaacaatcagatgctaagcattccagctgcacttgtaaactttttatgaactgaagtcatatgcacaagctcagctaaatatacttcacagagggaggagcgtgaggaaactaagaactctcacaactgaagtctgattgcagtgcagccttctggcagtgttctggaccagtgtctggtgtgagagctaagctgctggctcctaaaagattcattccattctagcagctagaatcagaaatgcctaaccaatgggtcaaacataatttggcagttaccgtttttagacataattttctcagaaaagaaaatgatatcaggaaaagaaaacagagcaaaggacatgatgaagtaggtcattaagaaagagaatatttaatattcaagtgaaaaaaatattttcctcaacccatcctagagctagcacaggtagaatgactgattgtggcaatgcataaattagaaaagacagcataaaaagaggaagcatgtttgtatgataattatctcatatcactcctaatgaaaattagttgtgtgaaactttccttcttagagacagaattcatagtaactgccttaaacccattttaaagagcgaaaaggcatagggggaaataagtatttcatgctgtttttctcctctactaacaaaaggaagttagatgaaccaattttcctcaaagtttgccaatcatttctttgatgaaatttctagagtatgaaatgttgcaaaatggaactaattcattaagttgtttattttctgaacagtgatcttaaaagtgattcctcacaggttgaggttaaaaagacatattttttggtaaaaataaaatccctttgacttttaagtgcctggcacatttctgaaagttacctttagaattaatcagatgtttcagagtgatgtgatcttgaaatgtgaatatctataatcagtgggatcctcctgtgtgcattttttggctgtcagtagcacttttcttatgccagctcttgaaatcacaacttttgggcctagaagaaaacttttttttccccctgtgtcacagtagttttagagcagtgactcaaacttaggtgaacatttgaatcacttggaaacccagaacccattccagaccaattaaatcagaatgaaactcatccatcagcaccacttaattttgtagcccagattgagaacaccacgtagaacgagaatggatattctttagggacagtgggattcatttcacaaaaatggcatttttgcaaaataattgaagcactaggcattccccatgctgtcctctaaccaggctccggaaatttaagggttataattacaacagctttaactcttcaaactccatctttttgcacatcttaaaaagggccagtaagggactgttctagggtaggcagtccagccttgcatgctctgtggcttctctcattttacctgaggaacagtggggcgagaaaagaggatcttttttcacttttggcaggtcacaaaaaaagtagcaatttttgcctacaaaactacattgcaattatgaacgtgaagaaggggttaggatgtaggtggaagcttaaatcataaacaggacaggacataataaccttatatgaatgccttttagaactactcaaaacaatatgtcacatatatataaatttctgtgtaatagtactagctgatagaataacctgaagttcagctttaaaaagaatgactattactaatactaccttctgattactaatagtaccttctttaatgctcactgttctgtttagatcataaattggc

SEQ ID NO: 61450 - DNA, 461 bp, Homo sapiens
gcagaaagccagtgaaggactgagcaaggtttttccacagtctcacagtcctatggagacaaaagctagattttagaaacctccaagggagagggattctgattaaaaaccccaggatctcaactgggaatccaggtgtccacaaactggaaaagcagagataaacaagaggcaggctgagtattacgaaatctgtaattgagtcccagaattaagataatctgccaacactctgctggccaaacagattcatggagagaagtaacattatccagaatcactacagtttaacaaatacaatattcagcattaataaagaaaggaataacagacatgacacaaaacaggacaggaggggaaaaaacccagatccacaggtgactcatttattgaaattatttgctaaaattaaaaagaactctatttccttcttttgcatatagttatctggttttcccagc

SEQ ID NO: 61451 - DNA, 791 bp, Homo sapiens
aaatacaaggaaaatgttttgtgtcaaatacatattataaaaagcttccaaaaaacctcaaaacaaaacaaaaataacccttgtatttcctgtttcctacaagcctaaattccaaaccctaaaaaaaaaagaacttaaaatgaaggactataatacaatatcagttttagaacctgttatatgttaaaaaaaaaaaaaaaagccttactagtaatcacttcggcaaatggtcaaaagaccactttaaaacttccttttctttatgcaaggaaggtgcttactcaatttcttcagctgtgactccacatttttatattctaaatcagttttctttgttcattttaactacttattagtgaactgagatcatctatgtggcaacaaacagctcccttgatagtttggctgcatacccaaagctgctactttgatgatcattgcttgaatgttagatgatatcatctctctgagcaaatcttcctggtttctctgccaaagataagctaaaggctggagattaagccttttacacctacaaaagaaaaagaaaaagaaagtcagatgatctcttaatgttttatacttggatccacagcaattactttgatttgaaacataatgcttcgttcaaggattttagcattgaaaatgcttttaaaaacatattttgcataatgtttatatatacaacataaacatatttaatttccatgggttatgcataaactgataaaaatgaaatttccaggcacactagaaatattaattttagtaagactcttagtttagaa

SEQ ID NO: 61452 - DNA, 2327 bp, Homo sapiens
ttctaagtctttgtttgttgtgctttactttaatcgttaaacttttggcaagcgatgtaaatttgaattattcacttcctggggtacttttaattcttaaaataagacacaatggttaaagcttaatcatttatgttacagaggacatttactgaacaacaataattattgtgacattatggtctagtctcctaaaaatgacattgaaggaaagggaaccggaatattccagacactacagtaggtctgaaatctcatatcaagtccttaataggtcaaaacttacagccagtatcaattacctaagggacttaacgaaaacgtttatgaaatcttcaattggattacaaaagcaagcacatcgttgcactgtatctaagacactctacagggcaaaatctcatgaaacaagtatttaagtagtctaactttttaatgttgctagtgtgttcccttctgcctcagtttatagattgagtatggaaatatttaagcaggtttgtttttggtttgtcagtcacaggacttatttagacacttaaatttatgatttggttactacagacatcaaactccttttggaatacggagtatagggtaaggtcactctaaagcaatgatgagagtccgaagcaacagcaactggatctagcataagactagtacaattcggtctctaccacgaagagagatctctgtacttgagtgcccaaaggcagaaacacacacatgccataagcaatccacatctgtgaagatgagggaggggtggacttcttgggatgggcggaaacacttacaactagggaggaagccaggctgcggcggacccagctgaccaaaggaactacagaagaggacgaagaaagcgagggggaaagggcgagggttattaactgagttgatggaataaggtagtggctccaaacttcacggctcattagagcttgaaaaaaaaaaatcagacgccgggtcgcacagaagtaattaaaccaatccctctggcggtggggcccaggcgtcggtactttttttaatttcccacttgaatccaatgggaatccaagtttaagggctagaagaccagagagcgacagacagggaggaggcgcgccagccaggggccgaggcacatgcgggccggcaacagcgaaggctccgcctcttcctgtggctcggaggagccgcggaacccccaacgcgcgactcagacggagacacccactctttcggcgctagcggcggctggaagggacgagagcctggcctaggaggaaggaggcggctccaggaccgcattacctgatcagagccgcgaccctcatgctgggcgcagtgcgcgtgcgtgcggcgagcgcgggcgggagccaggaggtcgcgccgcagctcgcgtgacgcaccgcggggcctcgcccgggtgttcgctccgccgcctgtccgcggatcggcgctgcgagccccgcggctgcctgcgggacacctgagcgcggagggtgcggcaccttggcaccttgaccctgtggcagggacatctcggcccaggaaagaatgaggtttaggcacggcctaaccacctaagtgagggcactgaagctgccgggggaagggcaaggtccgcgttgcagagcccaagcccagtggcgcaggatttgttttggtaagaggggatttagcgtcccaattgctgcaaattgacacagttgcggacgtgcaagcgcagaagaaatttgtccttcctcaccccacagaacagaaacaactgtacacttctgctttttaacttacatctcctctgtcctccaaacctgtgtgtccagatgtgaaactcagatccccaggggctgtggtaatttttaaatctggggctagccccccccacctctaggccctctgtggctttggctcttggtcaagcttgtgtatttgacaaggccaggccaggctcttcaccaaagagcaatggccttgcagaaagaaaatctagcttctaagtttatttgccaagtatgtattgagtgcctttcgtgtaccaggcactgttttagactctgtggatacaaccgtaaataaaacaaaaacccggcattccgggcatagagcttaaatggggatggagagaacagacaatacatatcttaaaggtaaatagtctgttgaagagtgaaaagtgctattggaaaggggcggggtgcggtgggggagagtcaggagagaggtggagaggcaaattgcagaattaaatcgtgtctatgtaggccttattggtaagatgagagttgagccaatttaaataaggagagttcgctatgtgtatgattggggtgtgc

SEQ ID NO: 61453 - DNA, 1695 bp, Homo sapiens
tgtaccagtcagtctagtggcaggagacagatttgaaagatattgaatgaagggacttttcatagtgctgtgggaaactaaggaattatcaggaatgttgaaatttccacaaactagcaacataggaaagcaatagcatcaataggtctgaataagcagggagagaaaatggtatcattagatcttttcagaggctggggtaatagaaaatggggtcagtcaataggagctctagtaatagggggaatacagccaccaccacaatagtgcaccaagaaagggaaatcacgagtgaagaagtagactcatctcttcttcatccacactgccatctcctgccagtgcgtcccgctggctgaatcccacacaaagttagacggtaagggagctttttaatgcagtttacagagatcagcccttggggcagagaacaaggcagaggatgaaggatgggtcttgggagggcaaacagaataacctacacacctccttattactatatggccagttcttgtttgtttacctggtacatagaaaatgtttaaagatatttgttgggtataagaatgaatagcatagacattaaatgtaattaatgtaagcaagattaggctgcatttcttattcttttaggaaattattttacttcaacaacttgtcttgttgctgaatatgattgtgagagtcttttagctatttatattaaatgtttcagaaaccacattttgaattcctgtgaagaacactaagaagtatagtaattggggatgcaattgtgagagagatcatattggtatgaaagaaaaaatgaggtggctcatttgaacatgtttgttgggtagataagtgaagaagatgagtcacaaattgtaattcatgacatgcagttacaacacgatgactcagcttatcactggcataggtattgggtggagtgtcagctggggcaaaacagtaggagatcatgtggctatggtattgattacgatggcgatgatgatgacaaagattgtgaggtgggctgaccatctctgtgttgtaaaacttatttaaaaaaagataagcttggtactcttaaaacaaagcatggagagactatcagaaagttttaatgaatattttaagcaagacttcttaacgtagggtccacaattaggatacagattggctggccatggtgtctcacacctgttatcccagcatctggggaggccgagatgggatgacggcttgagcccatgagtttgagaccagcctaggcaacatagcaagactcccatctctacaaaaacataaaaatataaaaaaatagccaggtatggtggcatctgtggtcccagctactcgagatgctgacgtgggaggattgcttgagcccaggaggttgaggcagcagtgagccgtgattataccactgtactccaggttgggtgacgggaaaatctgtctcaaaaacaaataaataaataaaaataaaaaaatagtatacgtgctaaggtaggagcacttatgttttgtctgaacaagaatggataaaagacttaagtgatctctaaggaaaagtggtagttttagagaagtaatattttttcttctaaagagaaggaaaaaatagtcttgcttaaatcaagataccgagtctataggagtttaagagtttttagaggattaccaagtttatgcataccaaactgg

SEQ ID NO: 61454 - DNA, 1090 bp, Homo sapiens
tgctacaaaatgaagttattatgaatagtatatgcaaataacgattttaacaagtatggggtgacagggaggagaaagggaaaagaagggaaagaggatacagaaaaagagaagtaaaaaaagaaggaggatggattaacagggaagcatttgggagtctgggctggaaaattgaaaacaggagacactggtaggactgttgaaacatgaggccatgaacaatggaagctggaaaggctgcattttcagaatgaaatcaagattattctcatccctcttcccttttatctagccattttttttgttgtttacatttaacttgagatatcctttttctatttttctctctgttttgatcactgctattgttaaagatggctagtgattaactaccctgattttctttgagttcctgtgcatgtcactctgggttctgcttagagagaagcaccctcttcctctttagctgcaccaattattttttgatgtgttgcctttctagccgagttggtggagctgccagttttgacacattctcttgcctaagagggttgcaataatgtgttgaggtcattcttgtgctgttggaggaatgacctatgctcaggccaggtagtcacagatgccgtctgtctgctcgagtttcattcttttgtagtaagccttgggaagttgttcctctgggttgacatgaatcctttctttattttggaaatgagagactcaggttcctatagcacactcagtgtctaatgttaagagtcaatatcaaaaatacaaagacttgtgttctaaccaagggtgtatggattatagagacatacgcctggctagaacaatagaaaacttgtaacaaacagaaaaaaagcatgccacattgccttcctttactcatctaggttaacctattaagtggcaggaaatccctacctggtggaaggaccagttctgcacatcaggcagccaggctctcaacaaaaaccttccagcctggaacttcacgtgcaccaagagagtaaatagccacgtcctttgttcaagtttgattaaatagaatagtagaggctgtcaggtgagtctcttggcacat

SEQ ID NO: 61455 - DNA, 664 bp, Homo sapiens
gaaaattgtgctggatgagctctcaaatgccttctagcccgaacagtctctgatcccatggtctaagatataacctatcccaagtaaatgtaaaactttgtgacaaatcacaaccacggggagtttgtgacaatttttagcctgcaggtgttgctgtggtgtaagaagaattaggagatggtaaggaacccatcaaacaatagcgataaaaaagatgtttttaaggattctgtttacatcccacaggcaggagcaggtttcccctgctccagcacctctctgtgaaaggactggggttggtttcccgaacagggcaaaaagcagagggtgtgtgttctcgccagctggacctcgatatctgaaaggatgtcctgtttacatttggcaccagagcttagtgattgcactgcctgagtgcccagagaatgagataaaactcaaaataaattttcacacaagtttaaaaaataacactctgctgaccctgtcatcataccacctgggattagtttaccaaaggcctgtgtttcaaaagaatgcttactaaggagggtgaggccgtggtatccacggaatgcattttttttttttttttggtggctaggaggattttcttcatcctttctctttttcttccccttattttttcttccccaacacccat

SEQ ID NO: 61456 - DNA, 1100 bp, Homo sapiens
tttttctttcttctttttcttcttcttcttcttttttttttttttaatttttaactcagctgtgttttaggattttggtacatctgcatgttctaaaaggccaacggaaatgtaagttgactagttgtatttgggctggcaccagggcctgtctcagtatttaaacaccaaaataatcaatggaattaatggccaagaggaacagggtctgaggatttttctagccatttccgctgtccatgcgcttggcttgcttgggtgccacaaacgagattctgacaggttgtcactgccctgacctgaaactcaagtttgtgaggtgagaggctcttaaatcttttggcttctgtagcccagagttttagctgtgcagagttagtgccaaaacaagccatcatgtgccctcagagttataaaggaatttggttttcagagcagagatgactaaatagaattggtggtagatcaaagcaatgaataaaaaggtctatttagtcatcagatccctgcctctctgcttctcatggtactgagagagccagtgtgtataaagagcatgtgttaagatgaactcagcagtcacttgacaagcatttattcattaagaagccgcacattttgaggtacctggttgttcttattagtaagtaacccccagcaaaaatatccccccagatgttttcatatttactttgcaatgtccgaatgaatcatttggcaacaaaggaaaatacagtttaaagattgaatcaggaatttaagctcaggaactctttgtactttgttttgcccttgatgagaatttttctaaattaaaaactctccaaattgtcaaatcggtgttgcaaaaacctcagtttagtaagatttagcatttggtttccaaattttggtcatgtaattggtgttttattgataaccgcagatatgaaccagatgtaatcaatattggtttagctcagatttgatttggagaacatactggttgctttgattttttgttgtaattatagaagttaaagaaaaaccccacatagattcagttctgatttgaagagggtcactggacattttttttttcttttaagaaaattttagtt

SEQ ID NO: 61457 - DNA, 432 bp, Homo sapiens
gcaaaaaaattgtatatgtgtcttggaagtttctgataataatgcttgtgaaactagtagaatcttagatattgtgacttccttcttgctttctgttgcttctgaagtgagcagtgtgttcttggcaggagccaagcctgaacaacaaactccatcaggaagccatttgatgatgcactgatgtcagtcagagaagctgaaagttgtgcaacctctctactgtactccttaaatgctgagtcactccctccacctgactctatcccaaggataataggttcacatgatgaatcagccaaaatagaactcactgctgctgccttgatttgactatatttagttgtcacacatttcctgggttggtgaaggtagttgactgagttttgaagggcctcctgctgggtggcaggctgcatgggaaggcaaaaataa

SEQ ID NO: 61458 - DNA, 780 bp, Homo sapiens
cctttcaagaagcacacagtgcctgcaaggttactaaacatcaacacaagcatcactgctgaggacttccaaatatggcatcaaaacagccacagagacttgtctaaataatatcatatctcccagcagctggattttagtttgttaactttaaaatgcaaggcaggcttaaagattaacaatttgcttggataaaggaaaagggaaaaaatataattaatcatttgcctgtccccaacactagtttacaaaaccatggtgcaactttattgagctcaaaattgaagggtggcaaggttaatatgtagctttagacctcacagtttcattaacaaacacattacaggctgtaaagctgaactgacattaatgctaggcccaaacaaagtaaataattactggcttggcaaatgaggaagtacttgcagagtttgtttacactgggtttttggaaaattcatgttggcaacaagtcaaatacagtttgactagtaattgtgacaattgctcacagatgctgctggaagaacaacaaaagaaaggaattatggcttttctctccccctgcattttccccctttgttaccatttttttttctttaccattttggatcaataaagaacttgcagccacaaagataagtgggttacatggcagatgggccttggaatgtttaaaaatctcatgttgcattttgtctcttggccctagattggaaaagacacagctgcactcaagctgcagtcataaaatccacactccttgaaaatgcctatggg

SEQ ID NO: 61459 - DNA, 1428 bp, Homo sapiens
tttttatcaacggagtcaacatctgtaaggtactaagaccagtgcctgctacagagcaacgctgtatatatttgtcaaataaatgaaaacaattaaattatgcatgttatgaaaattaaatgaattttcacatatgtaaaatatttagatatgtgctcaagtgctaaatagaggttgctgataattactgttactgaatagcccccttctgggaagccctggcctcttctgtagaagttcttactcatattccaccgttcaagacgctgcctcccaatcgtgattggcccgactgaagagaaagcacttcatcaaaagcagatgctcctccatgagtcactggactaatccagttgtccctctctggaatttccattgaggatataatgagtaagtctgccaggcaataggagctagagtgaatattcacacagagaaaccagcagggactgggaaagtagctgagtcatattccctgcagaaaatgggaagggacccctggacctcagttgatgacacccacattactgaatcctgagtcatcttcctatctctgaactgtgatccagttatctggacactcaagcatactgtggtttctgcttgtcccataagacatagtgcccctgcctgctcttttcagtttccctgagtcatggccaagtggttgagctttctctctttcttatatcccttatatgttcatcatagaccactgtaatgtatggatatttcttgcagtttaaagagcctcctctgtatatcacagggagataataggtacagaacaagttcaaaagatggctctcaattttgtcttgacatcagaatcccctgtactgacttttcaaatgcagggcctgggccctaccacccagatgtgaattcaataggctggagcaaaggccaggaattactaatgtacatcaaaggctgaaaactattgaaggtagtcaaagaatgatgtcggccaggcaaggagaaaaaggagaacaaaagagaaatgttgttcagtgcttaaggataaaactattctgtggtctcctcattgataatgtatggatggacacttttctagcatgtgagataatttttctagaagatgtagtactcattcaaaatcctcaaggactccctgttggacctagaataaagcgcaaactctgtaacccagcattcaggctctccataaagcactttgctgctccactgaagaacttccttctatacccttacatcccagtcatacctgccttttggtcattctcgaacattctgtatgtcattatatttccatgcctttaattcatgctagtctcccaagctaaattgtctttctcattctttctgtccacctgacactaataattacaagagtaataacaatttacagatcacaatatgcttttctcaaacattgttacatct

SEQ ID NO: 61460 - DNA, 536 bp, Homo sapiens
gatatcgccgtcaccccctactaaaaaagattctctggtgggttttcaatcttaaaatcttctcactacattctaggaaactggagaacaataggtgggtttcatatagcacctgattgatatttccagggtgtgaaaacctctactggcagattagcctgatattgcatattcaaacacatacaatgctatatttgtcattgctattgacctttatctctccagtttcctgacaaccttctacagttattgacattacaaataccagcaacaacgtgcagggcaaagtataacctttcatttaccttcatgtccctcaaatgacttgtgtaggtagtttcaacaaaagcggcaaacaatgatactgttgatttttttttccttaacttgctaaaatgttttccattttcctcttgttctcagaaaatcatgccaataactctctacaaaggaaacgatttcaaatgaatacaggtaattagaagtgtcaggaaatcagcaaagtagggtgtctgccatcatttctgtggaaagag

SEQ ID NO: 61461 - DNA, 1249 bp, Homo sapiens
gtttgatgacgtcggatttgtttcaagtctgtttctcaacaaggacaaaactgccttccacgcgatgtacagaagttgtagggcttcctcaacacaagccaaattatgtttacagcgaccctagtgagttttcctgctcggaccatgacagacttggtagagtgaagacatggtttctcggcaggccagtccacgctccgaggagcgctcaaactggcgcgttaggaagtgtattcaaatcgcgcgctctggcaggggctttcgggggctcacgctgaaggatcgcggggcactcgtgagacctgccgcctggtctgtgcgtcaggccgccctggcttctagtaattgggagagtacaaagcatcccttgttgaccctttgatcctaggtgggcgatgccctggattcctacctgcctactgaaactctggcgcggcgcctttccaagggcggccgctacttcctggttggtttgcccttaactgacatggcggctagttgccttcggcgcaccactgcggctgctcagtaagccaagctagggcactctggtgtacagccagtccccgccgcggaggtgccggtggagcctgggaccgggcgagtctccgccccgcttttgcagctaggggtgtgtttcaggggggattggggcaagccaagcaggcgaggacccgggcctgtgccgctttgcctacccctcatccctcggcaccaaggctacttgagccccagggtgttttttccttgttcccgccacctcctggtccctggcccaacatgatactgaccaaagctcagtacgacgagatagcccagtgcctagtgtctgtgccgcctaccaggcagagcctgaggaagctgaagcagaggtttcccaggtaagtgtccatctctcccctctcacagccctttgcctgcagcagcagtgcctgggccgcccaggcagcgcttaggaaccacgtgtcacacatgagtggggaggaacaccagtgtcaggcgttaggaggtcgaggttggcgaaaaaaggtttattctttcactcgccttccacacaaaactcttaacggtgagttcatggcagccttccaaggccttgcaattaaattcaagtcaacagatatttatggaaaacgtggtacgtgctaggtgatgggtgaacatagtaggtgcttcataaatgaccagaggttaattgacagatagtaggaatgaatgatgggtgggaatatgaattgtagattcgaaa

SEQ ID NO: 61462 - DNA, 1659 bp, Homo sapiens
gcttacaggagagatttgagataaaaacacaaagtgcctgtcagagtacctggcactttagcaggggctcagtaaagagtagggaggaagtggaggaggatcactggtagccgtgtaagtggtgctaagtttggacaactaggcagttaagccagttattcctagggagaaaaaggaaattagagtctaacaagcaataattgctcaaagcaattgtaaaggactacacatgtaactcccttgccatccacagataatgcaatttagacaatataaaagtttaaaaggtgtaataatcactggtcttttgcccttgtttacttaagaatctgtctgctgaaaattttcctgttgcccttattatatttgctttgcagcagtgacgaataatctatcttattctgtggataaaatctccacacttcacggagatttttttattgttggaatttagttggatctcatattaaataatgcataaacattgcgttatccaatcttatctctttttctttggtcctgcttgctaactaaattctccccctttaaaaaacattctttatatgcttgatatctctcctcctctttgctactttttccttcagtaccataaacataattgttgcaccatggtgctcttgctagaaataggctggaattcctgtaagctccacttgatcaagacagctcccctgttgattttgtggtatggcaggtgtgatttttccctgcccaagtgacaccaccaaatactgttaacttaagtggacctgttttggccatgaggagatgggttatctttctgaattagctaagaggttgatttcagatgtcagggtgctgcccttgtaaaggtttagtgtacacgtacagagtcaccaaaaagggcctctgtggttcttacttttgcacatttctgagaatggggtgaatgattcacatttacatggaggatattcccagctattaagccagccaggggaaatatctataagtcaatcacaaaatagctaaggtgttctcatagactttggttcccatcataataaaattacaaatttagtaaattgcaaaaagaggcactaaagtgatgataccatatttcaatagtctgtctgatgctcttctaggctctgtgttaaccaaagagtccggtaggcctcacactttggcccagtgagccctggttgttcagttgaaaagcggttggataatcactaacattctgggatcatgacttactaacccgggagtcgagtagtcatgaattgaagcataggacatctgtgaggcagaagcaagggcctctacaaagacaagttacactgatacacacattcacatacacaccttagatcaaagaagagccactgatcagtgcctgagcggctgattggacttgggacttttctacacattgcaacttgaaaacttgctctccagtgacccagggaaaaactattctcgttaccttgtgcagataactaattggaagttgagcacctctcaggagttccaatactttttacagaaagaattggtgttaagctataattcttgaactgaagatttattgtaactgagaaactgcttgccgaagtttaatttacccctctatttgctaggacttgttggcttgacacacactgtaccataaag

SEQ ID NO: 61463 - DNA, 480 bp, Homo sapiens
ccttatctgatcattttttctaatgatctagacatttctaacttctaatttatttttttcccctttctggcatttgccttcatgaatctgcaaaattgggatgttttgcttttggggactaggttggctagccaaagagattttccttatcattaaatatttcttgtgactaagagaaaaatttaactgcccatttagagtgagttgggatctgacataccaaagcattgtgtcacatttggttaatgatagatttatagggcaaacatgtatcagccctaatccttcagttatttgactttgccgaggatgaaattccaataattttttattttaagcagacttttatatatccaaaacccataaatctctttgttccttgagataaacatctgaccgaactctgggttaccctgtgatcctttgagaactatgccaaggaaaaagaaactccattccctccattagcgaataattaag

SEQ ID NO: 61464 - DNA, 796 bp, Homo sapiens
agtgtttccagaatcaattcagatgtccgtggacacccattcctgagggtctcccagctggcagggagggctgcaatctcagtagcagaccaacctctgctgtgcatatctcctcagacccaaggactctcttttcttttcaatgttgttaacaaagtctctttgatttttattggtcacaaaggttgtatttgccttcccagtgatctcatttttgtctagtggtgccacagtaaataagaataggcatcaaaaagaggaaatggttcaacccaaaagtctgcatttgacctaaataaaaattttctagggtcctattttacacctcttctaccatttttgattgcttgatatttcaaattagcaaccaaaacttcccctcctgttacttcagataacccagaaattgattatataaagttgcttaatgtggtcagcctcttcataaacaggtaggttgctgaaagattatctcgtcagcatctgataatctctggatcctgagctgttgaagaaggctcagaaatgcactaaagtaggtgctgggaataaggccagatcttgttctgccattaaatttccaaacttgtcaccctctaaagtccttactgcttttgtcacccaaagaccacataatttgaaagcgtatcaatctctatttacaaagggacattgtgtttcctcattcttaattaattagagacatattgtcaatcagaggttttgagctacattgacagaggtaatgttacctaacctaaacatagttccataagaaacacaaaacttaggtaga

SEQ ID NO: 61465 - DNA, 1320 bp, Homo sapiens
agtcacatcagcccaagctcataacaccttactgaaaggtaagattcagagtttccatatctgaaatacttcaggtttctggaaagaaagggaacacatccatccgagaaggtagtatgtgtgttatgtgaactctttggtataagtttggctattttcagtcacaatggtagcaaccaaaacaaaaattttgtgcagtcctgtcatttaatcatcttatcagtgccccaaggtgacttttttcaagagctctgttgataccatgtgtgtgtgttattttctggtgtttttacagatttgggccaggcttagtcatctattggtatggatttatccaggagctggactgcaaccgggaaaggggcatcctgctcaaagcctgtttccccacgaacattgtcaccttatgccacagcatagcttgaccctgaagatcctggaagagaagctgggaggaaaaggtgaatccggaagcaattttactttcctgcactgtaagatcctggcaacatctgccctgaacttcagctgaactcttgctgcccgtagtcacaccactacctctttagacaaacatatcaagagtttctgttttccttcatcccttgctgatgtgaacagccaagaactacagacacaacccactcattatcagcatttctgtctctgtcaaacaattagtttatagatagtcataatctttctttcttccggatggtttatccttgtatgctgaacaaaagaaaaaatgtgaagactgaaaggtgtgatttttcaattctcctcccagttaccgaatcaccctcttatttttttttccctaagcctccgttcactgtctctccctctccctttctcttcatgtgcactcacagagacccagcattgcattaccatcgtggaataatctagcgcaaacctaggaaagctgaagccacaaagtccaaagccacctttgtactcacctgcagagctccagaagaccttgatggcagcctgcctatgctgtgtgtttgctatattcaatctttacggcttcctgacttctgtgacagtaagccaagtgcaaaaatacacttgatgagaatttcctcttttaataatgttatttgaacaccacatattttagatttatcttatttgaaagtattagttccattgtgcctggaaaccacactcctttagattgggggccgagaggcgacaacccaacattgaggagagtttatttttaaacatggctagttgtcagtatgtacgtgagctagtatttttatgagtcgagttttttaaaggcacattctgtatactgcttagtat

SEQ ID NO: 61466 - DNA, 533 bp, Homo sapiens
atatttccattaaaaaaaaaaaactttctcctcaaatcacggcagggtcccaaatcaactgtgtttcacaagcagattttggaatattcaatggagttattagattaactgcaaatgatacttttaattgctcccttttataatgctgagttgatggcaaagtgcttcctggccatagaagtgttggctggctcaagagagaagggttatttggtcatttgccaataggatctgacctttggagagatactgcccatgaaccgctcagtgggtgtttccttgttactcattaattcagagtatattattatttgaaagccaaacgcatttggcatatttcctcataatttggaaacttgtagcacaaaaggaactggaacttccacatttcttctttttctgccagtttcccaggacttaatttgttggggctctttactttgttattccttccatgagcttctggacagaacagacccccagtacagatatcactaagaccaggtctttggttgcaggtgataattctgtct

SEQ ID NO: 61467 - DNA, 448 bp, Homo sapiens
ccctaatgtgtattagaagtatgtgaggtgctgtggggaatttttttaatgcaacaaaagatcctcttcttgaagaaaaataaatcattacctcttcaaaatgaaaacaacacaaaatatttggaaattttagaaaagcaaatcacatgaaggaaagagggaaatctatgaggtttttaataagatattttaaccctagactatggacagcaagtagctttctatttgcttatggtggctgcattcactgctattaagcaattccaaggccaagttcagcttagcagctaaggctttgatctagttcttagagtaggcagtgatcacagggatgccacatattttccattcctgctctgggccattcatgttcagtgcaagtataaataaattctaagcatttgaaacagaattcatacctgttcatcggcctaagtaataaaacaag

SEQ ID NO: 61468 - DNA, 758 bp, Homo sapiens
aaaaaataaaaaataaaaaaaaataagatgtcaacttgagcataaacccaatataaatttggtctcatcttcacattaatacatttggggttcaggtttgttttgttttgggttggaaatatttatttcattgacaaacaattccagagtgcaaacatttgtcctgttaagctgaagccaatgtttattttagcactgctaggatacctaagtgttgtgtaaatgggaaaatactggctggagaaacatttacacaaaagattgtgtctattaagacaatgaaagtgttttaaaatatatcctttggagtgagtttatggcaatgaagaattacgcttcaaatattatgaagtcattcaatttggaaaaagtattctagaaacttgcttcctagtctctctgatacttcacaaaattatccttggaaaatttaaagatttcttcacttcttcagtctgctattgacaaggatctggagattgaaaaggagggtctgaaaaaaattgatttgggtacaaaaaatataaatgaatgttgacaattctaacatgtgtctacatagatacacagagtaaatatggatatgaattaaaaaactaaatcagttaaactagcacctaatgtatttagtggttgttcaataaaagcagaataagtgaataaatgaataagaacattgaattaatgtccttacagttaatggaggtaagggagacacaccccatttgatgtgttctaacccatgcttttcacagcct

SEQ ID NO: 61469 - DNA, 3939 bp, Homo sapiens
gagaagagaggaggaggaggaaaaggaggagagggggagagagagagagagagagagagagagagagagagagagagagagaaaataaaaataaaaacaaagtcagaaaggagaaaagtaccgagcacaagttgagcacacagaaaccaaaccagccaaaacaacggagttaaaagttgtgaggaaaaaatgttattaaatttaaaaatgaaaaagcatgaaccaagagcaacgtttagagaaggaagaggaggcggcgaggccggggatttgagggggcgccgggaggccccgctcccgccggaggcaacagaaccgtagcgagccaacggagggagaagtggagttagtgtgaggaggaagccccggatcccacccctaaccccccttcgcctcctctgaggatccaataaatcaaaaggcgaaatgaaacaaaataaagagaagaaaaacgctaataatcagcacgagaacgccgaggactaggaaagactagggccagtgcctccccgggggcagggagcggagggtgggggggcgaataacgtgaaagttaccagaaacattatttagcagcggattccctgcgtccttgtcaatttcagagacaaaacaagcagcccaggctagtagtctaggcggcggcgcagcggctgcggcagcgcggccccagcggcggccccggcggcggctcctacgcagcccgtgcccgccccgagccgcgcgagccacggcggcagcggcgcagcagcggcagcaggagaaccgggggaatcgcgctgctggggtaaaagctggagcgaggcgaaagcgtgtaacgattgcacacgcacacacacacaccactcacacgcactcgccgcccgcccgctcgcacagcgctggaacacgcgcgcccagacacgcacacacgcacgcacacacactcgcacacacgcagaggcacgggagggaaagaagccgatgaataattttgctattttttaaaatactggccgccatcatcaagcagcgagcagcagcagaagcgttgaagggagaggaggcatcgggacaggcccctcttaggagaggatttatatctaggtaagtgttggagatttaaacctaccctttgcgccatcagtctgcgctccaataaactcctggatgtgtcgtatatttaatatcccagtccggataagaaagtgatctaggctgaagattccttttttttttttccaaaccaaagagacttctcccaattctccaatatgctattttttaggggggaaaaaaagcccagtctagacaacgaagaatttttttttctgtgatatttcttctttttctcttttttcctcttcttcctcctcctcctgatcttcctcctcctcctccacctcctcctcctcccccctcccctcctcctcctcttcggtcctcctttccccctctttctcttctcttcccctcagttggaaaaaaaaagaaagaaaagaaaaagaagaaaaagaagaaaaaaattgtcaagcccccgaactgaaggttacgagcggcccgtcagcagcccacatgtaaccgaactgtcgtgtttcatggctttttgccactccagctgtcaatcaaagcccggaatgtcaaggtagtgaatgaatgatggttgatgatgatgaagaggaggaatctttcagacccgtttttttcttccagtaaaactccgcgaggggtttctgcttcttgaattttttcctcccccctccccccttttttagctttgcccccgcggtatctataatacgatcctctctctttaaagtattgttcaaagaaagcagtgagaaaaatcaagaaaaaaaaatgaatagtttgcaaaaattggacttcctccccccctttcctggtaggtattttgtctctccctctctctctttctcgctcgctcgctcgctctcactcgcgctcgctctctcgcgctcgctctctctcgctctctttctctctctgggagatgagtgagtgtcagtaggtgttggcaggttggctgctgcctggcttattgaagagcctcagtttggcggcgcgggtcggcggcgggagaacgaaatgacggaacccggaagtcgtggtggccatagcccgtcgtacggcggagacacatcccgggagtggggagcgggagcgaggaggagcgcgccgcgccgagcctctgatatgcaacgagtgcgatcggacagccccggctgggggggtgggggaggcgggggggcgggagggggaggggaggctcgagccgggcggacccgagcaaatcagcaagcctgctcctccacggggatgggggacggcgggggggaggaaaaggagagtgtgtctgtgtgtgtgagtgtgtgtgtatgtgtgtgcgtgcgcgcgtgtgtgttgcgcgcgcgcgcgcgcgaacagggagagagggagagggggagagagaagaggacagggagagcgcagagaggaaaactgcagaaaaccacagggaaagtacggtaccgcctcagatcttttcatttaaaaaaaaaaaaaaacttacttctagttcattttcccatcactcccggctcctgcctaactgggtcttgccggggacgtttggcatggcgctctagcttttgttccttttaattccgcggcctccctctcctctgcccgccgattacagcaccccgaaggcttcctgctaacgtccaagggcagcaagctctgcagacggtaccactgccgggctaaattttttattaagtggcactttcttttctgcgcagatccagcaaccttgtcaatactcatttttttccaggaccagaagagaccagcttaactcagagcacactccctccaagcggtgcggacaaggggccaccccgagagtctttgggggccgcggcggaatcgggagggaggaagtgaggaggcagtcatctgggtccgatgtagccaaaggcgtgtgtgtgtgtgtgtgtgtgtgtgtgtgtgtgtgtgtgtgcgcgcgcgcgcccgcgcgcccgtgcgcgcgcgcgactagtgtgcgtctccaaagtggatctcactcagagctgggaagcacaggaggaaaagacggagagagtgggggagaaagaagttgccgggcgaggaggagtggccggcgctcacagcccagctttgttgtggtcgcccgaggcgcagcggcgggccgcggtaacgcctgctaatggctgtgttaattacacaggggcgatttcgcggggtcagggagatggggccagctccgaaagaacttttccaaaaaggaaaaggaaacgaagggaactaccccacaccgtttgggtggaaactagttgtggccggtgccctgtcctccctggcccgagctgcaccaggcttcacctctgcgcggctggtttcccggcggccgcgcgtcaatcactacgagcccggagttgggggcggagccacggtcaccccgcgcaagccttgccgcccagcagcccccatgcccctcggccccttgtggcgcggccgggcggacaggcgctggaagcgcgtcctctccccaacttctcgctctcgccctcccagtccctggcccagagagtggaaagcggactgttgttctccaacagccgcatccctccccaactttgaacccattctgagaagtggagagtagtgtcttccgcgagccgcgtctaaccgactttcccgcggagggagggtgggatgggggaggttgattagagagaataaagtactctgtgtgtgtgttgtgtgtgagagagagagagagagagcgagagagagcggggaggagggcgggtgggagggctcttttttttggcccccgttccatgttccctgcttcactgtaagctttcgagcaacagaaactaggctaagattgcagcctgcagagactccaagcggagtcggagaaatttggcc

SEQ ID NO: 61470 - DNA, 3727 bp, Homo sapiens
agttcctattaccctttttggattcaggcaggaaaatgatgtcaaaaacatctacttctggagctctcagaagtaagctgggtatctttcaggtaatgaagcaagacacatgggctgttgtttcctggaagctgcaacaatcaccgaagtttttagaagagaagagcttatctacagttttccccttcctatggtaatccatcttctcatcaaaaatgatgaaacacagtcagcactaaaaagatctaaaataattaaaaaaatatttctcttggccaggcgtggtggctcacacctgcaatcccagcactttgggaggctgaggcgggtggatcacttgaggtcaggaatttgagactggcctggttaatgtggtgaaaccccgtctctactaaaaatacaaaaagtagctgggcgtggtggcgggtgcctgtaatcccagctactcgggaggctgaagcagaagaatttcttgaacctgggaggcagagattgcagtgagccaagatcgcaccagcacactttagcctgggcaacagggtgagactccgtcttaaaaaaattttttttttctctgaattttctacttatggaaggagtaaagtgagtaagttggatatactctgccaaaaatgctgcttcattcagagatccgaaaacacacctgattctggtgatatctagaacaattgcataggatctaagttcaaagaacttgaccctagttaatttgttttataataaatccagtttattagaaggacttcaaaaaagattattgcttctcctgttgaatctaggatcatgccaaagcttccctgacagacagtacctgactcttagaggcttaaactctaaaaggtttacaacactcctcacatcatacataaaatatgacctgaatgtaaataaatctcttctattttttttttagacacaggatctttctctgttgcccaggctgctaggctggagtgcagtggcgcagttgtagctcactgcagcctcacagtcctgggctcaagtgattctcctgtctcagcctctcgagtagtgggactacaggtgctcgccaccacacttggccaataaatctcttcttaaagtaagcttttgctttttccttaattttctgctttttgtcagccctatccactgtctccttaccccatgctcaatttggtatgcctgtagaggagtgagcaatatgcaaaagagaatttataggaacatgcatggaagaagcagctaatacattagctggagtaggtcttgaagagaaatcaacaaactagctcttcttagacaaagaaaatgaggcctactgaaggttccacatcccattgatgatgacatcaggtggaaatccagggagaggtgtgtcatggtcacatgaactgtagctggcactttttttggattgcaacatttgagtgtcaactgagtgatacaacttagcacttccaaaatatgacctaagaccaaaggtcatttcatctcagtccatgtaaatagaagtatagcttccaggaaaagtggccagacctcttcaaaattattacattttgttctgagtgcgagattttaagagaatactcaggggaaagagaggaggcaatagaagttaagtcatatgagaaatagccctgacaactagaaatgttaaactgggctaaaaatgcctcctggaagagaaggagtggaacaggaggtgagaaagtgaagatgacacctgtgtggaatcagcttattctgcaagactaaaaatgtgtatatacttgaaggaagtggtattctacacagattaggagcgcagcctctagaatcatacagaaccaagtagttctctgttcttgtggaagtttcttaatgctgtcttgattacttcatctctaaaatgggttgataatacttagaatgaatttaaacgacatgcaggtaaaggttgtattccaatgtctggtatttaataaatgctaaattgataataactattattattattattattaactttttgtattcctaggagaagaaggtctcattcagggtaagtttcacatcactgaaggaagtcaaaagaaaacacagatagccattacatatggatgttgcagagaagaattcatgcactgggtggacagctaggaagtcccctcaaatcaaccatacagtagtattatgactttgaccttctagtcagtgtttttcctacttcaggagtgcacggaagatcaaaagtatgatcttaaagcaattcttgaaccagcaaagtgtggatttaaaaacaggaacaaagtcataactcccctttatagctcccctgtgctgtgtcatttcaatgctcacaaaattcacccaatagttgttttcttctacgtgtcttcagccttatctgcccagcaactctgctgtaattatgatccatctaccagatgttcgaatcagcgtttggttcttcttctgactccactttacctgcagagaaagagtgtatgatgaatgtgttggctggcatagagggagaaggggcatatatgggaaagagagagatctaataatagctaaaagagaataagtggaggtgaggataagctctaaagttcactatttccaagattagaataggaggcacagagctctatttccttagctctaagctagctgtctgccttctagattttaatatactaatttattttttaatcaaattaaatttacttttttgtgacatttaatgggtgatcagtaccaaatggtcatttgactgtacaggtccctatctctcattcatatttttgttgaggtaaaatttcagttttgaataatgcaaaggattttctggaggtttccttcatggtggtgggaataacaaacacagaactagctttgccttggcagggaggcaattccagcctgttgggccctggtgatgtaacctgctggaggagacttgttacaacacccaggttctcctggccctcattgagaagctgcttggtgctgatgatcaatatacatgacggagatgaggctcagtgactggaaaaagggtgataatgctctcatctttattttgcaaaagataaaatgaaagccggaaaataagggatttgtgatccctaaaggttaaagttgtttgttatcctggtatcagacagatctttaaatattgactttcatagtcagtgtacccagatccttggactggaagccctggctatgttcagaaaggaaagggtaattttctcagtagccttccctgaactattttgaataataacagaacaggccctcctttgccaggtagatgactatttatctggctttgtcaactgataaattcagtgatttatgggacttcagctgtcatcttatcagaataacatgtacttctttggattatgcaacaatcagattctttctagaaggaatttggagcaaacctaataaaataaccatgatttgggatcaaaaaccttttgcgttttcctcctctatttcatctttgggaaaagaatgacatacgagctgtttgataggtgcacagcaagatgctgtgattgaagtgatcaactacattatatgaacttgcaataacacattatgcaaaatagaaaaaaataaaattcaaaccaaacacatgtggtcaaaaattgcattgcttgataaaaacagactttccctttaactaatgagtctagaggatgtatttacagggctatca

SEQ ID NO: 61471 - DNA, 1070 bp, Homo sapiens
actcaggaggctgaggtgggaggattgctggaacccaggaggttgaggctacagtgagccaagattgtgccactgagcaacacagcaagaccctatctcaaaaaaggaagaaagaaagaaagaaagaaagaaagaaagaaagaaagaaagaaagaaagaaagaaagaaagagaaagaggaaggaaggaaggagggagggagggagggagggaggaaggaaggagggagggagggagggagggagagagagagaaagaaaactatcaaggctgaggtatggtgtgcacccagacaagaagatcaggaagcacaatgtacacatagggagcaacagacaatgtagtcagaccaaatgcagagaatacaaaggtcaggagagagaaatcaagctggaaaggctggcaggtacccaggtcatgagggaggcttagcgaagaaaacacaaagataagaactttggactttactactaagcactggggagccattaaaagtttttgagactaaaatgacatgaggatattaaacagattaatcagtaagaagcatgatggatagactggaaaggtcaaataactgagctaagagaacaaactaggcagcccctgccctgggtgaggtgagcactaattcaggaagaagttaacgtagtggcaaaaggagtggatggtgccaggggtttgggagtctgaggagatctgagaatgttgataggctgggctgagaggaagagcccagtgagagagagatgatggagacacaaagaatgtgtagaaaaatggtggagtaatgtccaaacggaggtggcagcaaggcgcaattggagcaggctggatttcacaagtagggatggagtagggatggtggtagtcaactaagaataaggaggcttgggggcaatcagtgattttataaagaaagaaaaatgtctacaccaaccaatgcaggggacaggttagaaaagagtctaggaggcgagtgtgcacattatcagacaaaaaagcacacttcactcatactggtagtgcatgaagtggtgctcaaaattaaaacaggcaacaccgccaaat

SEQ ID NO: 61472 - DNA, 1397 bp, Homo sapiens
tacattacttggatacagaatattggagatacatatatactatatatataatagtatattactaggataaagtgtatattactcctttatacttggatatattaataaatatggtcctgtatcttctctcttaaatgtctttaaaaatgggattttaatgtaggatggcttaagagaaccaatatagaaagagataacagattctggggccaattaaggtatgaaatcctagaaaacaggtgtcttatcgacttgatgagacatcagaagataaactgtacacagactctggaaaattactagctttcattgaatacaagatgctgcaacaagtcttcacaaagaaattaatgaaactggctttggttattatcctcttctggcaaacttctttttcttagggggttaaaaagatacacagaaggcagataaaagtgttatatacgtgcaattttagttccacttcatctttgacaacaactgagcttcacaaaatggcttctgttcccagcatgctctttccccatttccccacttaaatctagggagaacacgctatcattctgccactagatggcactgccacaaattgggatggacagtactctgtggaccctaaacttctaacaatttagagaaaaagcaataaagattaaatatacaacaaaatgcaataaacattagagtgatgcagagaacagtgcaacaaacaaacaaaatatactgaaagagtattgtcccaatgggacataaatcaggaaagatcctactttatgactagattctctctcggatacactaagatataatgttatttgtccaacacattttggctcccgatatttttcctttcaagctattgaagttaatatttaacaaacacattttctgccaagttttaatgtgatatcatcctctgaagaaacaaagtccagaaataatttgtctttctggcaatatttattagtattttgacacaaaacctgaattattattgaaagtaaataggaaatcaaggactcagatctcttgaatttttttaaggtgctctcaaggttaacatgtactctgtggcaatgaagaggcggataaataaaggctatatggtgtcatataatctgtaatatttcctataactgtgactattttttaaataaatttttctagatgacaaatttaatttcccctttggttttgtttatacgttggagtctctggtgtcagagaactgaacacaaagctaagtactccaggtctctctacttttcttttgactctgaaatttacagctgtgaacttcccataagatctttttatttcaaaagaattatgtatgtaatgtgtagtttaatataattatatataattgattatataattgaagatataactatatt

SEQ ID NO: 61473 - DNA, 912 bp, Homo sapiens
caatgacataagcgactaaagaaattgaaacattttctcaaaagaaaacactaggcttagattattttatataaattctctgcaaaatattcagtaaataaacaattttaatcttagactaactcttccataaaagagaaaaagagggtacattttctaaattattttatttgctcagtatatctttgatatcaaatcagataaaggtaatataaaaagtgtaaaaagaaaattataggccaattcacttatgaaatgaatgcaaaagtaactaaacaaatgccaggtatgaaatacataataaatatataaagagatttttcataggtaattgggagtatggaggtggaaaagtcccaaaatctataatcaagaagctagagacccaggcgagtcaacaaagtaggtatagtccaactccaaaggtcagagaatcaggagagctgatggtgtaagcccaaaagctggcaggcttgagactcaaaaagacataactttttagtttgagcctaaaggcaaagatcaactccagcagtcaggcagactgagttcactcttattcagccttcgtgatctattcaggttttcacttggttagatgaggcccacctacgttagtgagggcactcttattcactcagcccacctttaaaatgtcaatatcatctacaaacaccctcacagacacaccaagaataatatttgaccaaagatctgtgcaccctttggcccaatcaagtttgacacataaaatcagctatcacaggccaggcacagtggctcacacctgtaagcccagcactttgggaggccgaggcaggccgatcactggaggtcagaaatttgagagcagcctggccaacatggtgaaagcccaactctactacaaatacaaaaaaaaaaaaaaaatta

SEQ ID NO: 61474 - DNA, 3552 bp, Homo sapiens
tcttgtagaactccatgggacacatccactccaatttgcaaacccctttttcagagaacttctctttcaagggtaagctatcaagaaatccaaggctcagtgatgtgctggagtcaactggcaccagataaagacaactgttcattcagtgatgtcacactgaatggaccacgaaatggaccatggtgagagtatttacaccaaagaagtcagaaaacattctatgtcagaggtttctttttcctctccagaaaaatggttattagatattcaccagcacatcactgtcagcagttcagaagtaggaaaagaatgaagaaaaagtattatgaagtcaaaaggccaaaaataaaacagaatgagaaggctaggtagtcagacatgtccattgggaggccaaggcaggaggatcacttgaacccaggagttcgagaccatcctgggcaatatagtgaaaccccatcactaccaaaacaattgtcaaaaactgtgtatgtgtgtctggattgaacaattaggccaaagtggctgggtagaagcagataactgtgggtgggacagtgagaagctaggaagaaaaacagtcagtgagggaaggaagtgcagtgcagccacaggcctggggagagagctgaatcatggaagtggtggggatagaagtggataaagaagccacagcttatggagaaagtgggacacaggttgagagaagcctggataaatcctagagccctacaaaacagtaggccaaagaagacacacagcacctgttggggggaggcactgttacagtggtgtgcagagagggtgagcaagtttctgtgacaggtgagtacaggaaggcaggagggccacttagagggtgcaggctgaactgagcaggcagaagttagaaaacattgtaagggggaactaaagtgacccagagaatgggaaataggaaagcaggaagagaaagcactcaaatttgacacttctcactggatatgaatcggttaaaaggaatttattatacgatattctaagacatctatttctatctaccttttttaaaaaactagaatttcattaaaagcaatgatgcttaatcctctgaacacggtaacccaaccagtatttccatgtggttaaattcttctattatgttttattgaagagaaaaaatttactctgatcgggttatttttacacacaaagtttaaatatttgattagaaactacactgaaaactgaacatctcactgtgtgtttaatactcacaaattcactcgacctgagagatggctgaaagcccgggcgtaatattgggctgatacctttgtaactgggacaaaatcaccccggataaatacatctgccacttacagttgaagacaagtcttcatttaattgagtttacagttttgttttctctttttattacttctcttaacctaatgctcactttctatgcccctagaagagggacagggaaaggccaggtgaaaaataaacttccaccagcaatatttgcagagctgtttctggtaaacagtcaaactcaccaggctcttatatcatcatttatttgcacttgtcttttaacatggctttttgcgctgtcatgggcagttcttaatttccatcaataacctttcatttcaagcatggctagtttgcattatgaatgtgagaagtgagaaccatcctttaggaagctggaaattgaggactataccataggaggatactttagagtttgggctaaactcaactatcataggccaggtagggcccaatctgtaaattgggttggtttgggtcacctcactggcataagagccctgaagtttaatggaaccgtcactaggaaaagttacaatgatggtaccttgtccaccgggggcagcttttgttctcggtcacattgtatgtatgtgattcatgctgttaataacccatccagagttaactagactcgctgagaaattaaagattaaaactgattaaaacttattaaaactgtagcaactaccttgctgccttatgaggaaattacattcactctagaaaaaaccctgcctggcttccaaactgctataagtccgaataagatctgaaaagcacaagggagttataaagaaaatattagttctgattttttttgcaagaggctagaagaaacttagatttggcagagagcagaggggaatggcacagaaattgtgttcaaatatatctagacaaaataatacacaaattgatctgatggctttgtaacttcaataatgggtatcacctagactgaacacttcttagaacatagtagacattcaatatatactttctaaataactatctgcctgactaactcactgactgagtcagactttagaaatgttgcccttcagaactctgggtaaaaaccaagttcaaaaattatgactcaacctggagaacatatcaattactgccaattaatcaagaagtggcaagagtgcaaagtgtcacctgattaaaaatgagtcaatactaactgtcaataacagaaaaagacatgtaataaagcaaatgggtttgggggagttactggtacttcttcagttcatggtaagcatgatacatttattcttctcctttaaaagaccaattacataagactgcattactttccattctctgtggtcccaaattaatcattttgcatgagtagcttctcaaaatcatatgctagttttcagaagagaaacaaaaattgactagaaacagattctctctttcatttgttactcaaattagtttggttcaatgctgtttagcatatgcagtaggtttaaccagcggaatcacgactctgccaggaccacctcaatgacatttcatggtagctaactagaagctctctaggacatgcctaacaccaagatacagggggaagaggctggatgtgcccagagattccaaaaacaatcttgttacaatcttaggtaagcatctcttagcatctaatctaacagcttaactaagaaattattaacattcagttcacagatattttcagcaccttctatttggtggagtcagtccctttcaaaccactgattttacacagtcacagaaatttgttattgcgattgtcttctcgggactgggacaaattatgcaagaacatgacctacagggtaacggacaacatttacttgaattcgtctggaagtgtgtaaagtcagaaggcatcacagataacccagtgaactgaggcacgttgaaagaacaatggagggtggcaggaagacctgaatgatcacctatgaagaaccaagatcgtagtcatgaacagccggaaaaaaatccaaagcagaaaacaagcaatgctttcggaagctggggaaatggaaatggtgtggcagtgtgaagggaggaataatagggcgaaggatcagatcgaaggccaaaaattcagaactccaacaggaactgaaatccccttttacgtatgggctggtgcaaggagaatataggacaacacaaaagacttagatcattagaaccttgcccatcaaaatcccttgc

SEQ ID NO: 61475 - DNA, 1153 bp, Homo sapiens
gtcttatgaattagttgtttttttaagggacataataaatgatgaatcaacatttgttacgtgaatgaatgaagctgtgaaaaacattaggcaaaaaaaaaaaaaaaaaatagaccttttcaaatattagggtgtatcaaaataaataaagctaccagaactgaactttaagaggaaatctgaaattctgtcctctctgttgctcagcttcgagcactgggaacctccagcaatgcctgtcccaccggcaggaggtgtctggaatgagtcctgctgacccagagcagatgtgagtcacatttggggtaagtttgtcaagctgctcctatctctttctgcagcacatttactcagccctcatgactcagcttctacttcatattctaagtccctgaatgggattacagctgaaccacagcttacttcgctaaaaccttgacatcctgcctagaccttcctaaaggccagactgcgtctctagaaacctcagctacacacaaactgtggtcccgggcctcattgtatagaccacccagaatagcagtggtaacagcctctcatcttcctctttctagacacttcctacttcactacaccagttactttacctcacccctgtccacatgagccagccagggttgagctagtgcttgccacacccaaaaagacaccgacatttggattgctggctcctcactatattttgaacaattctgccatagatcaagggacccaaagccatactcaacatccccatccccaactctgggcttctctgtgccccatttgcctggcccagaggcatggttctctgtgacgccagccacagacaaaatactttcaaccacatagctttccactgaaggtctgtttaaaatactaagtatctgaaggtgttttctaaaaatgatggggatgacaatttctgctaatgcaagtatgtcttaaacatctgtaaattagcaaataatgagtgttacatcattatggaactgaaattcaggtttcaaaatctattaacattacagtacaagtttttttttaaattcctgcaccctgcatagcttagtgatatattgattgcacatgaagatgtaagcaaagttacctctatttctatccatggttttaaagtgcactctcttacaaccca

SEQ ID NO: 61476 - DNA, 720 bp, Homo sapiens
ctttcacattttcatattttacagggtcaaataagtttgaaagatccaaatgcatgttagcatagtcagtcttggggaagctatattactatagaaatgaaacatgattagtcaggctttcccaaactatgaaataactatccttattgtatgtgatacattaacatccaatgagaagctgttccaaaaaacacactttgataaccacaatgacagctgtgaatcagccaagacagctgtctcttctacctctgtgatttttttttctttgagacaaagtgtcactccgtcacccagaccagaatgcagtgacacaatcacagtacactgtaaacttgacctcctggactcaaacaatcctcccacctcagccctcagcctccaagttgctggaactacaggttggcaccaccacatccagcttatttttttatttttttgtaaagatgggatctcactatgctgcccagcgtagtctcaactcccaggctcaagtagtcctcccaccttatctcccaaagtgctgggattacaggcatgagtcagtgtatctggacctctgtgaaatttttagaattcagtagaattgaaataagtagcaaagtaaacagttgatagatgtatctgttatcttcctttagaatgacaaataactgcctgaagacagaataaaattggggtaagaagaaactggggaagagtaagtgtctgaacaagata

SEQ ID NO: 61477 - DNA, 1441 bp, Homo sapiens
aaatcacttttttcatcaagaaatcaaatatttttaaaataaagcctttggttcacttgaagctgctttcctttttttaagaacaaaatcctctcttctttggtcttgggtctgttttctaaactccaacattggacgttttgtcacttaattaaattaaccctatattctcgttctaaaggtagtgctgtgaaagaaactctgagtttttaattccccctcatgcaagcaccattctctcagctgcctttttggcagcgtgagtacagaaaacagaatcaggtgaaaaataaatgtgtttacctaccatcaaaacacctttcaagtccaatacacatttttgttctattaatgccaacacgaatatgcaggcactgtggcaagaggtgctttaaaatacagctagacagaccgattaaaacgcgctgctttctctctgccaaattcctgcctatggggagcaattaactgtgccttccacgcattcaaatactgaataagaagtgaatcttgtatctctgccacttagacaagtataattccaatggaaagatttatcaacaactcacaggcagtttggggtttggttttgtttgtcaaacagcacaagccctcacgctgcatctggactctgttacaaagtcacgcgggggacaggaaccccaggagaagggcgctcattttggccgatgaacaagcaaataaacccaaacatcaaggaagcagctttgagcaaataaactactctgtgctagactgaacacacataacattatccaggaatataacccaacagcagaagagctactttattgtggcttctttgcagttagagaagtcagtgtcaaatgtaattgcagaagcccataattgaaatttttaaaatgtgaatttattctaccgataccatatgaagtcaccaaaggtttcctgtatgatgaaaaatcccagcatttaaggatatttgaacgcaataacaggattacaaattagtccagaaaaaaaaaaaaaaagagattcatgaagatttggtgctgacatttttatttttaggttttaaatttttttctgctccatcaattatttcatatgtgtagttttgtgattgcttgagagataaatggttgacggctgttattacactgccccagttctgacatttccaccccgactgcctggcttcaatgatcttttgggtatgacattttagctttggccttggtccccatcagcctctgaggcagaatccaggcaatgatctttccgggacctgactaaatgcctagttaactacaaggttactcacactggagcaggtcacaaggaaacattcaggcccccagatgtctttcttcttgtctcaaacaaagcagatgtcttagattttgcaaggctgtgtgtaatctactttggctttgcaattaagaaactatatatttac

SEQ ID NO: 61478 - DNA, 824 bp, Homo sapiens
agccagacagggtatgggaagagaggtttttccaattctctgactttatcacatattttaaaatcaggcagaaggaaagagtggtgtgactcttttcaaaattttggagatgccactttatttatagttttccgcgctatcgacaaagtaagactttctgacaagatcacacagctattagttcaaaccagattatttttccttaaacattcttgtatattttgttgaaattttcccagttaataaaactgccttgcaaatttttatgaatttattttaaaagttcaggaaacatggatttacaaaactgggaataactatccagtcctaagatttcataaatgtttcattcatttaatgtttagtgcaggaagtaatgactacccacaggaagcaatgactaatgtcagagacaaagactaaatcaataagtaaataaataaataaaccacaacctttgctctttctggttggatactaccccaaaaaacatgggacaggtagaaaaatggataaatatttcacaattatctacaggttgattttgatcaagttattttcaaacattttataataatttatgaaatggaaattttaaaaagtgttttccctcattttcatttatcattaaagtcattggctcttattggggaaattaaatgctggaaatatggctgcaaatctctatagagttccatacaatggaaagctgaccatgaatttaatggggtcacatatggtgaattggaatagatgggcctgtttttaatagcaattttgttagaaaggtacagagaggtcagccaataaatcaatctaaaata

SEQ ID NO: 61479 - DNA, 1834 bp, Homo sapiens
atattatattcattttttttctggccatagtaacattcttagcaacatttaatctataatgactttgtgaactctctttagaatccatttgcctcaggaggtttcccaccacaaccattcaagacaagtgagggaggcttcaagaaacccgctcagagacctcaacatgcaacccctagaatttggagggcacagagcctggagactgactgcagtctggaaagagtccaaatgtgcaaggcttgcaggagttattgccttttatggtcgaggagaagaaagggctatggtgagagcagacagcactgccagagtttatgggacaaaagagccaaatggttccttttagtcagaatggatgccagggaaagtagcagaactcgagttgccatcaaagggccatgcccgagtggccatccttcagagtatgatgactccaacagaaagaatcaggtcctcggatcagccagagggtgcatctcctctgccagggaacgagactataataggggtctccaaggagcccccaaagtatctcatttgccacccagaaggctatgatatcatatgaatgactactactaattaagactattactcctccttccccttctctccctcacctcatcctgagcttgaaaagtacgcaaaacagtaaacacagaaagcaaagacagactgcacatcctttttccccactgcaggtttctgaaactgagtggagctgtgagtcatggggcagagatagggagaagatctaaactgaatgagaggttaaatatttaacattccagacactggccttccaagttgtatactctttctgcacattgtgcttactcacagcagcttcctgtttttataaatacctattatacagtatatatgtcagaccacataggatagagcttaggagctctggcttatggaaacagagacccaaacaagttacttaacctctctaaaccccagtttcctcacatgcagaaaaagaataacaataacagtacttgatcaggttattgtgaaaaatgaatgtgataatatatgagatgcagtaaacaattcatgcatttaattgatatttatggactacattagtttcccagggctgctatcacaagtaccataagctcggtggcttagaacaacagcaatttattgtgtcatttttctggaggtcaaaagtctgaaatcaaggtattggcagggccatgctccctctgaaggtgatagggaaggatgtgtcaaaaacttcttcctagctccttacagtttcttggcttggggtggcatagctcccatcttcacatggcgccctccctgtgtgtctctatcttcacttggccatcctcttatccagtcacactggattaggagcccatcctactccagtatgacttcaccttcactaattacatctgcaacaaccctatttccaaatgaggtcacactctgaggtactagggattaggacctcaatatataaattttggggctacgtaattcagcccataacacctattaggcgttaaacacttctagttactggcagaacagcagtgaacaaactgtacttggggcatctgtgttctagttgggaaactcacacagtaaatgcacacataaaccaataagataatttcagaaatagataagaacactgaagaaagtaacataatggattagaccagtggttctgaaactttttggtctcaggatccatttacctcttggaccccaggtttgtggctatgtataaaatggtcaatatttaccactttagaaatataccccattttattcattgtttcaaattttaaaatttgtggca

SEQ ID NO: 61480 - DNA, 733 bp, Homo sapiens
gccctttataaaacaggtttgccaatccctgttctaatgcaacacaacataaagttaacttcccccaaaatgtaataaaattattaaactctaaaggccttgaagatgtgagttggatagttcttcatcaggcaaagggatatacaataatatgaagtgataaattaccaggttctaaagggtttctaaataataggaaagagttctcctgggaagttctcaacccagacacagatagcaatgatactgtgaactgaaatagtgtaggtaaaggcctatcattcacccagcactgtaggcatctaggcagcagcaaataggaagagaaatcgctataataacaaaaatattgttgataaaacttgaactttaaagacaatgagaagagaaaagatcaagagaatgctgtacaattgctgactcaacagtagctaagaaaggaaacaaagctgacacaggcaggcatgaattgttaggaaatcaatagcttaatgagtaatcgagtcagctttcctagaacacccagaatgagttatgtctgcgtttttgcttttcttttgcaacctaaacttcaggcctctgactggtctctctgcttccaggcttgctcccctatattctactccccagaaaaaattatccttttacaacagaaattaggtcatgttaatactttgctcaaaaccctccagtgacttcacatttcaccagaggttgatcattcttgaagcta

SEQ ID NO: 61481 - DNA, 1194 bp, Homo sapiens
cctggtgaaaaccaatctgtttatgggtacgcttttctgatgttacagaacgtctgcgagagagggagctcaagttcccgcctggtctctaagtaacccggcccacaaaggtgcatacacacgtccgagacagaaaaaagcttgccggtcgttccctcctcccaggcctgcaatgaaatgcgctttaattgcatcaaagggttcttctcaatggggtttcagaggcgcgagagcggcgttcccagcgagggttcctttccggctggccagcattcctcagccccgcgcggggaaggggatggggctccttcggcagggcctgaggctcatttccattcctctcgcatacagcctctgttgtgcgggccgggcctgcagagggtagccgcggctgcctacgaacaaagccccattcatccccagggacgcttcctccccgccggcccgcggccgcagatgggctggcctgggcacgccatcctgcaacccgggcgcgcggcccggcctggcgcgcacagggctccgattcaggacgccggggctggccggggcgacccgggctgctttttcagcaggccccacaatgaggatcggctgaaactcgctttcatttctgggccggggacaggcagacactgagtcctttcagccgggaaatcctcagtttactcacggcttgttgagaacgaagatgtcaatttccactgccctctcccggcctcccccacccttgccccctcgggatggtacggtccgaagtttcccgagttgtgagaggactttgtttctcctctgcggcctctgaaatcccgacgaaagggtcatttcctgacttttgtgtctcttcaatccagtgccttgaaagttcttaccctcttgttgtgactgagtgcataattgcaaggctgctccctaactttttttcagagctttaacattcctctaggttcaagtttgggaccgtggcttcacaacaaagaccagttttttcctccccctcctcactcctgggaaaaaggaaaaaaggaaaagaaagaaaccaaaacgcgtttgttcagcaaccatgttcacagatttcgagcacacttcttctggccccacaggttagaccaacaacaggttaatgccacggagagctctaacgccaaatcaaaggactgcagtctcactttttcttaagtctcaggcagctgg

SEQ ID NO: 61482 - DNA, 2241 bp, Homo sapiens
ctatccaatcggtccgcctccgttcagagcagttcgtgccacagaagcatctcctgcgctatagttatgcaacctcactcgcagcgggagttatttcctccgttctggctgcgccagattcatgtaacacgcctaccctgggcttcaatggaagtcgttctccattaacaatcactccagctttccgagatgaatgccctgatagcataccccttgcgcagtaagaatccaggcagcgaggcgaggtgttaaaacacacatacattctcatattctctctctctctctctcacacacacacacacacacacacacacacacatacacttcgtgcatgcagctaggggactgcagcagtgcaaccagggggacagcaggaggagctctctttgcagtccctgcttctaacccccactaactaaagatgaactcatgccagttccattctttgctctgcaaagaaaacacacacacacacacacacacacacacacacacacacacacacacggcagaagagagtagcctccagatttcccctctgagcacactgtctttctagcctcttcgttcaagcaacccggatattccaagcagagtaacggggagtaacgcgccacaacaatgcaacctccctagcagctcccctcgcagctcccacccccgccccctttcgcggcgtgccaagagtttggagcgcgcgcacgcacaccgagcacggtgcagggaggatatccctccgcctccctccccctttctccgctaagtggctcgacaacgatttgggaaatgaagggaggagggaactactttcctgaaacttgctatgctgcacatgacttcgagttgcagtgattcgcccggaggccgcggcttttagtcctacccacacaccctcacagcctgggcaccccgctcggcagccccaccccgcgcccgctctggcctccggggaaagcgggcggccgggagaagtcgcgagggactacttcgcctccttctctcgcgggcgcccccggttcgggcagcggctgcggcggcggaaggagcgggcggcgtgagcgcttccgccgcccccctcgcggctcccctctctcgggcgtgaggagctggcccgctgagctgctggtgggcactggctggcggggaacctgcagccgctcttgtcctctcccgccgcttctcgggatcctgccccccggacccgggcccgcccgctcttctccggccgggtgggaacgatcggtttgcctgcccctcgcctcacacgctccccgccgccccctccacccccctgaggaggagtcccggctggagcgtgtctggaggaatccgccgccgcggggcccctagccctgctctgccggcgcctgaggaccgacccagacgccgccgggggttgaggggcagccggcggcgaggcgggagatggtggggtgggctccggcaggaccgcgccgccgctgcccggagcctgggctcggcacccccccgccggcccccaccgagcggagctctgcttcctcctcgccgcatccctgagggaagcgccgcctctgctcccgggttctccgcccgccgactccttcctggccggaccccgctgcgctccaccccagtggctggaggagcagctctccagtcagcctttgcagcccctctctttttccctttccaccgggcctcctcggatcccttggctgggcactgaggcgggggaagaggctggggtcgccacggcggaggttgctgccgccacccccctgcgggggtggccggggttcccggctgggggggtaccgttctgggtgaggcatccaccatggtgaggcccctgtgccgctgcccccgcgcccccccggccgccgctgcctcctgcccctcggtgctgctgttgctcccccgcctgctgttgctcctccatctccagatcggatcacggtgagggaaagatgagcgaggagacggcgacttctgacaacgagtaagcgcctcattgatctcgattgctaatccccctccccctatccgccctcggctctcccccagacccatccgaaacttgggtgccggaaagcttgcgaccctggagagttcggtgcatcttctggagatagctgatttctttagccatttttagtggcagcacccctccccatcctcccacatttagctgctttcttttggggtaggggattaagtgttgggagaggatggcaattgtacgtctatgagagggaa

SEQ ID NO: 61483 - DNA, 1147 bp, Homo sapiens
attaaaaaggtctggaatcggataggttgagatcaacccgataccacgatatttgctaaaatttatttgaacacacagaaaagtcccaacacagagaactctttattactattatttattatttctactattcttttaaaaaattattatcgttacacgcagcggttttaggcactatgaagtgtttattgcctcggggctgggaacctttgcgcccttcttcagctgtgctctcaggcagttaccggccagacccggaccggaaccttggcgcggtgacgctagtttccggcgggctacttagagcgccgaacagctctgggccaaaggaccatgagagggccggagccgggtccccaaccgacgatggagggagacgtgctggacacactggaggcgctggggtgagtgcttttggagacgccttttccctgaaaacgcaacctctccttggcctggctgcttagcctacttcccttgggcctctgtgggcctgggcggccatgtgtaggcctccttccctgcctcgatccctccggcgccgacggagttaagcgggaggcgggagagaaatctatttggggggtggagcagggccggagagctggggttcgtggccccctcttcgaaacttcttgcctcgaaactctgttgcaggaatccgccgggtggcgcggagcggcccttctagcaccggttttctgggctagctcgcgcccgcaggtgatatttgtgttgacgtagttctggcgcccggagggaggtgctggaacctgagctgctgttgaggactgttgtctcctacaatgtacaacttgtggcttacttggggctctggagcgaatggcttttactttgaccggagaaagtgttgtagttcattgcgagttcgttctttcaaccatttcgtccgttcgtcaacgtgtatattagcttgtatattaatttacacatatttacgtttgtaaatttcccctaggcaagggaaaaggatagtttttcagattactcttggcttacatagtcgcgcaggctgcaagtctgctgccggctggtatttacagtgcagaatggtaagtgctgtgagaactcagggtggaggtgggagtaatgttaatacttaacaagtgtggtggttcgtaatctc

SEQ ID NO: 61484 - DNA, 944 bp, Homo sapiens
gtcctttggctacaaactcaaagctgcctggccaagagccctttcactcactgtccctctttcttcaacttctgttatccaagaccctctatagaatcatagtgagggggagaggagtgcagcttcccatacggaaggcgatatgtttccctgacccacggatctggaaacttccgtggggcaggggcaaccgaggggtgccacctctgcgggctccctgcaagctcctcggccgttctgggcagggccgggaggggccaccaggtggcgcagccggagcccagcgccccagcaggtgcgggcagcgcggaaagtccgcgagtgggagtcccgatgccgggcgtggagatgtgggggaggaagtcggcgggcgggcgccggctccgcgaagagcttcggccctagcagatctcaccggacgagctctggcctcgcggccgcccctctaccacccctcagccccagctccctccccgaaaccccgggcgcagcgcgccgggcgttctggacacgtccgcccgtcgcgctggtgtcccgggactccggccgaccccggcccccctccgccctcaacttccctcggggtgttggggcgacgggcaggggcctctttcccaagaaaggacacaggcgctcccgagggccacggccgcctctactcaccgcggagcctctctcgccttgcccagggtgcccatggccgcggcccgcgctcccggtgccggctcacctagcgcggccgggcgcggcgcatcgcccccgccaccaccgccgccgcctgccggctctctcccccccgggcctcgtagccccggcgcccgccagccctcgagcccggcgagcccgaccgaggtgcaccgcaggcacaaactttgtgcgagcgcgccccctctgcctcgcgcgcgcgctcacacccgcctggcaaccacctgacacgctgatgc

SEQ ID NO: 61485 - DNA, 983 bp, Homo sapiens
tgaaaaaaattaaattttatcagaaaaacaattgttttattttataatcttttaccaaggaattttgctcacttcaaggatagataaatcttgagtctttggccttcctgctgttctctgtgagtctgatgggctgatgtctcactggagggttcagagctccttcagatcacatgttggtaaggatattgcccttcaaggctggaaggcaggatgagtcaacctgggaagtcgggccagtggcctcagaatacactgcttgtgtttaccctggaaagtgatatcatctgttgcagcatttgggtgtggtgttgaaaggtccagtcgtggcattgactttgttttctaaagaaaatcttcaggctctggggaagggtcgaagtctgaacaacaaagcccttgcccacatggtcggccctcttaagaaattccgaccacttatctttgatcttaagaatctccacaccttggctttgaatgagagagttaggtggctcacaatactgattatattactgggatatgctatttacttaggtcccttaaatcataccattattcttcgtcggcattagagtaaggaaacaatatttttatctcatttctcattttactaatgtgtatgggtattttcctcttcaatagactatttaagtggggggaaaagcagtgtttatagctagaatccacttctttgaacagtgctctcaaaataagcacattcagtggctgaaagttgatagtattgaatattctcaccatttctgtcaacactaaatgaacatcgggagatattattttggccagcagttactctgtgtgaataaacaacatgcaggctgtcatttggatgctgcctcccttgttcaagtagctataccctttctttatatctgtctctctctcctgaaacaagacttgattaagtgaataaaatttaattctggagactaggtttttaatgattaaaattacagaaattt

SEQ ID NO: 61486 - DNA, 1138 bp, Homo sapiens
aattcagtctgtggcagccagaattactaagctggtgtattttgactaaaacaggggaaagtttgcagcataagggaaagaaaagacagactaggtttggattactctgactggaatcagtgggagatggaaggttcaagtcctaaactggcattccctcacacttcatgccaggaccagccatcagataccactcatcgtcatgtgcagactggccctagagctggaaaatggccaccgaggtcacgagagggtggaaataatatttcactctgtctcagtgttacgacaccttgctggttatttaccttccagtcctttggaacccttaactagaagtagttgcaaagtcagccagccagcgagctaagtactgagccaagcatcactgaagaatttgtaagttgttttctctttcttatctaccaagtgctggtcagggtgagcctagcactgcatcttgaagcagggctcctctccattgtttaggttaaattacctgtcagtatttgaggaaatcaggggcacctcctaaaattggaggtggtgctcctgaatcccccatctttcctctgaaggtggtaccactttccatggctaagtgggaagcctgaggttttccttttttacttaaaagctttgcaaaggtgatagagagtctaggcacccaagggggatttcctactgtagggtatttctgtggtttcagagtcccaaatttaatagtggtggtttagggaatgctgattctcaagggcaaaaaggcaattgaaatgtggagccacttcctgttggtgagggaagggacactgtaggaggtaatgagctggtttgcataaaattgccttttaaacatcaggagattttattgatttaaataaaaagcctgagatccagttccaggattggttcagcaactcagtaataccaaaacactggtctttccattgctttgttcttccttcctcaggtgtggcacctcatgtgtgcaagatggctgctgctgcagtggcaagcaccatgtcttcactgacctgcacagaagcttaaattctgacttgcttgatggcatggcatgcatgcccaatgggaaaagccatttgattcatgtacaggttcatgaagggcatgattactg

SEQ ID NO: 61487 - DNA, 587 bp, Homo sapiens
aggcctggcaggaaaggcagggccatcactggggcagggtgggcggggtgggtagtgtttaggtacagaatcttaatgggccagtagatatgtctgcctgatgcctttagcaccacagcctgttagcctgacctgctggcacatggagttaaggccgcagaggctgaggaaagtgggtgttttcggagccccttccttcagcagtttcatccagtgtggatgctgatggacagctacaatccccagagccaagtgcacattcctgcaaaagataaacatttgtctatttgctcaactctgctctcactttgttaccatctaagccagatctatcatgccctcgatgcatttggcaggagggaaaacagatggtcatagacctggctaaacagttcctatttctgcagccctggcactagtaattctgggtctacttgcaattttgtgtaagacgctagataagaggcctaaagcccatcacctgccctggtctatgcactagcaataagcagatgttaccttgagtctggagtaacaaccagactcatttggcaattctggaggcaaattgcttgtcagaaacacaa

SEQ ID NO: 61488 - DNA, 289 bp, Homo sapiens
ttaatgaacccaatacaggagactcaggactggcacattttgagaggagaaaaaaggagtttcacatcttgaagttttgcccagagaaggccggcccatgtgggatgatgcaatgtgggacttggcttgttaggatcaacatggggacattggactccatgataaaaataataatgtagaagggtccagctcacagtaagcaactgaactttgcctgcctcacttaatttgttaagaccatctcaggctcttacgaccttgcccttggcgctgagcctgcagagtaatt

SEQ ID NO: 61489 - DNA, 617 bp, Homo sapiens
taaaaggaatgtgtggagtttgtggtttatgctgtattcatgccatggtaagaagagagaccctgtttattgctagaggagacatataaggaaaataaaagggggaaatatcatttaatagataaacagccatgcccaacttgacatttttctaaccccttcaaggacacacattcctgaaggtctgtgagtcagtacttagaatacatttggaagattaaccattaacttgccttagggaattttctgctatgctgacccatggaaacttaggcctttccaattctcattcattcataattaatttattccacacttactgaattctttgtatcagacactgttctaggttcagatgataatcagaggaaagccacaattctcaaagagttcatggtccagtcctgatgattaagcaaagaaacaggcaaaacagttttctgattacagatgagaaagatccaacttagtcacagtgtgggagttgggagaattcaggcagaacatcaggaaattctgggaggaagcagcccctgaattgggtcttcagggatgagtaagagttaggcagaagacgttaacattgttacatgtgcacagtgccaagataggcagtg

SEQ ID NO: 61490 - DNA, 2356 bp, Homo sapiens
attaacagatgaaggaacatattaagcaatttgcccaaaatcacaggcaagaatttgaaccctattagtctgactccagagcttgggtcttagcagcaccaaaggtaacagtacctatgtttaaaaggataaaattaggaatttattgaaaaatataagtggtcaagctgggatggaaaactagttttgttgttggtcttttttcattcccaagcaagaacatgttttactgcctatcccactgaattctagccaaagatttctctgtaatagaacaatagaataactttccaaaatatggtaagaatgcagatagactagcagtggagtaaattccctttctcaaagcaggcaaggagggtgcagaggggttaatcctgatgacccttgtcaagggaggacactcccagatatagcctaggccataaggcccaagtctcttctctttctgaaattctgctctatccccttttagcttgtgaacccaaaactggaaagctgcttggctctgtttcctcagtttttgttcttgacatagcaatccaacgttacttactcttcatttactctacacctaccccatccgtcctcaacagaccatgatatcagaccttggtttttaattcccctccctttcacttagtgctttaggaaagacattgttgacattggaccaaacctcactattattaactcagacctgagatacttcttctggtatataacattgtttaacagatttcaaatactccaaactggattttcttaaacctctaatgcagcagaatcatagagatctttaaaaatatggattctaaagaaaacatgaccttgaaatagacatatagttacaaaataggaaacaaaaagcgttaaatgagaatgcacatttcatgacaattactcgaacttacacatgtaattctgtgaacttttctgtgtgttatactttaaaaaaacaagtttaccttcaaaagtatatgtttctggggtttttctccaggcctcatgagtcagcaattcctgcattagagtccaggaaattttattgttaaattgtccttagtcattgagataagcaattagtttggcgaagtaccaaaactcctaggagagcaaatagtatgttaagaattctaaggccaggaggatgaggtttatttcccacacagagaatgattctggaaaacaattagattgggaaaatgtgcatttcactcctacaaagtcatgtgccactgcctggatgaacagagtatatatgtgatgcagccccctattttagtccactaagagccacctttcttctttcaactgcagcctatagctgtagagacaagagcagaactgcagaatgtcaccatttgagaggccctttacccacattcttgtcctgatgagtcactcactggttaaatacagtaggtaacctttgtgtgctgaatcccagcctctgaaatcatgcagcaggccaactcactacagtgaaaaacaagcctccccttcctccttctgtggtggcaataactcagttgtgggctacaggagatccttgcgtgccaagtgagcaagttatggggttcctggtaaagagaagttgcttgtttggatcaagttagatggatgtaaattttgaaaaggccaaacaaatgggtgatgctctcttgtttagcatttgtactaagttatcttcacaaagagctatacaaaggcttaaaataaaatcaaccagtctcaattcttccagcctgggagaaaagaaacgcccattaggacactgatctttaagatgctacctccttcagaaaagtggcaaaatgaccacaagatgtttgtgtactaaatgtgtactaaactgaatgtacactaaaccaaattcttgaaattccatccatttaccctttcacccatttccaaaattacacttccccagtctttccacctaatgagtggctccactattcaccatgataattaggtggaaaacctaggagtcatccttgcctcctcccttttctcatactcactatgcaatccatgaaaccattatgatcccttatctggtgtagttgatgctgttctgcactaccgcaatgtctccctttagaactaaagtacacattccatatgacttcagcagaagtactgaccggaagacatcagccattctgtcactgtccaccctacagctggtacaacaggtgtattaacagaatagccatggtcacaagagtggagcctatgcttgggcccatcagtatgagatttcacttaccaaagctcatttggttattactgccactaagttgttttttgtttggttgtttgtttcgtttttttttagatggagtcttgc

SEQ ID NO: 61491 - DNA, 997 bp, Homo sapiens
gtagagacagagatctcactatgttgcccaagctgatctcaaactcatgagctcaagtgatcctcccatcttggcccccaaagtgttgggattacaggcgtgagccactgctcctggccttgctactctttttattattcacaacctctagaaatagtataggagatccaagcactagtctcccgttgtcatggatacagaaagtggagaagagagcaggataagtggcttgtttgggactagacaaggctgtcactaaatgactcactacttcagccctttgctcctcttggcacctggaccagcaaaggcacacatattctgtaattgttttgttcctgccaaacctgttacaaggaataaacttagagcacccagaagtttagcaacatattatcatcttggaatgtgacattattaaaccctcctaatccccatgtctacaaaattaagaaatccagagcatgttttctaaatggaaatggaagcgtatacaggcttaatcacaaagagttaatttttaagcccttaaaattagagaaatgacaatgacaatataaattcttatttttaccacttctggggtgaagcttgtttggagaagctagcactggttagaaagaatagccatgtcagactgaggaaatcacagctctcacctgtagttactggcaaaacaaagtctggactttgtctctagtggcagaggttggaacttgatctcttagcttctagtcagttctattgccaccaaacaaggaataagcaagatttccttctctggattgcctttgggattgactatctgttcatcctgtttagtgagtctcctctataaggagtcttcagggttccaggcactctgagggctgtttctcactccagggcccctctactggagggcacaaactgtgggccacatacaaggtacagccacaccccagggtgctgtcagagtccagcactcacaagtttacaatggttacccacttggttt

SEQ ID NO: 61492 - DNA, 445 bp, Homo sapiens
aattatagcaaaggaattgtcaagtttgaaatgcagtctgatgcccttgaaaataatgagaatataattagaaaatagtacataaaattcacgggtctcagaagatcagctacagaaggatcacgtcatcctaggcagagtgtctcaaatgtgtctttcaaattgttgcccctgaagaagttcagtgatgtatccaaggtcacatacatggatttctgcctaagtgaaccttcttcctgttttcctgggcaccgtgtctgagaactgactgtctgactcattcttttctaagccctagagggacaaggttatgcaattctccacaggtattttggcagcttcttaggatatttgactcaggcctcatctccactcttctcttaggagagaatacgcacattctataagggacattagaccaccagagaagatggttactcccaca

SEQ ID NO: 61493 - DNA, 1320 bp, Homo sapiens
aagcaaacaaacaatatgcccctccaattaaaagaaaattctaaaatggaattgccaaaattctggatgagacattcttcccttttacctctctcatgccgggaaattctttctgcttgctaacccccgaataccatccgcgattagaaatagaggagaactccatcgagcactgtgtttcaggttctcaacaaatatctggggctctcagactgcctgccaggcaccttgctaggcaccagatccataaaactggttctcacttctctacccatttctccttaaaaagaaaaaaactcaaaagttggtttgtggaggtttggggtccaacaactatttatgcaaaatatttgccgattttcaccagctttctatccatggcctaaaggaagctgaaacagcttagaggctgaagaaatgaaccacagagcttgaaacagaggcaatcaagtcatctcaaacagcgggactaggaaatctaagtcaagtctgaagagaaaggtagtgaaagacttaccatttttctttttctttttcaaaagaagtcaatggccattcagtgtttaaatgagaacaaagactacaggggggaaaaattaaggtaaatatttgtaataatgtgtcattgcattttacataatgggccagcagtctttgaaatgtgacgacatccatatctacagttttatttgttttttcttatttgctctcctgaggcaagtctcttttaggctgtcagccaccaaagcagctagcaaatacaaggacactgaaaggcattctgccaacacgacctcagaagtatttacagactgcaatggagaccatgatataattcagtttctgcatggctatactctttgccaattaatattctaatgtatcctttgaggatgtggtaaatgttggtttaagataaaacagcaaagacaaatattagtgtgccacataaaggtattacttgccatgagagcactgtttcttagtacagactacctggattgcacaaccagagattctggtctcactggaccagagtgtacagcctgggtaccaggattttcaaatagcctcgtccacctagtgattctaataagcagctatgattgagaaacactgtactcgtcaattaccagaatgttttgtattctatttggaacacaactaaaatttgacctgatgaactcgtgcaaaatattaaaagctgaacctgcagaggccagatgcagtggctcatgcctgtaatcttaccacgttgggaggctgagtcaggcagatcgcttgaacccaggggttcaagaccagcctaggctacatggt

SEQ ID NO: 61494 - DNA, 773 bp, Homo sapiens
agctacttgggagactgaatcaggagaatcgcttgaacccaggaggcagaggttgcactgaaccaagatcgcgccactgcactccagcctgggtgacagagcaagactctgtctcaaaacaaaacaaaaaaagagttaaaatttggagggaatcagagactttgaaatcagaggacgaaattccaggcattccaggcacagaggctacctgagcaaaggttctaacgtgggaaatgctgagggcatttggggacaggaagtcgtcctgttttaatgaagttcgcacgggaaggataaggagaggaaaatggtggatgtgaaagataagaagcaagttaaatagagtccttcgtcaggatggttggttctagaaccgcaggtaggagtggcctccccggctctcacctgtcttctcctaccgctgagggatgaccctgcaaaccaaaacaccagctctcaatcacttgtagaaaatcaacaccacaactgagagggacacagctctccaaggcctcaggagacagcgccagagggagccctctcctcgggttaaacagtttgaaagcagtaacaaaattagccaaagagttcaaatgatggcaggctcgggggccttggggccagcacagcaccagagtcctcgataccaatagaccacattgcttctttgagcctttgctgggatgcaagcagtcgaaagaattgagctgagaaaccgtgagatcctcagcttggtaggtggaagcattcctggctgcatctgttagccccag

SEQ ID NO: 61495 - DNA, 3606 bp, Homo sapiens
ttggtgtgttatctgtacacagacactcacggcaaaagaaattactcactcgtggaaagagatgccaaacccttaattcaaaaacaccaaatgagtaattctcaaagcatatttttctccttcaaccaggacattttaattatcttgaagtaaacaagaagcctcacaagggttactcaaattgttctttcaaaattttccctcccctatacctaaggatttccacctgccctaaagttcttcatgaagcgagcctttgtttaccacccatgtgataaaaagcccataaaaatggggaggtaaactttgcatccatttctagtcccaaattggcctgaggactaaagagagcccagaaataagcaatgacccatctctttggctaagtgtgcactgacttggcccaaatggtcaggcttcctgcctgtagctacatagttagttgtgataaggagcaaagaaaaccaaacagcttcaaggactaaagcatactttctactgaatgatttgtgctgttagtgttgcagtctgataagcaaaacacatttcccttgccagtggaggcctattaccagagcagaggcacagggagctgaaaacatttcacacacagtagcaaggaggaaagacctgtaggtgggtggtttcaaacacgcatctagcctaactccgaactacagctgccaacaaaaggcttttacctcccctcagtgagtgatgatacagtcgagtcaccatagagccactgctgctaggaagtggctgagtactagaaaccagtcacagactgtttaccaaccagacaagtagaactgagaatataatctttgtaccatacataattctctctaatgagccaatgccctgaggttaaatagaatttactcaacccaattaaactggccagggtcaggggatcattaggaatttgggcccttcatatttcagcaatgaatcataaatcatttaaagtttcatttataaggatgaaattcttcaatcaaagggttaacatttttacttgtagaaactttcaggttacctctcaatattttttttactctttatttttctcttctctgggatttaaaaaatataatttggagctttcttccagatctctcagctgctcttttcatttttaaacctctttatctgctatcccagtcattcctttagttttatcttcagttcataattttcccttccactgtgtcaaccagcgatgggacaagggtaagacaagcaaggtactcagagtgtacaatgtaagaagtcactcactcttgggcatgcgctagttcagggttggcagcgacagtgagtgccttcttacattttgcaccctggataccttccttgcctcaccctagactggcccagatgtctagtctacagttcaccttatcacttgcaatttctatttcaatgactacacttttcacttccaaggtttctatattttaatccctatctattcttaagaattctttgttccccttccctcttttacttatttgatgattcaagaatccttattttaacatttaatattgcaccattatgtctggttcttcatgcatggactccacagattcttgggtctgttgactatcctcatgccagaaaatattcttgtgtgctttgtaatttttcttgaaagcttaccttgtttgggagggaatttgtttgttttgtttctttttggtagactcctctccctgtcaagtagcttttgggttggttgccttactctggtagtactccaggtttgtgtccccaagccaagatgtagtgtcttattcccagccaaagctcatagtgtcacattgaggctgatggctgcatgcggcagggcctggctccaattcctgtgcagatgtctcttctctctcccagaaccacaagcaatcaggtccaatgatcagtagttagtggagttttttcatgttcaatttactgttagaagctgtgaatactgatttcggctttctctgagaagtccatcacacgtgttctgccttttgtggaataagcaatgccttcatcagcaaatggtcttagaagctgtctccaatatttttgtgtctctgtgtgtgtgtgtgtgtgtgtgtgtgtgtgtgtgtgtgtatacgcttagtatatgtgtatatatatgtcctgtgtgtgtatacacatttagtatgtgtgtgtggatatgttctgtgtgtttcttatgagctaattgcctttagcctctgttcactactataggtttctgttccagatcatgaattaatgaataaaattagaattcaggagtccagtagataagcagggcaaagagaaagttctttcctacagcagaattccacctaaaaactatagaaggatggcagggttgaaagatcattcatagatgctaaacccagcagataacgttttatgagaaacaggatatttacacagcatccaagtatttcccccacaaattacttattaattaccaggggaagatagtaactttgcagtggagaaaactggcagacaccacctaaagcacatgatcaaagtcaacatcaccagtaatgggacacactgacatcatgtgtgtcccgatgtgccaagaaagacataacatcattttaatggcattttcaccaaaaatgtataacctgaatctaatccagacaaaatgctagacaaaaccaaattgagaagcattctacagaatactctgtactcttttaaaatgtcaagatcaagaaagactgaggaaatattctacaataaaagagactaaagagacacaacaactaactgccctatgtatcctggattgaaacctggctgagaaaaagtagctataaagagcattattgggacaattgacagaatttgaatatggactgtgggttaaataataatactatgtcaatactatgcccatgttcaatttcttgattctgatatttgtattttggttatgtaagaagcagcccttgttcttagaaaataaatactgaaatatttaggggaaagtacactatgtctccaacttactctcaagtgatacagacaaattagagggtaaacatcggctcttaggggatagaaatttcttagatacaatggtttgtggctccccaaaaggccacactacacaaacagatacacgatatgtctgtggtcttaaacttccatggggtaattagggaaaaaaaggtctaaaatgcctccttgagggaacaataatgaaaaaaaaagattgaaaaacacatgcagagaaagagaacaaaatcaaatgaaatggtgataacctggggggaggaagagtatataggaatttcctcttttaagtttgacatttttcaaattaaaaaggtacaagaaaattaaaaactaacccctaaaagttaaaaagttgctacactattatgcaagattaggagctcaatattatttagaagcaaagcatcaacagaaaaacatactagccaaggaaacatccacatagtcatgtacatgtttttcattgttgcttctctagaacacattatgcgtgtgtgtgtgtatgtgtgtgtctgtcattcatgtggctttgtgactcatgtatgctgggtcctc

SEQ ID NO: 61496 - DNA, 2286 bp, Homo sapiens
aattgcctctcagtggcaatccagacctctgtttctaatttccttctgtgctgaaaagtaaataggcctaaccacattttcaagcccctgtgcgtgggtcttttgtgcttatagcagaccactatccactggaagacgtctgggccactgccaagttgagtattcaatttctttgttgtttttcaggataacctagctaaccgcaatccctttccaccattcctctgcaatgtgcttgaaatagagccaagactctatcctacaaaatgcacaagaaaaacaaaaaaggaggaaataaataaagaaggggtcatggaaaaaatcagagtttgtgaatattgccccatacgtattttcttttcacatttttctctcatgacttctcaaaaacattcagaccccaaatgcctggtcatattcaggaataactccaatggcttcccattctctcctccccacccaagaagattataggattataaacatgaggtaaattcctgggatcctattccttggggcatatgcgcaagcttttggctttgggaggtggggtgtggggtggcaaatgcctaaaaggttttggatgactatccaaagagaaacagatggctttagcacgcctgtgcccaacacatgatctgtgtgactcctgccctctcaacaccatctccgtgccgccccctttctcccacaccccagacaaataagaacaaaaatgagtctctgcacattcaaaaggtgaactttcaaggacaagtcttcccatatggaaaggataatggcatcatgccagagcacgtgcagtaaagaagggctcagggtgtttcacattttctcttccaatgggttccaaacgttctgatggacaatcttattcttcccctataaactttctgctccatatcccgctatagctgttaatacacttttcaattttcctcaggtccccaaatagtgggaacagcacgaacatcggcatgaaggcaagaaaataggaggcatgtactggggagagcaaatagttcagttggagaaagggcacatgaggagcagtagcagcaaataagaatgaccaggagtttgggatcagacacgtgggaccatgagtaccaggtcaaaagttcaaactttatttgatgatgaagcaacattaaacactaaaggtcaagtttcaggaatgtaactaattcagaagaaacacaatgacacataaaaaaagaaatagagccaaacacaaaaattagcaaaatatgaatgcttcacctcagcgatggattcttatgactgaacactgggagccagacattaaaggacaaacgggaagcctatctaaatcactatctgacagaaagaagctcatttattcttgaaaagagaacaaacatcctaggagaaatcatgtggactcttttaagtgccattaaatgacacaatgggaaaaatcttcaacaatatttttatcacaaacagagaggcaaagtcacatggttgcacagctctctctcatactgacatttaatacaggctccaagcaggaaagtatcatctaagaagacagctaatgtgattcattgatgtggatttctgatctttcctgatcatcaggaaatgatgaacttgagacacctggaagaatgaatatcatacttctattaaatgtcacttctgttggccagtcactaaggaaagcagataaattgctgtttctccacctgttgaaagtttcaaattgagtagtgtacattattaaacaaacatctctggttttagatagggtgaccatatataggttggtacttccctggtttatgcctcctgccccagaataattaggagcagcccctcctttctatccaaaactaccccagtttcggtgataacttatatgatcaccctagttctaaatatctgcccaagtagaagttgccacactattatgcaagtttaggagctcaattatcttttaacttagaatacaacccaccttcacaagcaatatctaacttgatgactactgaaagatttgctgaggctaaactcactggtgtatcatctcttggagcactaccctttgtcttactggacactgtgttctcatccctagcacaggcccatcgtatcacaagcatttgactgaattatttggttattgatgggcataacctgtgacatagctgtctcttcttggacaactactgataccaccatcatgtaagataaattgttacataaattaacagcttagatgctttttcctcattttttcctaaaaaggattttaaaatg

SEQ ID NO: 61497 - DNA, 2681 bp, Homo sapiens
atctgcttggatgaatcattacctatgatttgcgggacaagaatctgattttattcatcaaccagtagaaacttttctttctgcctcccaacatctgaaatccaacaaacatgtgccttaggaacataccggtcatcttttagaggcattttatatacatattgagtaactagaaaacactctttccgtaatacacacacacacacacacacacacacaccatcttgtcatacaacactcccacgcaagaaaagcgaaactgctgtttgatgaatgtaaacacttggctgtttgcagcagtcgggagtcctgccaggtttaagtgctaagatgggaggtgaaccccaggggtttccccctgcccgtgctgagatccttatttggtcaagcttctacctatgccctggcctcggagcgagcccgatagcgctggatcacagcagagggagcgaggcggctgacgtcccatcccgaagagatgaatggaattccaggaagctagagtcatgctggcttgggacagtggcttggagaccagacttcaatgacagaagcactaggcagcggcactcatggcaatgtgtgcacccacagaaatgtaacccacacctcgggttcaggagccgaaaaatgaaaagaacgtttagggaggaaaaagggaaatacaataataggcagagagtaatttattactctatgggtctgctctgtaaatagctgaagactctggagccagatggttctgcaaattctccaaacaggagtcacgttaagaagcacgagtgggcacaaaaactgtttttcaagacacaatttcaatttggcttgtggaaactggatacgagtaagtttccttaaaattcgagtagaaagcagctgtcctccccgggccccttgatgagaatacgcacaccgcccccaagcggccggccgagggagcgccgcggcagcgggagaggcgtctctgtgggccccctggcagccgcggcaggaaagggcccgaaggcagcgaaggcgaacgcggcgcaccaacctgccggccccgccgacgccgcgctcacctccctccggggcgggcgtggggccagctcaggacaggcgctcgggggacgcgtgtcctcaccccacggggacggtggaggagagtcagcgagggcccgaggggcaggtactttaacgaatggctctcttggtgtcccctgcgccccgtcggcccatttttctttttacaaaacgggcccagtctctagtatccacctctcgccatcaaccaggcattccgggagatcagctcgcccgaaagcccctgcgccaccccgcgggccctcctaggtggtctccccagccccgtcccttttcgggatgcttgctgatcaccccgagcccgcgtggcgcaagagtacgagcgccgagcccgtgcgcgccaaggctgcgtgggcgggcaccgacttttctgagaagttctagtgctcccaagccccgacccccgcccccttcactttctagctggaaagttgcgcgccaggcagcggggggcggagagaggagcccagactggcccccacctcccgcttcctgcccggccgccgcccattggccggaggaatccccaggaatgcgagcgcccctttaaaagcgcgcggctcctccgccttgccagccgctgcgcccgagctggcctgcgagttcagggctcctgtcgctctccaggagcaacctctactccggacgcacaggcattccccgcgcccctccagccctcgccgccctcgccaccgctcccggccgccgcgctccggtacacacaggtaagtcgcccccggcggccgccgaggaccaaagctgcccgggacatccacctggagcgctgaggcttcagtccctctggtggaccccggaacctacactctccccgctcgcctaccccagcccgctcctctcagccgctggaggactcttcagggcaaggctccagagccatcctctccagccttgaggttcacaaaccaactcatcaggacaccccaagatttccttactctctgaagtcctccttaagcctttgtatcagcactccagggaagagtctgtacttcccctgccctccctgcaaccccaaactacagttcctgatcttgctcaccttcgacttcccaaaagcccccaaattgttggtcttgcgccccccacactttaaaaccagcatctctttcctccacctctctctctctctctctctctctctctcatgctctctggaaagtaatcctgttgtccttcatttcagcaaacgcggggtcaaagagggatggtcccggccctgtccccatgcccagccccgtttctgcgcaccgtccctccctgcctagctgatctctgaccctcggctcttgtgcttcctgctacaggatccctgctgggcaccaacagctccaccatggggctggcctggggactaggcgtcctgttcctgatgcatgtgtgtggcaccaaccgcattccaggtgagtttgtgtggcacctttaggggaaggagggacaaggaagaggtgctggctatcccaggtgtgccccctcacgtgctgtcctctccctcttgagcctgactggacatcaggacgcagcttcactctgatcctggtatttattcacctctttcagtggttgccaggagttttcac

SEQ ID NO: 61498 - DNA, 1054 bp, Homo sapiens
accgagctccgccctcatctgcgcggcccctcaccttcccgccgggcctcctcgaggaactggccgccgtcagtcagggcgcagatggccgcagaagcgcgccgcagacactcgccgcgccagccacttacccccagaggagaggggtctctcccgccacctcagcctctctggtagtggaagaagccgccggtccagatccctcctgcctgtgggaccgctgtttccctggcaaccagatgcgcgatgcttccggtctcgcgatagcggaaagggctgtaccatccggaaatgggaccggggccggcggctgttggagccctgcgagctgggacggccggcgtgtgtccttccgtcttcgctgccgacggtgggggttgggagcgatttttcgtctttaggttggattcggaacgcggacgtctggatgcttgtgtatctctgtccctcatattgctgtgatgccttacaggtcagttatcctctccgagcacagtttcctcctccgtaaaatgggaacaataataattcccttcttacaagacttgtgcagctcaaaaagaccatgtatgtgaagctctagtaaatttggggtgctatggaaattttaaaaatatgagttttgcacagattcggctacagtccaaaaagagttataattgctttttgcaccttctttcatttcgtagtttctctaattctcagtgcacgaaaattatttccctacgtccacaaactgattttcctcacctccattgccatcatttctcctgctttccagtctgaacagcacattaccgtttacagggcattttcacattcatggcccctttgtcctcattgttttaactaggtacgatgtggttttttttcagcgaagcaaatagtcgtaggctgagttgccgaaagaacacagctgcagtctaggcgagtgctgggtataaaaacctggctataaatgccatccctatgctcctgaatcctgcatcttatcaccagcccagacttccctgaactccagactcctttacctaactgcctatttggcatatcc

SEQ ID NO: 61499 - DNA, 620 bp, Homo sapiens
gtagaggtgaggtctccctatgttgcccaggcttaatgctattattattgaaagtaaaatacatgttaagtatatgtttcatatgtgcttagtaccttattttagtacattttttagaacttaaaagctgtgaaataaacccgattcaaatgggttgtcagattttgttgttgagaaggatcagttcaggtgttatttaaaatattgattctagtccctattacatgattcagtgggtctggaatgcagaccaggaatctgcatttttaacaagtcccttggtgcttgtggtacagatgaaccactgacttcaagttaatgttttagagggtaaatagtggtgaggacattgctcctggaggcaccatggagccccctgcagctgttctacacggaggctgtgaacagtgacatccagcacttcctttgtaaacagcaggctagagactgaaaaatgctctccctgtagaactctttccctcctctccctgtctgctgtggagtgctgcacagaattagctgctggtcagtggatgtctccattttttaaaagatcaagcttacaacttctcaatgcctattggtccaaaaacagtgatgactttaggtttgttttcagt

SEQ ID NO: 61500 - DNA, 647 bp, Homo sapiens
ggggaccagctgaaggggaacattccaggctgaaagagatgggatgcaaacacaatagcgaccatggacaatcagggaaggagggagcatggtaagatatgttctagatttctttctgggaggagggaaaaagagaaagaagtgcataagtgatgcatgctttcacatttttttttctctgaatgtagatagttttgtaatgacaactcagtaaatatgtgatggccccacctgtacacatgaatagatgcttaggagttcactggctctgactgccatttgctcactgacatgtaacaaacccaggcttccattaatttccaatcccgttacatgttgggaaacagattgcaacataagcacacaggctcactataaataatgttcttagtgtgtacacctctaaacagtgatgcaagaagtgtagatgacctcccgatgaacttgctgacttagtaccatgaaatgaatagctatgaaggaagtgagagaaaagactgtcttctcttcttcaggtgtacatgtggatgcttgtaagtaatttgcatctgtgaataacaaaataggaattcaccagccctgttttcctactaaaaggacttgttttactttttaaaattatgataaatttacaatagcttttctgc

SEQ ID NO: 61501 - DNA, 510 bp, Homo sapiens
ctctgccagctggaggggccgccaacagggattgccaaggggtcaaagaatcagcatcactggctgagagagcagctttaccagcagagatcaaaggtgccagacgtggtttcttttgattcactcagggagcaggacaagtaatcagaaaagtgtgattttcctctgctccaataaaataaaaaaacctgccgttgttataaagcaccaagagaatcaataagagtttcaggagacattggcacacctcacaggcaaagccctggaaacaaactactgctttcaccacagtgtgaacttcagggcagaggctctttggcttggatgagtttacagtacagcaaaactgtcctccccgtcacagtgtatgtggaacggtatgtccatgctggagtagctggaatgtaagtagatttagtgtgctaacattagaaagaatgatactactagccagaatttagtgaatacttattgtctaagtatgcgtatcatgtgatatttgcaagaact

SEQ ID NO: 61502 - DNA, 1066 bp, Homo sapiens
tatgaatgaattaacaatggtgtgaatacatgcttttcattagtggatgagaggatgggcaatgcaaagaatgtagacagaggatttttaaataaatgtttcaagtcctggtaaaggccggggttcaggctgatgagcttcaggctatccttagccaagaaacagcttctctagcatcatcgatgctgggaaaaagcacattcctcccctgcccagggcactggaagtgcataccctttgtgcattctccatgtctcctgcaaaggagaacagaagcaaggctgactgctttcagtttctaggggagttcaatggccttcttgcatcatacacagtgtcaatggcaaatattcccaatcatgtgttttttcctccagcttctactccctctgttagctgtaattttagagtgtctgttgagaaaatgccttagtttataatcatttttaagtcatcgactatacatcccatgattggctaaatcagggaaataaaagagacctgaaggctcataacacaggcttaccctagtatggataggagaagctaacttagacctgcttgccgatgaggattttaggctgacgctactccgagtcatgaagagcctgattgactttgctcttctgtgagtacttacattctggtttttacaactttcccgatactgatacctacctgaaaatgaaacgtaagttccattctcaattaatatggtgctgggcgccttggaatgcccactcactggctccatttgggaaggtggtaccaggtggaaagcctaaaagaattagcatcaattactctgaagaagagaaacactactaatggaggttctgagatagtactgactgcaagccctctgttcataccaactataaatccctgaaatatcctaagagtccaatgtctcaccaagctgattgactaaacaatctagagttaacaaactctagatggaaagcctccaaacaccctacttatctaagagaaaaaagccacacaatatgacagctagcaaagtttatcaaccatgacataacgtaaacatggcagatctttttag

SEQ ID NO: 61503 - DNA, 446 bp, Homo sapiens
ccacataagaaatatatttgtgccctttttaaaagccaggatggcctccaaagcaaatcagggagtaagaaggaaaaatggaaatgcaaaataaaaacaaatccatcccccacctccttgctctaccccattaactgaatcacctggaggtctccaaagtaaattagagacaagtcttccaattaattaagtgtagcacaattatcacaggacttgataattacaacacacctgctctcacaggcactgagggcagtcccctggtctagattgcttcatctaggtatgaagcaatctttatttcagaatctttatttctgaataaagatttatcataggaattttgtaatcacacaatgtccttttttgttgctatgcatatatcttctggatcttgttatatgtaagaaaaatagaaaataatagattgctgattccatttgctt

SEQ ID NO: 61504 - DNA, 3330 bp, Homo sapiens
gggggaaaacctgcagaaataaaaatacagtcacttctactacctctccaataacccacactttaagtgtgacaatactcagaatttaactcccaataacctacaatgcatcatgaatacctaaagtattttgaacataggcttttgctttgctaatgtgcatttaacatcccagtcataaaaacacatcttaaaacacacacacacacacacacccctagatatagcaatagtagtatctactcctgaaaatatcctcgtaacaaaaaaatcgaagagaaatactatgatagagtaaaatggaatgatgacaattagagaaagtatgaagggaaattccaaacatctgaaattcttctaaaaatagtctattaaatgtcagttatcttggtttccatagaaattcacaagtgtctacaaaaagtaacctattcctactttgaaactttacgactgttcttgccaataacaccacatccttataaacgccatatcggggacacaggaaaggaagccacatatatccaagtggtatgcagtatgttcaacagaccttaatagaaatgaatattgcttgtatcatttaacgtttgaagaggagcgataaagactattatcatttaagagtagtgagaagtacaggtaattctcacactagtaggctaatattttactagccactcattttaattcgttgatcttttcttccctgaacaagtatacctaaatctgggatgtgtgtgtgtgtgttttatcctacctttattctgtaccttaaacaacacatagatggggaagtagagtgggtttggttttgttttttttaaataatcgacaggcgacatacagtttaacttcacagggttgtttaccagcaggttggtgttccgaagaagcacgcagtaaaacacgcacaaaataagggtctatcaaaataattgtatatattattatttcgagatatatatggaaagatgggatcgcaaaacatctttaacagaatgggtaacattccgttcaattatcagtaacaaattcccacagaatctttattcctcgctatttgtaaacaagagctgaagccagccgggcacccaggagcattccgccggggccatctgaggagggggactcccgcctggatcccgctccatcctcgggccacgagaaagccctatttgaactcttctgctcccgcgtgggggctggagtccaccgtccctgcttaactacactgcagctacccgggatccttaagcttccttcaactctctgcactttgccaggcacccgaaacccacggcggctgggcggccctgctcccggctctccgagcctgtaccctcggggaggcccggtccggaggcgccccgcgggaggcttaccgagcagcgagcctatgaagatgacgacctgcacggtggtggtgaactggcggtacagctgcgcctcgccgaactccccgagcgcgctgcggttcacacccgcagcctcggcgccggacgcgttgtgcggctcgctggcatttggagagatccagctcccgttatgtcccatggcgaggctgggactccggctccgcgcgccgcccgcctcggagccccgcgcggagcctctcctcctccgggtgaggagggacgcgcgggcgcctggcggagtcctggagaagccggagcagccgacgggtcccctcacgtctccacatcgccaaccccggcgcccgggaggcggggagggagggaggcgcggctgcgccccatgcccactccctcctggatcccagtcagcagccacaagaaggcggcacggtcagagcccgccgagcgtcgtccgtccctcctccagggtggtcagcgtggcccagcccactcgacaggaatggaaacacagaaggaggcattcgatggtcaaggagggcgctctccgctcccgctgcctccttcaaccgcgggtcctccgcccctcgagggctagggcatccctctccagtcccctcgggctgacgcactcgacccctctccttagcgggaggagaacgtttggccgaagctatttttcagtcctgttggcttcgaggctggatggcgatgtgaagccaacgtaatgcccacgccgagtggccggagccacgaggggacccccgagtgcccgacagcgcccatggcttgggtggaaagccctgagcgtccccagcagcctggccctgcgcccggccgcctgccaagacgcccgtgctgggtcctgcttcccagcccctcacttgtggctccgacctcctgcctcagcactggcgacggggaccccgttccgcagcgcctttttgcctctgcatggctgggcgccccctttcttagcccccctcggtccctcggccgctagaacacagcttgacagccgggcggggacgaaggaggacgcccccagtggggcagtggcaccgtctgcgcggccgccagactcggtgcgcgcctggggcagccgggggcgcgcggctggcgaggatggtcacgtggcacgcgcgaccccgcccctcgcgcccaggctgccgcggggagggcgccatcttggccccgcggagcgtgactgtctcggctggaagcgtgggaggccggaggatcagtgactggctgtcgtggacatgctcgctacacctcccggggcttcgcttcgtttactattaactgtcgttactcctctgtatctcgtcagcaggggctgcctgcggtgttagaattacacgcccctgccacctgggcacggagcccagtctcccggcccctcagtcagtccttgggtgtagctggagcatttaagaaaaatgaaatataggaactcagtgcatggtttcctgggcctttttattgaatatcatttctaacatgtacacagtataacccaggcttagtggattccgggacagaaaatgttgggagctgggatagtcaagtaaacaagaagaaatggtaaagagatgccaagtgggagaggaaactacggatgcagagagaggatctgggataaagagaacaaagatgcgtggtcgactttatggaaactcgtttctttttaataagtgaggtacatggtagaagactttgacatgttgattatgtgactgggaccaaggacaacaactcgagaattgattaaaactacagttattccttggttgccccaaggatgatcctggtacaatatggctatttccttttcactggtaatccttatttactcttgaaagggtaaaaatccgtgtcttgtacatatttggagtttcacaataccttcacatagtaatctatgtgagaattattttaaacattttggaga

SEQ ID NO: 61505 - DNA, 2172 bp, Homo sapiens
ggccagaaatgagtggatagatggcagcaaggaatttacacaatcattatttagtgaacagtggaggagtaagcaaggtagacagaagaaacgtcacttaaacctaacttgggttagtacaataggattattcgaaatggacatgcagcattagtaagttactgaagatgaagtgcaataacaatgtctgggtagacaggttattattttataaacttgaaaaacgacgacttgaggcaggatataacacaaagactccctaaattcacactgagtgaactgggaagggaacatgattctcttcatgggaaggtagctcataaagatgcctgagtggaaagacagttttcaattgaatttgcaaggtggtagtggagatccccaaagctggggaatgtagagacagagaacataatgagggtgttgaatctgtggctcagagaataagtttgggggtactaaagtgggaggaaggagggtggggggggtcacaatttttactcccggtagtcttgttctgggaaggtacaaggtgaaattagaagtgacctcagaacccatcgacgtctgccctttaagagtttcccggccgggcgcggtggctcatgcctgtaatcccagcactttggaaggccgaggcgggcggatcacaaggtcaggagatcgagaacatcttggccaacatggtgaaacaccatctctactaaaaatagaaaaattagccgggcgtggtggtgcgcgcctgtagtcccagctactctggaggctgacgcaggagaatcgcgtgaacccggcaggcggaagttgcagtgagccgagatcgcgccactgcactccagcctggggaacaagagccgaaactctgccaaaaaaaagaaaaaagagtttcccgcactagccatgccagggtggagaagttccagcaagcacttctgttaaagatacttgtttcgtgaaaactatacaatgtggcgttttcattcctatctgtgattcatttcttaagttcgtggagttcctttgctccccttcccccagcaggatgtgggcaaagctgtccccctgccttcttccttcgcctgggcttctggagcctccggagctagctcccggcgcggagctccgcctacggcccgtccccggcgcggaaccccgcccacgagcccgtttccagcgtggaacaccgcccatagcccgtccccagcgcggagccccgccccgcaggctgccgggggcccaccgccgcccaggcaaggccgccctgccttgggcgcagcgctgccatggctgggggccgtggggcccccgggcgcggccgggacgagcctccggagagctacccgcaacgacaggaccacgagctacaggccctggaggccatttacggcgcggacttccaagacctgcggccggacgcttgcggaccggtaggaacgtggcttgtcaggcccgggctggcgtgccctggcctccccgggccctgggccaaagcccggacacttccagattgggccgccgctttaggatcctgcagtcttttcatcccttaggttccacccatgctcactttagtccttgcacctgcagctggtctgcagaatcccacctaggccgaattcttctacagtcctttccccatgatttccccagaggaatccccctggattcctccctcttacctggcactgcttcttattcctgcctacatcccataacataactgcctccttccaaccttgtcctttttcccctctgaaagcccttgcggatgataccacagcaattcatacgcgccccttgctactttgttctgagaacgctttttgggctctcgcacaggccttacgtcctcaatcagaattctcaagtctcatccatgcattcaaatctgcacgccacataattccctctgtactccccaggcatcctcactgtgttttccggtatggaggaactttccatacctctgcaccttcctctaagacatttagctcagaataaagcacacattcatcttagctgtagtagagagagggttctagactgagtctagagaaggagtgtccaatcttttggcttccctgggccacacacaaaatacactaacactaaggatagctgatgacctaaaagaaaaaaaaaattcgcaaaaaaacctcaatgttttaagaa

SEQ ID NO: 61506 - DNA, 1180 bp, Homo sapiens
gcatgaccacggctcactgcagcttattctcaagcaatccttctgcctcagcctgtcaagtacctgggactacaggcacatgccactacacctggttaatttttttaattttttgtagagacagagtcttgctctgttgcccgggctggtatcaagttcctgagctcatgcaatcctctcaccttggcctctgaaagtgctgggattacaggtgtgggccaccgcgcctggcctcttcatctgcttttaactttggcatttcacaacatctgctctatctacacatccaggatttcctcaagaaataccatcttctggagctatcaggacaaaatattctctctcaaactcagggtgcttcttccttcattaaatatttgttttaggcattaggaatacagctgtgggcaaaacagacaaaaatccttgccctcagggagcttacttttctaatgcttaataatatgaagttatttttaacctgaaatggtaaaaatataaattattccccttaacatgacagagaagttggtgactggggaacttctatcttcccaaaccttgagaatcaggaagtaggcccaagaagcagccaaaataggtgtctcaaagtgtacatgggactcaacacaaagctcctaaggcttcattctgaactagtttgtttactttatacaagcttagttgtctgctcctagggctgcagaaaaatggaagagaaaaagcaacttcttttaggtagggatattgataacctcaagaatttatagctggtggctttcataacaagatggaatactagacaaaccaaagcaaaaactatagaaggcaggcagaagaatttaaatagctgtctgtggcctattgtacaccgggcaaatggcctcaacacattcataggactggcaggcaaataattgatggtctcaaggatgaatcagagtttagtcattcaacaagcacttattatcacctgctatttgccagggaaaagtgatgcaggtccaaaatcctttatccaaaactctttattgagagggagtttctctctgtcgcccgggctggagtgcggtggagcaatctcggctcactgcaacctccacctcccaggttcaagcgattcttgtgcctcagcctcctgagcagctgggattacaggtacccgcctccacacctggct

SEQ ID NO: 61507 - DNA, 721 bp, Homo sapiens
ccgagcggctgaccttcccctggctgtgccgcaggtgcagaacaagttggacggctgctgctacgcagtgaagcgcatccccatcaacccggccagccggcagttccgcaggatcaagggcgaagtgacactgctgtcacggctgcaccatgagaacattgtgcgctactacaacgcctggatcgagcggcacgagcggccggcgggaccggggacgccgcccccggactccgggcccctggccaaggatgaccgagctgcacgcgggcagccggcgagcgacacagacggcctggacagcgtagaggccgccgcgccgccacccatcctcagcagctcggtggagtggagcacttcgggcgagcgctcggccagtgcccgtttccccgccaccggcccgggctccagcgatgacgaggacgacgacgaggacgagcacggtggcgtcttctcccagtccttcctgtaagcgcacggcgcggaccagctgcctctgatgcgccccctagtttcctttctttatttttttttcctttttcctttcatttccttccttccttctttccttcttttctttctttccttttttgagatagggtcttgctctgtcacccaggctggaggtcagtggcgcgtccttggctgcaacatccgcctcccgggccagcgaatgccccccaacattaatccccaccaagtccaagccagggaaaaggggatt

SEQ ID NO: 61508 - DNA, 2292 bp, Homo sapiens
aacatttaatttcttttaaaaagaaaaaaaatctgaagcatattagtgaaatgttaaaatgtgttaaagttgggtgagtaggtaacaggtatttgttatattctctattatgtttctgtttgcttaatatatatgatataatttaaaaagatagagtagtggaggaagtcatagtaaaatttatgaaagatcagtatagattttagagaccaaacacaatttttactggctggcaatattattatagaaagatatttgcaggattataggtgacttttttatagatgtcttttttcatatgtgttgtttctaaattttctatagtgaaatggtactacttttataatacaaaaacaaatgaaaaagaaagctattggcaaaatatgtaaatgccatgtagctttcaacaggcctgccatgaatcaccttggtatgtgggaggggcctgatgctgttaggtggtcatcgcgccacagtatccctgagagtcagagagaatgtgtttatttgattatctccctctgaaaggcaaatatcaatgtggccaagaatttggactttgaacccaggcatccttcccattggttgaaaggttagctcttgctttccaaagcaggccatgaaagatatgtgtcctcttccctgatgtgttcaaagagggatggacttgtcaagacttgttttttgaacctggaaataagcagtgtagtgcctactgcaagccacagattaatattttaaaggatccctttgataaggcttcaatgatgatgttttaatcggtcctgttttagggcaacttctcaatccgtacagccaagatgcagcagcatgtgtgtgaaaccatcatccgcatctttaaaagacatggtatgtacgccctttttaaaaatgatatttcttctcataagacttttttcatcattagaaagtactgttagtgttcgggcatatcatattttactttcaaattcagttataaataattgacatcatatggaatttaagcttatttttgaaactgatttgaatattacagccttactattaatactaaaatgcaattggtttgtggagtcagaaatatgaccaaactgtcaaacttaactctagatgagctctctatttataaatttagagaactcaagaaaaattgatatgacttcaatggtcccagtagcaattacttaactgtcaggtttgtgttaattttaggttgccttctaaggagaatgtgaacctgatgatgagctattttttctcatttggtgtaggagctgttcagttgtgtactccactactgcttccccgaaacagacaaatatatgagcacaacgaagctgccctattcatggaccacagcgggatgctggtgatgcttccttttgacctgcgggtgaggctgggaacacactgctgacaatcagaatgctgtatctagtcacagggatggcatctctgttaaaggatttttcccccaggcttatattataaatgtcacctttgggaaatgtattcttgaggaagttgtcagagtgagagtgttactggggtggaggaaatgtttggtcctgaatgcctccaccttcctaatagctcaggtgtttatggctctaggaactggaggaaccctgcattgcaggtgccacatgtgcaccccccagtgttgagtgaccacagcaggttaaccccacccacttagacaaataaatgtagtttgtttgtctttttaacttcctggctagatcttcagtaaacatcctaacatgttaatgcctagaacagttaaattcttctaacagcaagtgtctctcctaattgggtatgctgagttttgcccgtgcctgctttcttccgacccccagggatcctgtcgacagcagcagtcttaactagtctttcactcacacagtgttggctactaacaagctatctgtggtgctgtatgatagagcaaggaaaacatgcaatgcatgtgacagacaaggtttaatacctctcacatacagaaagcactgacaagtggagacatgagcaaaggatataaccaggcagctctcagaagagaatatgtgcatggctgataaacttctgaaaagctgtactgcctcaccaataataaagaagtgcaaagctgtctcaacttcacccatcagacaggaaacatttttaaattaatgttatccagagatgacaggagtgtaggaaagtaggtattttcatatgttgctgatgggaatgtggactgctaaacctttagaaaagtaatctaaaagtttataataaaacttt

SEQ ID NO: 61509 - DNA, 436 bp, Homo sapiens
gtcctcacataatggcttattgtttttatacaccaaaaggattaactagcttttctttcatctggcaggtacacatcaatggcccaaactttactgcttgtttcttagtggttctttactccccctaaagctctgctgctgtttgtcagtgacagatacaatatgatgtcaatcggacactggcagaaaccccagggattgtgcaaggggcttcagctcttactgattcatgtcctgcggctacggcacatctgccagcgtgggatgaaatgcccagagcctggcctttgttaggggagcccagagcaaaatgactccctccctgcccaaacaaatgccctcattaagcctgtccagatttgggtcacctcaccattcagcaagtacaactttccccttttaattcttttgtcagggtttttcagattttaaaata

SEQ ID NO: 61510 - DNA, 3484 bp, Homo sapiens
gaaataatagcatcacctggtaccaagaaactgcttattgaaggcccagcacagtaaggggctaaggaatcaaatatttatgccagctgctccttacagtactacgaataaggaccaatatgctactttcatttccacaagagctttagcagaactaacgactgtctgacctctaccttcttattttattcttgaggtttccactactaaagtataggaaggtcctggtctcaaaaatagccacacagggcaaaagggaaaaacaaataaaagcctggttcagaaacgccccatcctctgttaagttcaagtctttacatttcaaaagacagccttagaaattaagctcaccacagtgctgatcttcttcttcccatcggtagctcttaacagacacttgttgtctgcgggctcaaagccctccacagtacccttctttggaatgggtttggttcgaccgtcatctgaaggaaaaaatgcatcctggtgaacacggccgcgtacgtggctgagcggcagacaaacagttaaaacagaggagtggggtaagtgatgacctaacccagccccgctgctctagttttgttaaacacctcatctgctatcacggtctggcgaaaccctggagaaactattatttccacgacggaaacatgtaatatcgaagcacgttaaattccactcaaagtggcggcgtctgggatccctgacaaagagccctgggctgcttggggcccattgttaccagaagcaacctaggcggctcagtgctggggactgagccagctacaatccctactattttccgggcccgaagccccgaatgtgctcagtacagggtggggaaaggtagaggaaggcggcggtccgcggcagacagactccggtggctcccagacaccgggaacccagggagcatcgcccggctcccctcccgctgcttacacttcttcaaggtgatatagacgctgcccgacgtccggcacttctggaaaagtctggtcagctccgtcaggaactggaaaacaacaggcccagccccgttagccagccccaaatcctcgtcctgccgcgtcaaggccctggtcctcctgcaggaggcacaggtctcgagtaacgcctgagccgcccccttccctcggccggccaggcctagccatacctgctcgctctccaacaacaccatcgcggcgacgctggctcgactccctccgcttaagcccctagcagtgagagccggaagttcggcctaggctgggcgggacttccgctactagacttccattgtcttccaccaatctcttctcttccaccaatcccggcctgcgccctcccccctccccgcccgcctagcgcccgcgccctgggacgtccgggggcctgtgacccggaggcgctggggctgtcctgggtcgtcacatgcgagaaatcgtctcaccccagccagtgtgacggagtgagagcaaaagaaagttttgatagcagcgtacgatttatattcagctgtatgctgggcaggtaacctaacaactcagtgactcagtttccttatccataaagtaagggtaatgatagtatctaccgcgcagtgtggtcgtgaagcgtaaatgaaactcagattaaatacgtagaacagtgcctggcacatagagcgtgttcagtaggtatcagctattgttcttttcattattgtcattataagttcctgtagagatcctttaaactctccctaaacgctgacctgcagctctagccagaagggctgggccgggcgtggtggctcacgcctgtaatcccggcactttgggaggccgaggcgggtggatcacgaggtcaggagattgagaccatcctggctaacacggtgaaacgctgtctctactaaaaatacaaaaaagttagccgggcgtggtggcgggcacctgtaatcctagctactcgggaggctgaggcaggagaatggcgtgaacccaggaggcagagcttgcagtgagctgagatcgcgccactgcactccagcctggaagacagagcgagactccgtctcaaaaaaaaaaaaaaaaaaaaaaaaaatgaggggctggagcccagtctttagttctacctctgattagtcaggagaactaggttgtaagccctctctgccactagccaacttgaaccctgggccctctataaagtcaagcattccaccacacaagaggttttcgctgagtgcctctcagtctgtgccaggcacggttgtagaggttggggatgcagcaggataagaaaagctaagttcctggtttcctggaagttgggttaaaggggcagggaggaaataaacaatgaagcaaacaagtaagtagtacagcttcagataatgaattccgtgagacagcctaagcagggctgtataatgagagtgggaaggggactgcctgggttggggtcaggggagttctcgtcgaaaaggagaactttgagttgaaagctgaaaggaccagccatccaaagatctagggacacagtgtttcagacacagggaacggctagagcaaaaccttcaaaggggaaacaagttgccctgtgtctgtaagactggcaggtgcgggtgggggtgaggagggcttgtggagcaaggagtaaaggagtatggagaggtagctggggaccagattatgtagggcccgtgaccatagtaagcctggattttgttctagatacaaagagaagactcgttaaggaagttttcaacagaacactgaaaatctgatttatattttttaaagatccccctgtctgtgttgtggagaatgcactgtagagagacagggcaggaaatgaggagcccagttaggagattcaaacttaatggcttaaatatgttcactctctgatttcacattttcttccaaatggccagcgcccgttgcccacttcctgccctaggctgatgaccttgtgtagccaacctgtattggcttttggttctccagcatttgaacctgtttgcaatcccctgttgtgtgggttttggtgagaggcaataaataaataaatagaagggtcagagggtcactctctcaactgccctcagcacctgggctcaagcatatgacctaacgtgggtcaatctggtgctctcaaccaggactttgacttctgagctagtaataccaaggcccagggctcttgcatgggtgtccagtcatttgaatgtgaggatgtttttgctcatctgtattggcagatatcatgaaaattatgcatgggccctttttaaaaaaattttatctcatcagctatcattagtgttagtgtgttttacatatggcccaggacgattctttcaatgtggcccagggaagccaaaaggttggacacgcatgctagaggttattcatatggtgccatcacaaagtggtcttgtgttggcggccctataggaggggttttcaccagactgttctaatctttgctagtcttgaggtgtgcgaag

SEQ ID NO: 61511 - DNA, 746 bp, Homo sapiens
agggcctgaggcgccaggagaggctcctcgccctctgtccagctgctggggatggcatgagagggccttgctgccctctgacctggacataccacaagagtgctctggttgagtgacccatatgtgattcctggcttgcaagccaaaggcagagattccagtttgggaggtcagagaggtttctgagaagggaaatcagccatgaggccccccagtcctgggcttgctccagctctgctgccttctggaagaagctgactggcctgggtgtgggctgggcattcccctggggtaggatgcagggctccagaaagagagggtgagtggagggtaagaggtgactgggaaggaccgggaggaacaggaggaagtgagatgtggcagggccaggcctctgctggtcaagacagccttgaagccacggtgctacaactctggcagggtcagccctctggctatcccagaagagggcaggttgccacagagcctgggcaaatacccagctgccctctgaaccaggtgttccagggacacctccgaatactgcttacactgagacaatgagacaaaaagtgccagcagcttcctggctgggacacaccttcaggagcattagcctggagcagaggctgaacccatcctaacagcttgcccatgtccccagccccgggctaccgggcaagtgctcacatcccctggggacaggtggatggcacacagggtcatggcggagggctgctcactgg

SEQ ID NO: 61512 - DNA, 1294 bp, Homo sapiens
gaaaatttcaaatgccaacttaaatacaagagggtaggtcatgtaaaaaaattatttaaggggctttgaaggcggctgtctggggagttaaggtcttgtgtctccagtgccctctctcacccctaaggtactgggtgggcctctggaggtacatctgcctatacaaggaatctttgatgtagcaaaaaaaaaacacaaaacacaaaaaaccctcacagcatgccctgcccttgggctctggaaaccaccgtcctgcctgccccactcctgctctcagccccctcctcaggcctaagcctccccaaccctccccaccccccaccccactgccccacccgcagtccaccccgctgtcgcctcccagccctggcccggccagccctggagtaaataaaccaccgggcaaggacccagacaatgggccttggcaaggagttaatgggctgggcctctcgcgttagccgagtgtgaccggagctggcagggggcctggcctggcgccagcatcgattacgaccagacggagccagggcagacttggcacgaatgggccccacagctggcagattcagtcaccctggccacaagggcacgaggcctgccctgggcgccggctgccaccgcggctgtgctccctgccaccgccttcactgccagtgtggcagggccgcttgtcaggcactcagtccctaggcccttttggttctccccaggggattgtccctggtcaggcctcttcctgtcccaggctgcctctgaggctgctctgtggccccacagactgggtgcagagcgggggtggggtagggggaggctgagggttgggctgggggatgcagctgtgacgcccctgcccccggcactcccaccactccaggacagagggaggctgctgagccaggctggtgttggtcagcaggaagaacaggtgaagcaagcctcatttctggtgtccagatggaggacagggtctttcttcccctgtttctcagaaacctttgtgggcctgggctctgctctggctcggcagctccaccctgcagggggattggccgggtggcagggaccacctgagggctcactgcgtccctgctaagaagttgttcgagtcagggtttgcaagcggggcttgcctgggggaaagggcatttcttgctttttgggtttactgctcctcccaggctctctgggtccctctcccctgggcgatgggctgtggcataacgtcctcagggcaaggtaacggctccatctggagctgatggctcctccaacgctaaggagctccatggac

SEQ ID NO: 61513 - DNA, 1235 bp, Homo sapiens
aggctgcctaagggtgacaggtgagccccttcctgctagggtgtctggccaggatggcctgcttccaagagtcctcaccttcacacacagagctgtttccagcccaggccagcactgatttgcagaaggcctgcagagccatggtgaccaaagtcttcccgcttctgccacgtcccttctgcctaccccacctccccatcaagtccctcaaaaagaagtgctcactggggtagcatgctccttgctgtccaggacagtcaccgtggctccacagcactcttcctgggaggccctggctgaaccatcccgaataacccccaggcaggggccacctgccgatggggctgggctgccaggagcagtgagacaggtcagctgggcccctctgggtccttcaaacaagcctgccacatagctttggacacagacctactcccctgggggctgagggaggtcactgggaggtgatctttttccacctcggattgagcaagagaaggctgccagtggcccagactttgaaacaggccaggcagaggccaggctgagtcctccaccctcattgcaggagtccagcgtctggcctggggacttccctcaccagatctgttgaccaacttctagaaacccctgctttggggttgtgaattagaagggctgttttgaccctgaatatcaggcttcccttcctcccaggcatttctttcccgaggaggaaggtttccagtccctctcccaacccccaccctcagcaagccacaaagcctccaccgtcttcagctggttacaggtcaggatccaggtcagactctccctccctctaaatctgattctccacccctcgctagagacagccaggctcctgggggtgggggatggagtctgagggggtggaggtcgggggggaggggcaggtctcctgaggctagacttgaggaatgtttaggccaactcaccaggcagaggaggaaggggccagtttagatcactaagccaattaaaaacaaccagccagaaagaacctttctccttcctgacagctactctgccagctacctcctgggttttgttggtggggaagaagggagagggaaacgtgaggggtgtaaattttgccctggctcacttaagacagtgagtgagttcctggctttgcataagatggagacagtgcagtcagaccaccttccacctgccccaggcttgatgttgaggtgggtttgtcaaagtctggg

SEQ ID NO: 61514 - DNA, 1040 bp, Homo sapiens
ggcttcagaaagagaagaagtgcccccctctctcccccgactccaaagtaacacagagaacaaggggaaagggggggcctccatctgcaagtgatttgacactgtgaaggtcaaagggttaatcttcaatttaaaccacactgctgaggcagcaaaaatctgatttcatccagtgcaaacacgcacacacacagactcacacacacacacacacacacacccttgtgcgcccgcccgctctccctccccagcatctccagctcggtgctgccctttttatagatgctcttgacagtaagccataaataatccctcttggagcgctctcctactgactggagccaattaaacattaagcaagaacatacttgaaaacaaaacaaaaacaaagaatatatactatgctctggaggttatcccaggtcctactgtcaggctgggaagctaggggcaaagttcaggggtcagtggctcaccagattggggctggtgccctgcccacacaggtaccatttcccaggagaggcctgggggggtggaaactggggggtgctggaagaggcggtctttgttctctctttgtctgccagggcaggaggactgggcgggggcctctccacagggttctcactggacaggggaataaaaacctagtgtgcagaaaggagccagcacgggctggacttggattacttcagtggccccgtcagcaagcaagtttacatgaggtgtccaagccttctcttaaactgtctttaaccacagcaccagcccccaccaggcaactactcctggtcagatgggaagaggagagaggaagccagcggcacagctggaaagggggcccaggttgcctggactcccagagcttccaggttctgtccagccctggcctccctgacctttcccagggccaccatgcaggttgctggcttccccttcacgctgccctaggccacaaaaagagaggcatccaggcagctggcctcagggcctgacaacccaggtgaacacggaatgcccccgtccatcatggcaac

SEQ ID NO: 61515 - DNA, 4009 bp, Homo sapiens
gctctgcaacagggccggcctggggagcaccatcttcccggcagactcacgaaatccctgggagatccctgactttctgctttgagactgcccacagcagccacaggccatggggctcaggattctaggctgccagggtaagccaaggattctgaaacccagagggcaaccccttggacccagtgggcccactgcctcagactgcttctgacccagaggcccgaggaacgagcaacgtggcaaaacggaaaaggaaaaaaaagactccttgccaagagcttcctcagcccagccagcagtgttaacaggacattgaagccaccatggccacgcccattgcttctctaaggaaaaaagagcagtccgaagccagccagctctcagtggaagatggcaaggcttcctctaacgcaactggaagacactggctccagccactgggggttgaggggtacggttcggggacagagctgtgctgcaccatccatgtccccagacccttgttttgcacctccacagcctggagggaggaactactgagacccttactcagtttccttcaagctgagaacagctccatcaaactactgggcaacttcttcagagctcagaagggcacaatggtgtgtgccctggttaaagaagggagagggagggggttcgggggacaagcctgttgtgtgtattatgctatgcaaaataaccccaggttctgacactcgacttggggtcttttcagctgactgttcatgtcctgtccaggaccaggtcaaggcaaaccaggcaaggaggaaggatggaaccctccccttcacacacggactgattgtgtgctctggtcatggaacatgacctcttggctgccagacatggatcaaaaggcaaaccagtcatttttctttaaccttctttctttgtgtctcccttagtcccctcctcccatcacccactttccaaaaaaaaaagccaatttccatcccatggcaggccttggtggggagggaatgaactctccggaactacaaggcccttctcctggaagagagagcagtcaggtgcagagtgtgtggggaactcagcctctagtctgccacgctgatgactcagaagctaaatatagcgagcgatataaacagagccagccacagagcaaacacagggcccccagccccggcgctggctctcacgcactctggctctccgcagtccctcccccagcctcattcttcccctggcactgtcctaggtgggcctcccactcctgggacagaggctggcttcctagggacccatctcactctatagcaaacctctggggcccctgcccggggctgtcccatctagacgctgagcaacctagttagccagcttaagttccagaaaaccactcactaataactagagaatcccaaagtgtcaggaagcaatcaggggctccctgaacaaaggatccagtctgctaggcagagaagctgctagttaataaaccatgcaaacaccaactcgggtacaacttccaaaagagctccccaaattacaaagtcaggtccaagcaaaatcctaaagtcatcttttaacatatttctaaaagtactcaactgtccctgacttaatagttatttgtatcacaactcctaaaggcccttcacatcaactaggcaaggtaagtattagaaaccaagactaagccgggtgcagtggctcacacctgtaatcccagcactttgggaggccgagatgggcggatcgcctgaggtcgcgagttcaagacaagcctgaccgacatggagaaaccccgtctctactaaaaatacaaaaattagccaggcatggtggtgcatgcctgtaattccagctactcaggaggctgaggcaggacaatcacttgaacccggaggcagaggttgcagtgagccgagatcgcaccactgtactccagcttggcaagaagaacgaaacgctgtctcaccaaaaaaaaaaaaaaaaaaaaaaggcttggagagattacatgatttgcccacgaacacataacttataagtggcagagctgggattttaacagatctgcctacaagtctaggatcctttttgtgatattacagctaaagatggtttcaactgagtggctgaaagttttctcagatttcatttgccaaaaagtctaattactattcagagatttccaaacccggcttttctgaatggagccactcctggtccaagtgaaaaagccatttccaacatgaagaattccaaccctcctgtagctttactcactcgactgtttacagtaactactgtttttgaggattcttggcttcttaacattgcccagaaatacccccaaatgtcatgatgggccactgggacagaagactctcccaaggggaggggataccacttcctgcccctccttaggctcgtgctgaatgaggccatggcacaaggacaggaaagctggggctcagaccttctggccagggcagcccaggggctcagggaggaagtacatctgcaccatgctcttccatgcagaagctggacacagaagcaccacagcaccaccctcaagataagtcattatcagcagaccatcgggggtccctgccacagtttgtcagctcacagaggagcaaacaggggaaccttcactcctgccccggccaaaggaaggtgggatgtgtggtgaggttctgaaaggtttttacctccactcactctgcctccaactctcttgctgctttggagacacaaagagctgaggcggagcaccctgctaactctgatcttctgcctccggttttttgcctgtggatctggaagagtcaccctgaactggtaactcgggtgaccaggctagtcctccacctagcaaggctcttgggaaatgcgctgaaagtgcagatggcccacgtaaaacgacacccagggaaacttggaacctgttgcatctggagccaggtcgatacactcaattgggatttcatggcatcagcacgccccctccctctgctccatacctccaagggagaaggtcgttctggtgcaaaaaaacgagtaactcaggtctgtaaccagggacaaaaagggggagtgcacactctccacaggactatggaccagtggccactgtctagccccaggacactatcccagatgtaggggaaaggtgacggtcaggcctcctcaagtcccatctgcctctagggttgcttttcttggctctctaaatccagcccgcaatgatggggaatgactatcattccctgaagagaaatcgataaggccaaggtccacagatgatcagtctggacactaattcctctggaccaggcaggtggagggaagttcaggggaggcagctctgctcagggagtcccctgccaggtggagtgggaaatgaattgtgaaccaacaagaacaaacgtcgggggtgatcaggatcataaacagaaagaaggaaacaggcattaaagaacatctactgtgtgtcccaaactctcataggtattttctcacttaattatcacagtaaaattctgtggtattagcactaattcatagaagaggaaataggctcagtgaagtcaagtgacttcctgaaaactagtagatggcagagctggtattcaaacctgggctttctgactctgaacccaaagcctagaaactaaatcctaaataacctccttcccactgcctcagtttctctgcctgcaaaaatgagggaagggaatagggaaagaagataaaggataagaatggaggagtgacaacagtactttctagatatgaaatcttagactgtagtttatataagaatcaagcttagaaaatgactcacttctcaaaaccagctgctgaaacgttccaggagtaccagtgttccacctgcctgaagccatcaccttagcccttcctgcaggatgagttcctggtgaaggtctataagtagggtcagtggggaggagggggttaaaagcaagaagactctggggagaactgttta

SEQ ID NO: 61516 - DNA, 1838 bp, Homo sapiens
gtgagccgagatcatgccactgcactccagcctgggcgaaagagccaaaaaaaaaaaaaaaaaaaaaaatcagggccagaccttgggataagggcctcctcctcctcctgttcaggaccaagttaggagggcccccaggactgtatcctagtcctgtgccagggagggctcccggcctattcccaagcctatagaggctcaccagtggatgggggaatattctggggaataactggtgaaagagatcagattattgcaaatgaagcaagctgccttccacggagcccgctagatgagtctaaaagagccacagccactgtgtcctcccatcctctccagtaccaggactggaagctgtgagctgggctcagccgtaggcctgtacaaccacggtggagtgaatgggcaggaaggaggccaagaaactgaaaacaagaatcagagtgagtccacacatggactgaaggggaaactcgaagccaagtttccaccaaataatcaaaggagagagtaagaactggagcttagatctattatctaagcatagggccaccctcccttcctgatcactaagggactgggaggacttaccaggcccagacctggccccaaactgtccttagaactccttggcagagggcactaaccatatgtaacccgcaatgtcctgttcttaggaaagccaaggtcaattcctcttcccctggcactggtaatggtttgacccttaagtcaacctaccaatagctctcctccgaccacctgaagctacccttctaacctcggagtctgcccagtcatggtcaagctatttattcccttgatttcctcgcagtcagacacacaaacacacattcagagccagctgggctggggacacagtcccagaagtacagaatgtgttcgcttccaggtggcatgcctgtgcttcagctgtggctgtaccagcacggatgcagcctcaggctcctctcccagccttggcagccatccagaaagccagcccgaagaggaagggttaagtgcctggggacccagcccagacagcggctgctggaacagggaaggcagcctccaggccatggcacagagggctcctccagcacgagcctgccagccgccgcctttgttgatggactctgccacatgctcggctgacacgtgatgccccgccctggcggggctggtgccaggctgccggccaagcgcccggctgagcgcccggctggccgccggtctggggagcctctccgaggtacactctccggagtcccagaccctggttcccagacagagacagtgaggagcggcctccccagctggaaagtgtcaggtttcaaccggttccaccactttccccaactcaggccccatcccttggcctggttacccgtttcccactgtaccttagccaggcaccccccaactgcccagtttcattgcagcacccggaaaatcttcctcttaggtccgtgaggggcaacccctcagccacggccataagaagagacaggttgtcaagcagagctgcagaaagccatcctattcccagactgtagcctctcccgagagggctcttatggaacatgaattgagactgggcagttaaccaatgtggagctcagagatgagggcaagatgcttagccagttaggcccctcctgcccatgggaaccgccataaccaaaactctgggacaatatccttgaggtctggcagagacagagttgctgacaagaggagagaggcaggccctggcccccaagccccagcagactcaaccctcctcccctaaacccccgtgcctacttgctgcacatgaagccggtggaactggt

SEQ ID NO: 61517 - DNA, 867 bp, Homo sapiens
cccctgcctacctggacccaactccttcgagtcccaaatgctacccccaagttccctcttggagcagcgcacccaactgtgggttctgcaccccgttccctcaccccagcgccccagttcttcatggtcaccccagacgtccgcagcccaaacccttcccgggcccccgtgcgcagcgcgactccgctccccacttccccaaggagctgcgatccaactccgcccggcccccggcggccacccgggcgctcaccgggctgcggcaggaggcgggaggcgcaggcaggggcggcggcggcggcgggcacaggccggggcgggaggaggccactccgcacggtgcggtattgtttccaaaatacgcctgctcggggcatcccgcaaacagctgatgaggccccgcccccctgcgcgtcacgccgaggactgaccaatggcgagtgaagcgccaagtcccgggctgggccgctgccagggacggtcacgaatgtacgaaccttcccatggaaacattgcaaggggccgagcaaaattccgaccgtcgccagaagcgcagtcggagcgccgtcgccagtgcggattctgtccctaacacaggctctggaagcgccagagagtccctgaatcctctgtattaggtgtgggagagggggcgccaaagtaacttttgtcttctttttcacggcaatgggcagaataattgctgcgcgtccacaaagggaggggggaaggaggcggggagtttttttatgaggctggtgcgtccagtgggtgcagggtgcagggtgcgggtccctatgggatcccagcctcaggggaaagctccctcccgcctgccgagcaggtcggaagaaaactgcagctcca

SEQ ID NO: 61518 - DNA, 1433 bp, Homo sapiens
tagcatggctgtgtttactgcttgtggactgagcagaagagaaagcaagacagtatcatcactttatagatgaggaaaactgatggtcagaaagattatgtagcttgcctaaggttgcacatttggtatgattttacagaactagaatccagctttttgaattcaagggtggggcaggaaacagctaggtcagtggcctaagaactccggacgggtgagatttggggcagacagcaggggtagtcaccctacaagagtcacgccaagtgcaagcactcagagacatctcccaacactcaaaacagcaaagaagttctggtgctttaagtgttcctcgctcggctcagagactcggcttcgagccgcgactcaagacagcacctgggggtatttgttttgcctaagcctgctgcacttccacggccattgaatcccaaaaactacaattcccattatgcaccgcgagttcgcggactaaacaggcataaactacaagccccagaatgccttgggcgagacgcgagagcacggaggagcggaggggcgtggccacgtcgaccgcgcgggaccgttaaatttgaaacttggcggctaggggtgtgggcttgaggtggccggtttgttagggagtcgtgtacgtgccttggtcgcttctgtagctccgagggcaggttgcggaagaaagcccaggcggtctgtggcccagaggaaaggcctgcagcaggacgaggacctgagccaggaatgcaggatggcggcggtgaagaaggaagggggtgctctgaggtaggtacgggagaaagctgctgggggctgggcctgagaggacacggcctggtaggtaatagaaggctccgctcggagcagtcgagggggagatcggcaccgtcagaacagaccccaccggagcctccttccttttggagtagaatgccggaggtggaggtgaaaacgcagtggactgagggcacgtgcgaatcctgccgcatccagcttcaaagcgaagaaggctgcgggaccccagcggaacaaagagtttggaagttgcaatgttgtctgtttgtaactcagctcagccacctgctagttgtttgaccttgggcaaatcgtttgtatggaaaatgctgatgttaatgctgccttacgtggttctgggggaattcaaagtatttgttaagtaactgcttccaaataagcgctcaacaaatggcaggtgctatgccaatagcacagagatctgaaagcctttagccaatatcatagagatctaaattatgccaataacatagagatctaaaagcctttttctgcatgtttgcggcttttccttgtattaaaaaaactatattgcagttctaggttggaaatctgtatgtgttttcactgtggtgcccgcaatacctagataagtgctatgtcatgggctctttcat

SEQ ID NO: 61519 - DNA, 1154 bp, Homo sapiens
tggccgcccgccgctcgcgcaaagcgcgccaggagaggccgcgggaggcggcgggggctgggtcgtcgatgctcggggctggccgcgggggccgggcggccagggggactatcggagttggagccccgggccgcagcggcggcggcggcgcggccccagggcccggtgagggcctgcacacaggtcccgtggccgcgggcggcggccagttgcagcgcggtgagccccgcacggttggtgcggtcgaggcgcaggcctaggcggcggaaggaccgcaccaggaactcgagcaccgccccgtggccgcaggccgccgcccacatcaccgggctgttgcccgcagagtcggccgcctcggggtcaccgctgaactgcaccagcagctgcacggcgtccaggtggcctcgctcgcacgccaggctgagtgcggtgcggccgcgctcgtctcgcaggttcactgcagcaccctgctcgagcagcagccgcacgaagcgcgcgcgcagcgcggggtccggcagccccacggccaccatgagcggcgtacggccctgctccgcgcggcagtcgatgatgctgcggtccagcgcatccaacacgaagcgggccaagtgcactttgcccgcctgcatggcctccaggaaggtgcgcgtccccgctcgggggcacaggtccttgggtttgagcatggccccggccgccgcgcccgggcagcctggcagttccgcacgggggcgcccctgttctcgcgccccgcggggctccggcctccgcccgcgctctgatacctctccctccgcgcgtgggcggctgcagccgagggtcccgaggttcctactccgctgtcccggaggctccgactgccccgccgctcctgggccgcacgcctggcgtgtcgccgctccttccccgggcctcccgcctggaggtgttgattgctcgctactccgggctccgctcctggcccgccaccagacgtcgggagcagagactcgaccctctcccgagtctctcgccgctttcccggtgtccggcgcccctcagtcctcgtggtttggagccgccgtgccactcacccgcacccagggcagcccccgctcccccgcagcgacggtggcgcccgccgtgcacgcctgcctccagccctggcggggcgc

SEQ ID NO: 61520 - DNA, 333 bp, Homo sapiens
ggcgcggctccggcgctctcctcgcggggcaggctcctggggaggccacgtggggacaggccctgagatcctgcgccacccgcgctgcagagggcagggcaccgccacgagccttacctcttcttgcgagagcccttgccgggaccgagcttgcaggccccgacgccccccacgcccggtggcccgagctccgccagctgcgccgcgccccgctgcagcagctcctcccagcgccgcgctccgcgccgctccaactctcgcagctccttctcgtgccgccgctgcagcttcaccacgccctttagctcccggagctcctccaggctggcggtc

SEQ ID NO: 61521 - DNA, 1469 bp, Homo sapiens
tcccctcccagaggataaacctaggcctggagtccgaagcccaggctgctattccacctgtcacttcggagcctcggggcggagcggggaggcgccagagttgacagctcgcgctccgaccgcccccttctagctccgcactccgcctcgcacaacgccgttcccccttttaaagaagtgcccggggctccactctacgccgcgccagcccaccaggggtcgcggtgacgtcgcccgtttaagagccagcctcccttaactctctcttaacggggcgtcccggcggggctcgcggctcccggcagccgccgcctcccctcgcggcacttccggaccccggcgtcgcccttttaaggggcagcccccagcagcgctctccccgccccctgttgccggcgcgcgaggcgggggagccgggctggagcggagcgcgcggtccgcgcggccactggagaccaggcggccggcggccgggcaggcggcggcggagcgcgcggcggcgtggcggcggatggggacgcggagccgggcggctgtggcggctgtggcggctgtggctgtggcggcggcggggaagcagctgacgggccggcggcggcggcggcgctggcggcggtgactggtccaggccccggcggcggctgcagcaacgcggtggcgggctgcgggcgggcggcgtgaggagcggcggcggagcgcggggccgccgggaaccgagggcgccgggccgccccctgcccagtccttgcaggccgccaggccccctccagccggggccgtggagcaccggggcaaaggccggggcccccccatgaaggagcgcgacgcggccccggccgagcggggcaagccggccacctacaccggggacaagaaggcgaagatggcggccaagaccaacaagaagtgggtccggctcgccaccgtgttcgcctacgtgctctccgtgtcgctggccgccatcgtgctcgccgtctactacagcctcatctggcagccggtgggcgccgggacctcggggggagccgctggcccgccccccggcggctccaacgccactggcccgtctgggacttcgggggcggcggcggcggggcccaacaccactgggtcgtcccgccgcgaggcgccgcgcgacgttcccccactgcaggcggcgcgaccggcgcctccggagccccctgcggacagccccccggccgggccgctcgagcggcctcgggggccggacgaggacgaagaggaaacggcggcggcgcccgggagtcgttgaagccctccgcgctgggggccgccgggaaccattctccccaagcccagaggcaggacttcgcagcaggatggggtggagagcccgcgggagtgacccccacgagagtgaacgcccctcacactcccaccatcgccggctggccccggagcgggaggcccgcagccagatcttcagccaagggaccacgattcgccgg

SEQ ID NO: 61522 - DNA, 2756 bp, Homo sapiens
atggccacctgcgtgggggggcttcgggtcacacgccctccaggtgacccctctatgccttggttccttgctctggtaggcttttcacttacaatccgtttgccctggggaggatgaagatgggcagtgcagcagagccagggaggaagaggctgcctgccgatgcctgcactccccaccaccctgctcacctctgctttgttctccatggtcacagccagctccaccagctcccctaagcagaaagtacccccgtggtcctcagcatcctcatcctcaagcatctcgttggtcactctgggtccacaggtaccccttgcccagttcctgctaaccacccgcttttcctgcagaacaaagaccctcaggccacatgggcagtgctgggcaggacctgggtgctgggtcctctcggtggttccccaggcctgggttccaaccccagccctccctgcattccccacagaagagctgactcccacagggtgttcacatgccaatggcatgaggttatccagggcccagggccacccagcggcccaagatgccacagtggcccgtcatctctgagctgggaaacccagagcactcaaacaatgggtctctgtccctcagacactgctcctggcattcagccccaacttctctgtcccccacttcctgcagggttttagcccctggggcttgaggtttaggagtggcctgtgctttgtggcataggcgcagggctgtggactggaaaagggtatgaagatgcatctactgggggtaggggggctttcagctgtggctctttggtggggacagcagtggtccgactgcaggaggttgggagctggcaggtgcaccccagaatagttagtaggagaggggaacagaggcagctgtctttccccgacatggtctgggcctccacctccttgctacgagccctgtctcccagggtgaggcttacaccgggaacctggctgatggtaacggtgaggccatcaggctggaggagtgctggtgtggtcacagccatccccccctgctctgcctgccgacggtcctcctggatctcctgtgggagggctgggggtcagcacacgccatggccccccaggtgcacagagacatagatgctgataggcctacacagagagacaccagtgggacaccagggggcagaggcgccacatcacacatccccaggaccctcaccaagcctctaagagggaccatgcccaccctacccctggccccagccccagaggcgcattgctgagcctgcagggagaccaccacgtgtggggcacagggagcggcagccaagtggtttctcctggccctgtggcagcccactcacctggtacctgcggagcaaggcctggttcttcttgcgcagggcaactatcctccgatccagctctgcgtccttctcctgcctgctcatgggggactcggctctgggagttccctgcagaggcagggaacccaagctcctgacttccgggtccccctctcaccagtccccagctttcacattttcaccacccaaggaagagatcccagacccacagctaaggtcacccaggaaggaaggggattgcttagggagatggcccaaataaggccccaagcccccattccagctaggcccgtctgcctgtccctgcctcctcagggggctcaggtcagggcctcataccccaagccacagctcccagcagtggggtgcccctcccccagctctccagggagcttcactgccgagcagagcctggaatgggagttataaatggctctggcagcggaacctgccgtgactgggaagctgccaggggattcgggaggtcgaggggggagctgtttggctcccagatccacaaccagagaaaaaggagaggccctggctccgtcctgggctctcaggccctggaccccgcacctaggcctgtgcccagcctggaggaaagagccgctcccaggggcccagcctctccaggccgaaagctgctggtagtcggggcggagagagccagctcccctggcggccccagcccaggagtcaccctgggcaagccatgtctctgcatcaagattccaggttcctctctgtctggatgcaggttctctgttgtgaccctagtcacagccttcttcctcccagccccagctgtccccagctgcccccagagggtggctgcctggtatcccagccccctcccagtcccaagaagccccctgccaaaggcagactgccactcacagccgagtgcatggcaacggcgggcaccgagagaattccagagcagcccctggggagccagagtgggaggaaagctggagccaccggagccgggcctctgccggcctctccctgccggcttcgctgctcagcacacgagatcatgttgtgattacaaaagactcctctgggctcccagccaggaacgtcgggccgccacccccacccttccactctcagagggcgaggaccagggcactggcagctggctggtcctgcctagcacctctccctgccccaccccagcgtccccagacagactggtagggacttctccctggtgggtcaagcctacacaggaggcctggctgcctaggccccagcaggaccccagcctgggcctgcctgcagacaagatgggcagccagcgtaggcctctgtgcctcccatgagtagaaaaaggcctacagcacacagatgcgcctgccctctcctgctccttctcctcatcagccttggtttaagt

SEQ ID NO: 61523 - DNA, 437 bp, Homo sapiens
tatctcaccaggctgtcaagatccctctctgcgcttgccctgtagtgtgaaaggagatgagagagccttgtataggactgggaaaacctgagcccttgggctgcccctgaactctcccctcctgcgtgtgccctacagatccgctcccataccagcttcggggctctgtgccagcggacagcagccaaccagtgctgccccagctggtccctgggcaactatctggctgtgctctccaaccgctcctcctgcctggacactacccaagctgacgcagcccgcacactggccctgcttcggacctgtgccctctactaccacagtggcgccttggtgccctcttgtctgggacctgggcagaacaagtccccacgctgtgcccaggttcccaccaagtgctcccagagtagtgccatctaccaactcctgcactttct

SEQ ID NO: 61524 - DNA, 860 bp, Homo sapiens
gcctacttccccttcgtcaatctggcagccctcctcctgctgagcagcgtctgcgccaaccacacgctcatcttcttcgacctgtggcgccttagcaagagccagctgccgtcgggggggctggcgcagcgcgtgggccgcaccatgcaccacttcggctacctgctgctggtctccggcctcaccacgagcgcggccttctatgccagctacctgagccgcctgccggccgttcgctgcctcgccctcttcatgggcacggctgtgctggtgcacctggcgctcacgctggtctggctgcccgcctccgccgtgctccacgagcgctacctggcgcgcggctgtgcgcgccgggcgcggggccggtgggagggcagcgcgccccggcggctactgctggcgctgcaccggcggctccgcggcctgcggagggcggcggctggcacctcgcgtctgctcttccagcgcctgctgccctgcggcgtcatcaagttccgctacatctggatctgctggttcgcagcactggcggcagggggcgcctacatcgccggagtcagcccccgcctgcggctgcccacgctgccgccgcccggcggccaggtcttccggcccagccaccccttcgagcgcttcgacgcggagtatcgccagctgttcctgttcgagcagctgccgcagggcgagggcggccacatgcccgtggttttggtgtggggcgtcctgcctgtggacactggcgaccctctggaccctcgtagcaacagcagcctggtgagggaccctgccttctcggccagcggccctgaggcccagcgctggctgctggcactctgtcaccgggcccggaatcagagctt

SEQ ID NO: 61525 - DNA, 642 bp, Homo sapiens
ttatttttttattttgtgggggcgcatgaataaaggaatttaaagatgctactctggatcccatcttccttcttccttgctcctgagtatcctttccctctgttctgctggctcgttcctatcagcacacatatccacagctttaaggaaagcttcctttgacccccataacccatctccagttactgcccagttgctctgctctttttgcaacagacgcctggagttctgccatctctgcttcctcatctcccacgtactcttcaacccatgcccatgtgactgccactccaaacgctccaccagcattcctcttgctagactcatcatgacttctctgttgctaaattcattggatgcttttcgttctcattctgcttgccctttcaactattttcaatagttcaccactccctccttcagcagcttgccacttcctccttggattttggaacaccacccttttttgttttcttctcacctctctggcacttctttatcaggtttcttggcaagcaccttattaccattgcaacttttaaatgcaggtgtccctgtccttggcccaaaggctctctgcacacttcttctcttgagctcatcaaatatcaaggttttattttattttttattttattttgt

SEQ ID NO: 61526 - DNA, 1589 bp, Homo sapiens
tccacctcccaaagtgctataattacagctgtgagccactgtgcccagccttcttcacaatttcaccacaatccgtaaatatatatttatttatgtgattatttgttcactgtctgttttctaagttgtaaactccaggagggcagagccaaggtcaatcttgatatttgccctccctcactcccttccacccactgagaacactgttgggtaatcagcaggtactcaataaatgccagatgaaatgaatgagctagtgcatttagtaatggaagctaccctgtttattgggagtagctttgaatcactactgaaaatctggataagtgctattaaaattaggacctcaggtaggtgcctcaggtatctcagcccataggtccttttcttcaagcctcacctgccactctccacctgtaacgtgtagttttcatccaaataacctgtgctcctggcaatatccctaacaatcccaaactaaataaagaggattgtgacatggaccctaaatgtcgccacgtttgcgtctccatcccggaatatgacgctggtagctcattagctccattcaagcctacaaattgcatcaccctcctcctctgcccagacctgggggctccaacacctttcgctaggtctggctctggcctctgagcgaaccttccgtacagtatggcggctcccgaagccccgcccctggacagagttttccgtacaacatggctgtctacagagtgcgattcccacccacttccgcctagctaccggaagtttctatttgaaacccaggcggccgacttagccggtggcacgacagttgctgcagggaatcttttaaacgagagcgagaaggactgcgggcaggaccggcgggctcctgggttcggctctcccggggcgagggactgggctggatgggaggaaggacggaatgagctgggaaaggaggattttctcttttccaaccccgagccggggcctgtcgggtcgcgctatccccgggccctccactctctcgggcccagtggcccagcgctgggtaacattcatcctgtaccttccagggttcagccgtgccgcctcgttacgatgaccagtgtggttaagacagtgtatagcctgcagcccccctctgcgctgagcggcggccagccggcaggtgagggtccaagccacgcccggggcactgcggcctggccggggatggtctcgggagtgtggagatcgaatgggtggcgcgggcacggggaagggcgtcccgtcggccctgaaaacctgtgagccccctataaccaggctatgtaggtttatgatgggagttaagggaaggaccatgtggtaggattttagacgtgctctgcacttttctgcccgcatgtgtactgtattcatcagttagattcaagttgttggttattgtacaatgttattcccattaagctaggaatccccttctaatcggttatcgtcttatttccagacttgggctatcttgagggattgggtttgttttcagggaggaaagaggagaatcatttgagaagtgggatacttagggttctttgttcacctttatatctgcaccgtgt

SEQ ID NO: 61527 - DNA, 1310 bp, Homo sapiens
agccgtcctcagcgccaggccacacaaagaggtctagaaaggggaggactaaaaggaggtcaggacatgacggtcagggtaccattggtggatctgatgaatgtggccatgggagactgaggtgtgggtgggatgcaagtggagactgcccctgcaacagccttgacaacagaagcaagaaggaagcagagcaggagttccaatgaaaagttaggagtttgggtttgtttttagaaatgagagaactgagcagattttttggtcagaaggaaaaaaaagggaagaaaaaagaaaatagagggagaaattgaaaagtgtgggaatgagtgggcagaacacaatggtgagctggggcagaagagagaaggatgggttacaggtgatggtgcaggaaccacttgcctaacgatcatgaggaggaagccaggggccctgtgaaggctggggccacgagtgggggagttggcaagagtttcatgagcgagtattgtaaaggtttgcggtaccctccatagagagggggaaagtagctgtctagggttggagcagtagggacctggctgagattggaaatctcaaggttgcgtgatgccaccctcattacaggctgaaggcagcatgtgccagcactttgctggtcacttgccaaaacatgctgcaacccagtagtccaggtcaaagtacagagggctcagttcagccctagtgggatccctttgggtacagacaggagaacaacagaggataagggaattgaccgggctggtgacagtgtcttggaagtaatgtcccctgggggagggaaataaggccaggggggtcgggagggctcagggaactgagcatatcattgagaaagaagtgtccccatgagaactggggagaacacaagctagtggcagaggaggctgggatcaatctggggcgttagcaccggaaggtcccggggggagcatgggactaggatgctgccatgctgtgcaggtacagggactcaataggaaggtgagtgccttcttcccagaggcctttcctttaccaggcccccttggggctaatctgtaaccaggaccaccttttgtttcctgtaaagggtatgcctggctttagcacctctaagaagctggacaagctggggatgaggggctctaacacctgtgagctaatctttgaagactgcaagattcctggtaagtagcaccgggaatcggggagcccctctcctgacccccttccaggctgatctggctgttctcaagttgagaaagcctctgggttagagaggcttggcattgttagcgcttcagtga

SEQ ID NO: 61528 - DNA, 620 bp, Homo sapiens
aggcagggaagtcggaaagatgaggcaagggcgggaggggcttctcagcagtcggggcccttttgcaggagtctggggccctttctgcaggaaaggggggttgttctcgcttgattttcggctggtcttcctgaagctttgccctgggggcagcagcctccggcgaggatggggtgttcctcggcccgcagttttctccagcgcgtgctggggaggatttgggggaaaggggatgcggaggggtgatggccagggcggggggagataagatttttccgggggggctagcagctgggagattggggtcgagtcaccgtgggatacgggctcaggttctgaagacgaagagaaaaatccaagaagccggcaaagaaaatcaccccttgccaccacccttggcacggcacccctcccccaaggccccaccactccccgcaccgcctcccccggccgcctcgtgctgccccctgcgttgggacgaccgacccacggttctgattggtcagagaccgggagggggagccgagggccggattggctggcggagccagcgcagggcggggcggctgattggcggagctggccgaggggcgcgctgctgattggctggggacgaggaa

SEQ ID NO: 61529 - DNA, 1656 bp, Homo sapiens
ggagtttgtgggggaaccgcgagcggcgtagcggatcccggagcccggcccccgccgcccgcccgtccggctgcctgccccgcccgtccggcccccgccgtccgcccgccccggccaggcgcgcccgccccccccgacggccccgcccggccgcggtccccgctccgcccgcccggccccggcccccaggaggaggcgctgacgcagcagcgtggagcccgggaattgagcgcccccggggggttccagccgccggattccagcccggccggggcctgcgggcgcccagagccgcgccgtccgcgccgcccgttctggtgagtcaggggccggggtcgaggagggggaaggggcgagctggagggagggagcgagcgaggtaggcagaagagcgaagggggagagcaccggccgcccgtcagcgcgccccaccgagcgcgccgcgccaccgcccccgccagcccgggaagggacggacggacggacgacgcgaagcaggtgcggccgcccgcccgctcgcgccacctccctcccctgggtccggcaccacggtcccgccatcggggaacgcggcgcgcctcgaggtgacagcccccgggggccgcccgccttgcaggccgggggcggggtgggtggcggccgcagggtggcagctcggccgggcggcggcggcgcgggcgtcccgagctgcggagggcgggaggacgccggtctttcctcgccgcggcggagccggctcgcctccgagtgcgcgggcggcgaggcccccgccgcgccccctcccccatcgcggtccccgaggcaaggggccgcggccgggggcggcgccgcgggatcgcccgctcagggtggggggcgccctcccgcgctgggagctgaccggttattgctggatggggggcaggggatgagggccgcgccgggccgggggcggcaggggggagtagtgtagacccgactcgatcgggctgagaggaagggaggcgccgaagacggaaggggaccggttcgaaaagcgagtgtgggccgcgggaggccctgcggggaccttgcggggcggcggccgagtccgaggtgtggcggggggaatcgaagttgtcagaccgcctccaagtgacagcgggaccctgtgctcgcggcccggcctggtcttgccctgctcgctccgccgcctctcttctggggctgggggccgggtcaggtcgggcccgaggggctcgcttggcggtgaagcgccggacaaaggcggcgccggagcgggcgcaggtggtggcgtcggggaggggagcgggtccgaggcacccactccgaggggcgggcgacggggccggactctgccccggggactgcgggggccggggcgcccgccgggaggagctgcggcactggcttgccgctctagccgctcgctgttggcctcgaggctctgggaagtggggtctacttgccgggggccgaggggccggggtgggggtgtatgctcatgatgtgccttggctggtggcgacggggttgctactcaccgaggcgacagacccagtgagccgctgtagagcctgtcaagaatgaggggtttttcaacaagcagagtctgcctacaggcagaagtctaaccccacctgggacatctcctagtcgcccattgtcgacagtgtt

SEQ ID NO: 61530 - DNA, 1344 bp, Homo sapiens
gctaggacaggcctgagtttgtggcgaatcccccttgtccacttccctgaggacacacgctgcaggagagcagcctcgagtcttttctgccttcgaggtctcaggagcttttgtccccaagcccagaggacaggggtggccctgactcaggcgccctcttccgggtaggggtccgcgtgcgccctcccaagcccgcgccccgcaggggcgcccgcccctctccccgcccccggcgtgggcccgcccccgcgcctgtgtcactgcgaggccgggggtggagagcggccgggcgggacatccggcccgggtccctcgccgcgcccgccgcccgccgcccgcttcggcgccgcagcccgggagccggccacccctacacgcgccagggctgtcccctgccctcccctccccaactacccccggtcccagaccctcctcccgcccccagcccgagcccgccttccaggccgccctcggatcggccgggcccgcgcaggcccccaccccttgagcaccatgttcccccgcccgctgaccccgctggcggccccaaatggcgccgagcccctgggccgggcgctgaggcgggcccctctgggcagggcccgggcggggctgggtgggccgcccctgctgctgccgtccatgctgatgtttgcggtgatcgtggcctccagcgggctgctgctcatgatcgagcggggcatcctggccgagatgaagcccctgcccctgcacccgcccggccgcgagggcacagcctggcgcgggaaagcccccaagcctgggggcctgtccctcagggctggggacgcggacttgcaagtgcggcaggacgtccggaacaggaccctgcgggcggtgtgcggacagccaggcatgccccgggacccctgggacttgccggtggggcagcggcgcaccctgctgcgccacatcctcgtaagtgaccgttaccgcttcctctactgctacgtccccaaggtggcctgctctaactggaagcgggtgatgaaggtgctggcaggcgtcctggacagcgtggacgtccgcctcaagatggaccaccgcagtgacctggtgttcctggccgacctgcggcctgaggagattcgctaccgcctgcagcactactttaagttcctgtttgtgcgggagcccttggaacgcctcctctctgcctaccgcaacaagtttggcgagatccgagagtaccagcaacgctatggggctgagatagtgaggcggtacagggctggagcggggcccagccctgcaggcgacgatgtcacattccccgagttcctgagatacctggtggatgaggaccctgagcgcatgaatgag

SEQ ID NO: 61531 - DNA, 1525 bp, Homo sapiens
gtctcgaactcctgggttcaagtatcctcccacctcggcctcccaaagttgagatcacatgtgtgagccacccctggtgtgtttcttaaacccaaagaggagcttacagatagggagaagcaaatacctgatgtatgaatatagatagctgtcactgtcaaataactgtctctgaaaacccttccctttaatatatgctcagcctatgagtacatatgtttcaagcatgcccaaagccgtttttaagtaccaacgctcttagtgcaaggcattgctgctgtcaatatgatgtaccagtgagatacttgccttaatgaacaccaatttgaaagtttcaaacactctctattctgctgacatgtatttcaacttttcaggatctgctttctaggtaaaaaggataaaataaaaggaggggtgcctgccgccgaaaccgaaacttcagatatcagcaattagggttaggagatttttggtatatgcacacagataaaagaagtgtgctgatgactattcagtaccaagtgaatgttgtcagtgtcttcaaatgggtcaaaatgtctcaagtattgagatccagaatgaaataatctcctgcttctaacatgatcaggtatcaaagtgtgggttttagtgtgtttcagtccccaaatctcccattccctcgtagttctcatttgtggattgaatgaatgccgcatgcttgtgtttccatagcagaccttgccttgtggttttgaagtggtctccgtgctgtttgaagtgccacaggcaatggtggcaagaactgggtgctgatacatgctgtgagtcagtagttctgatgaaacatccatcactgtgattagtctctttttctgccacttcctgttcctagtagatcaaagggctaaaaatgcccctgtatcagtaattgtctaccaaaccatctgtacatatagatcatgctgtttaggtttgcaggtatgtacccaaaatgaagaacatttgtcttgttgatgtcaggatatatgtagcagtcctaccagaatcagtgctccacagattcatcaagaggggcaccaattctattttagtatgtgggtttcctattgacaaacagtggctctttttccattgaaatatgttattcgcctcagtgaatcctaatacagtggtttcaacgtcacaattgcgtgtgctaatagaatacccaagcttctagaaagagttatttatatgcattgtctccatttctgaacttcctattcattcctccactccagcccccgtcactccatagaatcattttccccacagtcatcagtgacctctgtctcactggattcagtgggtatcctcaggcttctttcttgacctcccagcaggattcagtcctgagaatcacactctctctgctgaaacaccctcctcccttagctttctggacagccctctctgctagtgttactcttcactctctgacccctgcctactcttctggctcttttgtgggttatttcctacattcagtcactgaatgttg

SEQ ID NO: 61532 - DNA, 1548 bp, Homo sapiens
attggtaaaccctgcttcgaggattccttagggaggaaaggtaggttgcaaaacacccacatctgagttacttctgtaatgtgccttgcacagtcctaggttcagggtatgtgcgtaataagtgacagacattttacgtcgtgttacatgtgtgcacacattctggtaaaaacttgcctcactccacgccgcaggctcatgtcagcggcccagcacgagtgtttctatgacaaccatggcgtctctacgccttcaaggtgggcgctcgtgaatggggatgtgggtatagtgggttccagttccgccagtagaccagcaaatcctccctcttttggcaaattattctcttccactcgccacttagttcacgctggttgtaggcgccaggcagtgaaccgcgtctccgctcttctgtcccgcagcgatcgcgcaggtccagggcccgctccagggcacctggccacggtggctcctaaccctggcagataacaggcctctgtgcgctccgcttgaccccagcgcggccccaagctccgaggcgggctgggggcgtcctcactgcgcgccctctgatcatggctctggcctcacgcctctagccgccgcgtaagagccgaggagcgcgcaggggcaggttccctggccggacgctccctccccagggcccgggtcagggtcaaggtctcggctctgctcgtacgcagcaccgccccttggcgcagagcctgcgggaatgtgcgggccgccccagcgccgacctcgcgcagccggttctgccgccgcctccagggcggagactggctgcccgcttggactaggcggcggggcggagcggaggccgcggtctgggcgtccgcgcggtgcggactgtatgtgcctcccacgatggcccgtggggcctgcgctctgcccgatcagatggaaaagaacgttttagattgaagttttaagacgactctcccgatgccgcttgaactgggtacaggtgtgtgtaaaaacagggtcacaggctcagtgcattcagtgatgatgcaactgtggctgagcgccaagccctccggcaggcaacgccggacaggcagccctccaaacccacagaggagcgcgacccctccccatgtctgcaccccacccgcctctgccctcctctctgctccccaaacctctactttggggataagtattaactctcctggctctgacatcccacctgatgaatgtccctctgcaaggatctggggttgccctacacgtgtttgggccctcttttttcgggcctctggctttagccatagaccttggtctttgtcctgctttctcctctgcctcaccatcaccctgttttccgtatgacccaatctccttccaacaccccagtcccttcatcagcagccccaatcctgatgcctgagcaacttcattaaaagtaactaccatccaccatcagcccaggatcactcagctccttcagctgtaaccctagaattcaactctcatagctatcctcgccttcatttcttagacttcacaattctgtggttatttctg

SEQ ID NO: 61533 - DNA, 585 bp, Homo sapiens
aaacctaacatcccaatggcagtatcctatcttgagtcttataactgacgtagggccaaagctggttgggataatttagaattttcaagaaaaccttgcctgcttcatgtggctggggctgttctcagccttggaggactccttccaaaacagggccagggagaggctccagggcttccgtcttccagcaatggtcctggtgggcaggtctgcttggaagggtgcacctcggccacagctggcgggacgtttgtttacttgctgtgcctgcagccagggcctatttctggatcaggtattggatgcatgcctgtgtcactccagccctgatcttgccaggcgctgagtgatgagcacgtgtgtgtgccgggagagaacagcagcagtcccttaggttatctgcctggctgcagcccagccttctctgggtgtaccaagtcattacggcttggcccgtgttggtgattaccctcccctggctctaaagctttagcactaaatattgctccatttgctctaacttgctgtctatttcactaaggaggaagaaggaagaaagtcaggggtgataagtaagattctacc

SEQ ID NO: 61534 - DNA, 1313 bp, Homo sapiens
gcactcgccaccacgcccggctaattttttgcattttttagtaaagacggggtttcaccgtttagccagggtggtctcgatctcctgatcttgtgatccgcccgcctcggcctcccaaagtgctgggattacaggcgtgagccaccgcgcccggcccctaaattctgttttcaacagaacacagactaaaggtctttccacagttccatatacatgaagatcctgcttggtaaaaagtgtctgtcagagagtactgttacaatgcaagggctgtgtgctcagcgcatgcagttcagccgtatgtctcatgctcttattttaatacaatcactgaaaggtaggtattttcaccattttacagatgaaaaaacaagttcagaagggtaacttgctctagggcacattactgatatgtggggaatccttgacaggaaaaccagatctgtgctgctccagaatccatgtttttatcaaataccatcctgcttgtttggaaaatataacgaaagcagcccaagcacgggcaggtaggaaaagctacgcaaagagcctggaggcttttataactatctaggcatatgagacaggctgacaccttctttcaagaggagacttagaaatcaggaaggctgcctgaggcaaggtctgaataatgccaggagacagagcccagccagcgtaaaggccggaagtaaaagggacagctatgacacggcggtcctgggtgaactgatgtctagcgctacagtgaacccccaacccgaattcgtctaaagccacccaaaaccaaaactttgctcacaccagagccccgcatggccccttaccccagggcagggcgtccagaaccacgcaggaaattccggcgtccagatcccaggcctcagtcgctcaggtctctagggctgtctggacgggatgaatcaggtcccaaggcctctatgtggtattccggggccgggccagagtgggagatccaaaacgctgggcaccccagcccctcctcacttaccgtaacagctgcccagtaaacgcttggctcagctctgtcgcctgtagcccggaggaaatcgggaggggcggagtcccctagtgacggagcccaggagtcctccaactaccttcccacccgacgatgttctgtgcgtcgattggtcgagaggagctcagcgtggtgaagaagtgaggagcagcaagaggcgagcggtggacggggctctggttgccgggaaacggtggagtcacgtgccctgagcattgcccctcccctcccgagggccaggttgattccttgcagatccagggttccagtc

SEQ ID NO: 61535 - DNA, 1407 bp, Homo sapiens
ttttaaaatatagaatacagtgggttttagtatattcgcagagtttagcaatctttattctggttgttagtttttgttttgtcttaaataaagctcctttcaagcgtttcttcagacccaagggactactcggaatttacacgacctactcctgtcatggcctttacacggagcaattccaagggtttcctttataaataacgtcgtatctccctaataggaagacgtctgagtaaggtcacttttggtgagacatttacagtctctcatctctaagctcactcaattcacctaatttaattcgagcagctcactcattcgctcacttatcgcagaccccgcctcgggactgggcctccctgattcgctggggccgagtgacgtcctcagatcgcgaccctgggagtggagtgggggcagcgtggttatgtggctggaccgccgcggatggctcagggttcttggacattggcgctacgaccttaggcgccctagctttaccaggacttggagtggcgataagggcccaatggcagaaacagtgtctacccaggttgggacagagggcgggctgagggcttcgcatcagcaaaacggtgacgctggtggcgacgcgaaggttgagctgtcccccgggcccccgaagccggctggccgggaagtggagccggccccagtaggcggggagcatccctcggctgcagccccaggcccgggcaagcataagaagcggcggggcgcaaccagggagcgtgtcgtgccgcccccgaagaagcggcggaccggggtgagcttcggagatgagcactttgcagaaaccagttattacttcgagggcggcctgcgtaaggtgcggccctattactttgacttccggacctactgcaaaggtcgctgggtgggccacagcttgctgcacgtcttcagtaccgagttccgagctcagcccctggcctactatgaggccgcggtccgggcgggccgcctgcaactcaacgagaagccggtgcaggacctcaacatcgtgctcaaggtggagtcctgatggggctggccagaagcgggcgaggaaaaggggccgggttttgttttgttttgttttgttttttagtcttagtaaagcataggtactggattaaaatcatggcaattctaaagcgttctcgctttcatttggaacactattttagcccgtttcccacctccgcaagtggccagggtgtctgtgcttcaggactcagcctgtttatcctcttcctcaaggcagcttccttgtttccaagggacagaagttggaattttcataattcctttaaacaccgtcttgtggcaagggcactgatcactttaccctgcgttgtagatctctgtgcaaatagtaataataggggctatcatttatgtctc

SEQ ID NO: 61536 - DNA, 1135 bp, Homo sapiens
catataaaaagaaattaaatccagcatgatttctgattcctggaaagtctctttccctcccttttctttatctgtgatgtcagaacgttccaaatactgtatttcaacatttcaggcctgaaactgatggtgccagattaattgagtaataaataataagtattcaagtttttccgctctgcaaatttactttggttattaaaaaatttattctgctctgcaaatttactttggttattaaaaaatttattctgctctgcaaatttactttggttacaagcaaaagtaagccaccacatcgacgaggatgggattcgaacccacgcgtgcagagcacaatggattagcagtccatcgccttaaccactcggccacctcgtcccggtaagttactgtttcctgattgctatagggagtaatatcaaggggctgtgacgcaatgttatggaagccgccattttgtacggaagccaaagtccaatcacttccatagcaagcaatcgaaagaagatggccgctcccacgattgtgggggaggtctccactggggaggggcagaggaaattcggtcgaaaaagagataaagctgaaggaaataaaattggcacggagtctgggaaagtagtttccctaaaggagtcttagaaatagggttggtctggaacctaaggggcggagccgacgcgtagagccgctttgcgcgtgcgcatcacctaggcggttagatttgaatacttcactgaggcgagccgggcgttgtgagcggactgctagaggcggctgtctgtttccgctctaaggaaactcagagcgtgtggaccccaaacaagtctgcgcaaaatttgtcgaggaggtttgccgcggcaggtaaagagaatgactctttcgttctgggcttcagggaaggcttcgggttttgtctgggcgccctgaagttcctgcggtgggaggtagggtacgctccctcagcctggcggcctccgttagcgccgggccgagtagacgcccctgccccgggccgggcacactgtgccctttttcccctcctcggcctgtacgttgtgccgcctcccgcttccctaacacttctccgcctgcacctcggcccctccggccacccggctcgggttgcttg

SEQ ID NO: 61537 - DNA, 1322 bp, Homo sapiens
tctactttggtctttgctactacatactacgttctctttctgtttttcaccaaagaaagtagtctcttttccttgagctctcatggctcttttgttagtacttcttatattacccatcacatctacttgtattatagttattttgtatagtttatcttcctgattaaattataagctctgtggaggcaggaatcagctcttctttttctccatctccttcagagtccctaggactatatttcatacagagtaagtgcctagtacatgttttttgcactgaattgaccatgagtacatgaattccatagtctaaagttcacccctttgttgactaccttactttctctttcacagaaaaaaaaaaaaaaatagaaaccatcagactagaacttctgaacttcctactaccaaagaaacaatctgtcgtttaataaattgtttttgattgaattattctttttttccttactttgttttctttttttactatttttcactgaattattctaacaaatactgtctactttagaaactaagaatttggaggatgaagagaaaaacaatcctgtggaagaatgggattctgaaatgagagctgcagaaaaaggtaattgaattagttaaggagataaatgggtgtgggggaagcccttctgttctgagtttgtttatatactttggtgagattaagtcagaattttcaataaaacagatttttgtggcaacattctaatatgtttgttctgttttttttttttttctgtttccaaagaattggaacagctgaaaactgaagaagaggagcttcaaaggtcagccttcaatccaagtgttagaaaatataatgctaaatcacagaaggctagatgacttcctgcctccagagactgacaggatttggggacatgagtcttgattgaggctgactcagggcttctccactttgaatggaaacctagagtccatcttagtcaacagtagttttgaagcacttattgtttacagggcatttatccacaacagtgtttctcaagcttgaatactaccagtatcctttttgtttaataaatgtaaatataaacaagtataaaatgaagtatatatttcttaggcctatgaatcttattcaactgtaagtgtaaaagaaagtaaatagaaataatgacaaagccactaaaattctagttgacaacattaatttgacaggtgatagtgtttggctgaaattaaattgatgctagcaaaatgattaacaaagatatgttctgtttagctctaacaactaaacgaaaccaaatacaggcaaaaaaaaaaaaactgtg

SEQ ID NO: 61538 - DNA, 1282 bp, Homo sapiens
ttgacacagtctcgctctgtcgcccaggctggagtacagcggcgagatctcggttggctgcaacctcctcctgagttcaagcgattctcatgcctcagcctttcgagtagctaggattacaggcatgtgccacaaaacctggctaatttttgtattttttactaaagacgaggtttcaccacgttggccaggtttatctccaacccctgacctcaggtgatccgcctgccttggcctcctaaactgctgggattactggcgtgaaccaccgcgcccggccctactcagcctttaaaaccggaatcacgggtcaaaactttctggtaaaccacgatacggtttaggttatgaaattcaatgcccccttcctctgaactcctgcaaatctccagtaaagcaccacagattgacgaatattccagccatttccctctcccgtacgctagctccatttcccacttctatccatcttctcgagcttcctcagctcctccacctccatgaggcctggaaagcaccttgctccaggaatgcgagtaggaggctcagagcgaccagaagtgccaaaagctgacattcagatactgccgaaacaaaccacaagagcgctagggcccccgctaatagtccagctgcgatggtgagaactcgcggacccgccggcgatgcatgccgggagatgtagtcccgggccgacgcattacctcttgggagtcgtggtcttcgatctggtaaacagaagacggcaactcggttaagtcttcccccaccgccccctgaaatccctcgccccacccgcgagggactggggtaggagtaggggcgttgccgtggttagcctcgaactcctaggctcagacgatactctcgcctcggcctcccgagcagctgggactacacgcgtgagccaccgcccccggcataaagtttgaattagtccttacgcaaaaagggaagagggcagtctgtaaactcgcgcaggatcaagctctcgagctcccgtcttgggttagcgcgcagggcggaagcggggagaaggcggatccgggaggcggggatacgttacgtcgacgcgggcgtgaccctgggcgagagggtttggcgggaattctgaaagccgctggcggaccgcgcgcagcggccagagaccgagccctaaggagagtgcggcgcttcccgaggcgtgcagctgggaactgcaactcatctgggttgtgcgcagaaggctggggcaagcgagtagagaagtggagcgtaagccaggggcgttgggggccgtgcg

SEQ ID NO: 61539 - DNA, 4182 bp, Homo sapiens
actgcctccacttctgtctttggggttcatgctggctactagcactaataagagatgaccaatgatcaagagggaaaggaaaggttgttgacatgaagagtccaaaaatcagcccaaaagctgagaatcctcatctgaaatttaggagggaaaacaaacttttggagagaaaaagtaatcataaataagcatcttttgttaaaacttccaggaatttttctgagggtctacagagacatcctactcaattggtctgttctttctccattgacagaattctacaaatgtttagaatgttaactttgaggtactgtttgagtatacattatcaaggattcaataatatttgtaaggctgtacttacaatagaaaggtagacaaatccattttagacagttaactggccaggcacagtggtttatgcctgttatcccagcactttgggaggcctaggtgggtgaatcagttgaggccaggagttcaagaccagcctagccaacatggcgaaaccccatctctgctaaaaatacaagacttagtcgggtatgatggcatgtgcttgtaatcccagctactggggaggctgaggcaggagaattgcttgagcccaggaggtggaggttgcagtcagccgagatcaggccactgaactccagcctgggcaacagagaaagactgtttaaaaaaaaaaaaaaaatagatattaactgaaccacagacctagaaacccattacccattgatggtacctgactcagtgtgtggagttcagcaggacacatcagtctctaaagtccaagcattctctgacctcatgacagataaggccaagccctgagcctggcacaggtcagatgcaccctatcctccagggtggagcctttgccaacagacttgccaagtggattccagagtcttctaagctagctatattcttagaacacctgccccaccagctcagaaaactgaaaccagatttctaagcagcagcaaaaaacctcaggttaagaaaaaaggttttgccctctgtggctagagtgagaaaaacgaataacattgataggatacaactactcctagaaacacatgcacgtgtgttactaatcagcatgatatacagataagcaaagactgctctcttcttccagaggagaaagcaagggtctttgggagccagagtttgtccctagtgggtaactgagccacaactgctgacagcatcttggtggttccccgggtccccaggcagatgggccagccccacccctgaatcagtcagtcaccttcccacaggaagctgtcagcacttaccatctagggcatatgacttcttctcgctcacctcctcagtgagctcacacatgtcactgtaggctcgggccaggcgccagagaaagtcctgccggcttccatactgcagaccagacagaaacgggtgaggcccctttttcctcaactgtggagaatgggggccttggccttcccccacaccctaggtttgaatttccaagctagtatgttacagtcatcaatatcaggccagctcctacacgcagccttccccccagtcatcccttcccacgtgcagttaatgtatgacacattctctgtctagccagtagcttgcacaattacggggtgagggcattctgacctcctagaactgctgggaggaaaggtcaactccaagatgtcataaggcacgagaggtcttttgctgacacatgaagaaagtgtgaaaggaaaagggaaacttctaacttctggggggggggcatttatacctgggtgggcatatattctgtcagtgaacctgacaagagaattatggttgagtgacctacacagttgtcgcttgtaatggggctggcagcttggactctgcctcaagggaaatgaggagaaaaaaaaaatacagttctttccacatttccccctagaggtgagaggtagagctctttctgcagtagctctacagaaagcagagaactacactccccctcccaagaggggaggcagctctggggcaagcagtacactggccctaggatccacgctgggcctccttggaagaggatatgtgacctgggggacagatgcaaaaccagctgtctcaccatttctcgtcccatgtcaccttgtaggggcagtaaccacacgggccttcattccccaggggtcaggaacagagagatggagggagggagggaaggagaaggagacaggcagctggagcctcaccaccagcttgttgttgagcagcagctggaagccctcccgcttgccttgctcatcacccctgtgcagctcgtcggcctgctgcaggaggggcagcacatcctccaagcctgaggaacctccagcctccagggcactggaggcacctgaagctgcctcttcctccaagtcaagagaatcctttctccccatcttcacagtctcacagctcacttcatcttccccgtcctcactttctttgtcagagtcccgctcattgtcagactccgcattggctgttgtgtaactggcagagaaatgtaagggacaacaagaggattattcagctcagagcccctagggtctgtctatccctcacccccaaagaagcactctacatggcattgtccaaagcaccaaatcacaatcattcatacctcttaagggcagactttttttcttttttttttttttttttgagacagggtcccgctctgtcacccagactggagtgcagtggttcgatcttggctcactcaaacctccacctcctggggtcaagcaattctcccacctaatttttttgtatttttagtagagacggggttttgccatgttgcccagactggtctcaaacccctggcctcaagtgatccgcccacctcggcctcccaaagtgctgggattacaggcatgagccaccatgcccagcagaaatcattatttgagagaaagtttcctatgggaactaagggctgggaaaatgatccaggaaggaaagagcagacaaccagctgaggccctgtgacagttaaggcaaatgtgagaagtccctgctcgtttttgccttatcagtcagagacacttgccacaaccaacatgggtgggtgcagcctcaggccatgggcagccacacacacatccacaaactcgcaacctctggcccaagtcaacaaccaaacctaaaccgcaacaggagtagcccatagtaaccttgagaacttaagggtgtgaggagaggtgataggaaccactttgcagccagaagcaagaaggggaagacaatgcaaactaccccctgaaaaggtgtttggggggctgccatatgccaggtggctcctaaggagccccaaccctgatgcacccactaaagaggaagctgagtttctcttggatctcagccaccagcagctgattagggtgttttccctaaatgcctaaaatagataaggactgagcaggggaaaaggtaggacttctgggggtcagaagcaaacacaaggctgggggcggtggctcacgcctgtaatcccagcactttgggaggccgaggcgggcggatcaggaggtcaggagatcaagaccatcctggctaacacggtgaaaccctgtctctactaaaaaatacaaaaaattagccaggcatggtggcaggtgcctgtagtcccagctactcgggaggctgaggcagaagaatgggcgtgaacccgggaggcagagcttgcagtgagcggagatcacaccactgcactccaccctgggcgacagagcaagactccgtctcaaaaaaaaaaaaaaaaaagaataggctccctgtggctggagcaaaacaggactgaaggagagatgacacaccacctacaaataaagtcaacaactgacagcctaatgtcagggcagaagtgctgtcctgcccagaaaaccagaaaccacaaggtggcaggctctgaaggctctggaagtgagcagccagacctggtacccagtccgtgctgactgcatccttacagaggagcttcagcctcatctaaaaaagaggccccagacacatctactacaagaacttgtaaggtatttaaaacctttcctaactgcacctttgttttttaagaggttatccaagtagatttcccctttagttattagaaaaaaaaaaaaacacctttagaaatcaaagggacaagga

SEQ ID NO: 61540 - DNA, 1843 bp, Homo sapiens
aggcgaaagagtagagaaaaccacgactgctttttttttttttttttttttgagacagagtcccactctgtcacccaggctggagtgcagtggcgcaacctcagctcactgcggcctccgcctaccaggttcaagcgattctcgtgcctcagcctccccagtagctgggactacaggccgcgccaccacgcccggctaatttttgtatttttagtagagatggggtttcaccatgttgacatctggttgaacgttggccaggctggtcttgaactcctgacctcaggtgatccgcccgcctcggcctcccaaagtgctgggattacaggcgtgagccaccgcgcccagcccgacgactgctttttcaacaagcttccaaaaaagtgaaaccctaaagcacttctctccgttaccctgtcccacagtctccaccgaaagcagcccagacctcaggcccattagtctgcagtgaccgcggtctcaggagacgggctcctaccgtggcgtccgggatctgaagtctgcgtatagtccagggagttgggcaggctctggctgcggccatgacgctgggtccgtttccatcgctggctgtaaaggaggcacaggaatccaaggccggcggcggtacccagcaacagtcccagcccggcacgggcaccacccagggctcccagtctagacatgctgcacctgcggccagcagaagtcaccgggagcaggcaggcgggcgggcgggcgggggtaaggagagagagagattcgtgaacccggtaaacccaccctcaaggctgaaccccggcaggtatccccttgcccaaaccctgagctctcgactacgtgcaccccagtctgaaccctaaggcttcctccagcctcctgggccccactgcctctcttctcacccagcctggacgtagccgcccctccagtacaccccccgacccgggtcacagagtccggcttctgggccttcaacccccacctcagcctcacgacactgcagaccacaaacccggcgccctggctgcaaactcctggccttccgccgcggcccccgaaggcgctctggcctggcaggagatccactcagacccttacccggccgccagccaccatggcagcagccgccgcgggctcacgctgtcagtgaccgtgacgtcaggcaggcggcgccaggtgctcggcgccctgcgggaaggcgcagagagatgaccgcgccggccccgccccttgtctgtttccctcaggggcggggccacgggcgccgccggaggggcggagtcagcacagagcgcgaaaggaaagcaagaaggggcccaagacaggggaaaggcgggaaggcagggagacttcttgggcggacgctcgcgcagtcaccctcaccgtccggcagccaggcctccatttccctccggtcacaccggcttaacttgctgctcccggaatacgctcagcatattcacactttctacctgcgcttctgcctggacctcccctctgtacctggaaaacgtcacgctctccccacattttatttttatttttattttgtagagactgggtcccgctctcctggtctctcaaagtgcgatccgcccgcctcgggctcccaaagtgcgtgagccgccgcacccggccataaatcttaaacctaacgtgctgtcttataattctgttttactcttgtaattgtatgcaacttcttataattgtggcaactaaaaagaccgattttatggactatgataacaattttattgtgaacatttcttaagagttaaaatttagtttagtgaaagaaatatctaggccagtcctcccaatacccttgactagatct

SEQ ID NO: 61541 - DNA, 2569 bp, Homo sapiens
agattttgataactgcggatgaggggcgtggacacacggttgggaactcgcagccgctcattggtggctggtgcgggggaagttgtttcatttgccccaggtgttgcccagtgacctcctgcgcgtgcgccgcgtctgtccagctgcgcgggaagctcaggggagggaaggccaggttccatccattcagtcactccagacctggcacccagccaagcgcgcggttcctttacagactttcctgcgggtccacagaaatgcaaggatccgcctctgtgctggaattagagtctgggagggggaatgcacagtgcgccctgggtggtattttagttgtcgccttcagggctagctccgagcctcgtgccccggcctcctcagcgcttaaggaatctctggagcgcatgtcttggcgaggggaagtggggccccgttgaagctgtcgaggcgtctctgagaggggtgggctggggcctggagaggcctccgtgaggacgccgtttgctctgggctctgcctggcaggggactttggaacctggcctgaagtgttcaagaagcgggcgcgggggcaacacgcgcgcggggacgcagtaagatcacaggctgcaaagaaaacagcactaagcgtcctggaggacgctggagcttcaggatagtgtccttccaggtcgtgggaccgccccctcctccccgcactccaccttcccgcaactggatcactcggcggaagcctcaggtgggccccggggtccaagtccgccgccgggagggcgggggcgggccccgaaccgccgactgcagggcgcgtcacggcagccgctcctgattggcggccacggcggtcacgggcaaggtgccccgggattgacgccgcctgtggccagagccggagtaacgggactcccagctgcgcgtcgcagtcccgacgcgagaagggctggagtcggcgtccagcctagagcccccggtgggagccaggccgggacgcgtgcaccatgccctacctgctcatcagcacccagatccgcatggtgagtaccggccgcctggcgacttggagccgggaccaggccctagggggctgcgactgcaccttcatgcctccctcctgggctgcacccaccggggactggaccgggaacccgcccagacacgcccccttggccggggagagggagtggagaagcgggctcagctcggcttccgggactcagcgagctctggccggcctgaagcctttattgccgcgaaggggcccgggtacgtgcgtcccggcaacagggcgacctccgggcgcttccggctcctgtcctacctgtcggcgggagagacccagggagccctggcctcacgcgcagcacctagtgccctgcacagagccgctccgcaggggaaaaaagggcgaataacctgagagaaagaggtttggaaaagataaggacctgccaaggcgctaaaaccccggtgccaagtccttgacccataaacagcaactagctgcacccttaggcacttccaggaagggctatccctgaagctttagggaaggaagaaaagaaagaacaccctgcttggaaaaaaggaaggcgagaaggggctgtgcagttagaggtgggaacaccatgagttagaagtcacgttcctttctctgggcgcagtttccttatctgtaaaaaggttctgattgcccctcaggagtccccttttagcttcagaaagacatgacgggcagcaaggtgctctctgcccttgctcactgcccagtgctggggtgaaccagcaaagggtacacaacccccttggtgggttcaccacgcaacagagagctcttgcagagccctgggcagcggtttgtgaagcagccatctgctcagctgccaaaatgtggattcctgggtcccttcccagacctcctaaaactctgtctggggcttgggaacccatacttggaaatggccccccaaagtgattcttatttcttaaaagatatggctttattgatatgtaatgtgcataccataaattctttgatttaaagtgtacaattcagtgttgttgtttctttagtgtactcagagttgtgcaaccatcaccataatcagttttagaacatttctaataccccaaaaggaaaccctgtacccactggcagacactcttgatttcccccaagtccctcagccctagataaccactaattacctttctgtggtaatgtgatctgagtctggcttctttcatttacatgtttattttgttttgtttttttgaaatggagtctcactctgtcacccaggctggagtgcagtggtgcaatcatggctcactgcagcctcaaactcctcccacctcaagcgatcctcccacctcagcctcagtagctggaactataggctcgtgatactttgcctggctaaagctgagctttaaggcactagggagggcgcctacattgctcctcctgatcattgatgggctccaccccttcacagcttgtgctcagcccctaagaatccttgctactctctgtagcctttacctgaaccttactcagggctagcaggcag

SEQ ID NO: 61542 - DNA, 599 bp, Homo sapiens
ggggtgactggaagatccagaggctggggattaaggaaaggacagggacaggactccaggcccatcgctggagggttcaggcaggcagagcttcttcatcctgggggaggattccaggataggaatccagggctctgcctgctctctgggtcctggacagtccttccaggcaccccagagtggagggacagaggcaatctggaaatgttgggggggcggcccttcctggcaggaccctgaagaaagctggctatgccgggaaagggaggctgtgccgggaaagggaggctctgtgcggcactacaggaaccaggtagaggctggcagagccagaaggtggcacggggtcagatcagggagtgggaggacacagactgagcagaagagatgagtgccccatgccagcctctttggaagccactgtcaacagagagaggtcacaggacaagcttgggtaaaggcagtccaacccaggcagaagaggaaagtgggaaggcccaggaagaaaggggagaaggcctgaccctgtctaatctggtggccactcactgcatgacactgaattgaaataaataaaattaacagttcagttcctcagc

SEQ ID NO: 61543 - DNA, 1265 bp, Homo sapiens
caggatggtctcgatctcctgacctcgtgatctgcccgcctcggcctcccaaagtgctgggattacaggcgtgagcaccgtgcccagcccatgaagatcccttctaactgctgcaatatattcttttctcccttcaagatcttgcataaaaacaccagtcatataaatcatgtcttcctctttattcttacagcattttcttatatactcttactgaacctcattcattgcacctcagcgttcactgagtatataactgtgtgagctgtcagaagtcagaagtggtatcttactcagctctaagtcctaccatgctcaaacagtaccttgtccatggtgagaaactccattcatttgttgatgtgaactaaatgttgaactctggtgatcctcaattttgttctacttgatcctccaccgccttcctaccctgaccactgcctcaattgagaatcactgatttgctgttaggtgactcagcactaatgtgtcaggaatggagtgagtaaagaaggggtccaggtggagggcagccttggacacaagctgggggcgattcatatttgactttccaagcttacagtgtaaggaagatggactcacaatgaaaacagcaagaactgactcatagtgagcgctcactctatgccaggcactgtgccaaatgcttacgtggatcaagcctcaaaacaatgcgatcaaggacagactatcatcatcctcgttttgcagacgaggaaaccaaggtacagagcggttaaatatttgctccaggtcacaaactaggtcatggggcaagtatccaggcaatctgactccaaagtccactttcttaactataactgctaataagtacaaaggtgattatgaaggcacatttacaattctaacatctgtatcatgatttccatctattctcaacacatggtagatgcaacaagcaacaattcttagccttacacattaaagatagttataaaaactgttactttcaatcccagcactttgggaggccgaggcgggcggatcacaaggtgaggagtttgagaccagcctgaccaatatggtgaaatcccatctctactaaaaatacaaaaattagccaggcatggtggtgcatgcctataatcctagctactcaggaggctgaagcaggagatctgcttgaacccaggaggcagaggttgcagtgagctgagattgtgccactgcactccagcctgggggatagaatgagactccatctcagaaaaaaaaacaaaaac

SEQ ID NO: 61544 - DNA, 1851 bp, Homo sapiens
catattggtcaggctggtctcgaacttctgaccacatgatccgcccgcctcggcctcccaaagtgctgagattacaggcgtgagccaccgcgcccggcctagtagacactaattttctttctttctttctttttttgagaaagagtcttgctctgtcgcccaggatggagtgcagtggcgcgatctcggctcagttgggcactaattttcatttgatgaacgcctctccttcgtatattgttaaaactaccaccatgatccagggggagataaaagaaatcctaaatccagcttgatcagtgtttcactccctggcatctttatcaccacctaaggtagcatggacctctataccatctgccttaaccttctgatcctcctgcttttagcccactaactagcacatgctgagaagggcatcagctacttgaaaagagtcaatgggcttgagtggaaaagaaaatagagacagcagggtcatcggtcacattggcaagggggcatgaaaagggagtggagaggctttgagatcttacttttctttcgttctaggctcttagtggaagaattaaatcagcctgcagaagagactgaaatgaggcacctcttgtcacagtcaaggcagaagcggaaacggaggccgagactgcgcaggcgcagaggaggctagcgttccttgctgcctcgccccgcggcctctaggagacaggggccacggggagagcacagccacccggcgcgaagagccctctgtaccccgcttcctcttgaggccctcggaccgtccaggaaatgtctgggagcccgcctgcggagggcatagcgccgaccctcgctccccgcccaggacccgaatgaacctggagagcggatgccagcagtggccgaggcgctaggacaggaaggaccgccagacctctcaagatcagccttcctcgccaccgttctcacctctttgtccgctgccttctcctcaatgcctagcagcgcgtacaggtccatctgtaagagctccttggtcactgccatggttccggcctgacggattcgtactacaactcccaagagtctaagcgcgcgtgaggactgcaggctccgagcggcgcctagccctctgggaattgtgttctgggtcaggcttgactgactctgagggaggccggcagtcgtgaatgaactacgactcccagcagcccccgttgccgccgctgccgtacgctggctgcaggagagcgtccggattccctgctctaggtcgcggcgggacagtgccagtgggcgtgtggggcggggcagggcagggaagggaagggcggagctggggtgagggtccaaggggcccaggacttggccggcgtgatctcagctctgcagaccctgcggtgctgggagccaccatggagagtaggtgctacggctgcgctgtcaagttcaccctcttcaagaaggaggcgagtcttccctccccgagggctgcagggccagggaggagaggagggaaaagcgcgggacttaacgtccaaagacttggtcttacggctcctttccagctgtgtggttttgatgaagtcattgatcctcagtttccatttctgtaaaatggggctaacattctctcgctttcagggtttatgtgagggtccactgaagtgctttaggtgagagttccctataaactgtaaagcgcgctgccgtcgtttttgcaaagctactcttttctgtcggcccagtgtagcatctggcggttttcttctctccaccctgctcctccgaagcgcggtgtccatcacaccaagcccgttactccctctgctctgaaatcttccccatcccgcagcctgcccttctcca

SEQ ID NO: 61545 - DNA, 1996 bp, Homo sapiens
agtaaacaaatgaaaggggacatgagtagggagggcagggcccaggctctggctcctgaactcaggatgttcagaggtgatgggctggtgctcacagggaggcctttggctctgggctgtgtgtactggaggggagaggaagtccccaggactcctgacctctggcactgataggctgattgaaggagtgagctgtctggatggtctggtgactagaaaggcaccttggccaagcactggtctgggcacaccgatgccctgtcaggtgagcctggccatagtctcctccactggctggacttgggactgcttagcatctctctaccccctaggaatgcattggccttttggtggtccaggaagactgccagatccgagactagaaaacaagcccagtctgcggttgatccaaagggagagaagtgatgttgtaggcacagaagcctagaggctctggggtgggggatgaggagggttgtggggtgagtcagcctgttggtatgtatacctagtagggaagggatgtcagctgtccaggcaggtgtgtgtgcatgcgcatgagccagacagggctctccctgcttagaatctggtagccaaaccttgtttacttccatagataaaggcaaagcggaggccagggctcctcctctttcttccccggactgaactgtctgctgggatcagggccagtccagagccttggttccccctttctctctacctgctgttctggccaggtggggctccagggcaggggtaggtcacctctcataacctctgtgagcactttacagcttactgattgctgtgccacacatcctctcactcaggcctcatcacaacaacttccaaaaagggtgctactagcagtcatcccactttttagattaggaaactaagactcccatgttaaagaatttgcccagggtaacactgcccataaatggtaggcctgagattcaccccaggggagacctccaaaaaaagtcctgtgctgtttttcacacaagaccatctctctggtaaaaacctagcattctgacccaaaatagcccagtggataacagaaccggggattggggagtttgggggccagaactgggctggggccacatctgggggtggtctccgttctggaaagtggagaaagggctttcctccgcagacttttcctgggctagtctctctgccaggctaaggagggtcctctttcctccctatccttccagtagctctcctgggtctctgaggagaggcgagatggggattcctgtggatgggagggggacatatctgagggccagtctgggccaccaagtcccactgaaccagggctgcagcctgttccacaaggaagtagcagaaagtgtaggtggtgatgactcttactgacctgagttgctcatgcccttcctgctccacagaggccccatgggagtccctctccagagccagagtgtgaaattctggagtctggtcagggagcttagctggactatggccccatggtcttgagaccagccatcctcatctggaaacccccaggacctgcctgtttgccacaagagagggtggagtggggatttcctgggacattgagggaggcaggtagggcttggacttagtatgagctccaggccattctaggccattcttagagtgctgcagtgctttgggaagaggaaaaagctgtgtgtgtgtcaaggggtttattctcacctgggtccagttagagaggttggaggtgggtaatgacagggtagagccattaagggctagggtggatgaggtgggttgggtgacgtgggtcacgggcactgagagcttccaaacctttgattctcctattgcatagataaatgctccccagaatgggtttgtttgttcctccttctgcctgtggccaggccaggccagtacagattcctgcagctggaggcggagcagcttgcacttcctcttctccccttctcttcccccacctctcctcctc

SEQ ID NO: 61546 - DNA, 1792 bp, Homo sapiens
gcttgctcccacttgtccctcgttcttgctaggcttggcaggtatttgttccctgctccttcacgctctcagtgccgtggccacgtcgctgggtacgccccaccaggcaagagacattttccgtcttgttctctgccacgtccccagagcctggaacagtgcttggcacagagtggacgctcattcgtggagtaagtgcctgatggataatccatcacttgcttttctagtatgaatggtctatttacgggtccagcgcccctgctggcttacgaccttttccagggcggggaggggctgtcctcatctctgtgaccccagcgcccagcccaaggcctggcacagagtaagtgctcaaccacattttggtgaatgagtgaatggaagcggcccagcaaccctgagccaaggagccactgtggggcaggtcagggcggttcctggcacagggcttcccactagcctggccaccagctctgcggtctcctggaagctggggggcctttgggtaagggagaagagtggccaggagttgtctgcgtgtgccctgtgacggtgggatagagacagcgattggattgaggaacgggaggttccccgaggctgtttagagaggcgggagcgggagctggtcagggaggctggacagaccacccgagggagcggagcttgggcacgaaagccaaaactgggcggcgcggggcgggtggggaaggccggctgagaaagccgggattgcctcctggtgtcaaagctcggaactgcagcaggatcctgggggcggggcttgtgttcagcagcactcgccacgcgcccagccctcagccctcgtctcgccttctgctggctggcccggcgacgttgtgcgccagcgtacgcggggctctgagaacccggaagttacgttttaggcccgcgtcacgggggcgggagtcagctgagctgccggggcgaggttgggatcacctggcaccggctgaagggagcctgtgatttttttgtagcgggggcggggagtaaggtgcaagactgcgccagattcaaggacgagggctgcccgattatctcgctgcataaggcaagagcaagaggatcctcaggattttaaagaggaggcgacggctgcaggttcccaggatctgtcagaggctggggagttacagcttccattctggggcgacggggaccccgggggggtagcccttttgtaatccccaggccccggacaaagagcccagaggccgggcaccatggcgtccatcctggatgagtacgagaactcgctgtcccgctcggccgtcttgcagcccggctgccctagcgtgggcatcccccactcgggtaaggaagaggagggtgccgctgcccctttcggctctcctagcatttgcgtgggagcagcgaggagggcagctccaagagctcggggtcatcccctgggccgtgccttccgggtctaggcccctgattctcctcaggctctcttggcccccagctggtggatagtcgaagtttgaaagagcaacgggagctgccgcgtgatctaggctctaccgctagggtccttttgagagggaattggggcccagataaggaattactcacctacagggcgcagttgggctgttgggagaacttagaatgggctcccggcttctgctgatgcttttcccaccaggccccttctggaggtgggagggaaggaatggacaaagaaagtggtgaaggcggagtattgcagaggaagaagggagggtcccagagggaattttgtcgctgaacggggaaaatg

SEQ ID NO: 61547 - DNA, 1518 bp, Homo sapiens
cacataatgggtgcctaatacttgttagttaaacaaacactgccctattgctccctgctcccagagggcttggctaaagcagcttgggacacccctgccccttctgtcttctcctaagccagcccatctggtcctaggctgcttcctctttcctgggaaaaggccccaggcttccctggcagggacagaatagggttccggtgagtcagggcaacgggaagccacagctcttagatccctggaagccaagcaagacatggaatggagagcagagcggaggccctcagggctttggccctaagcctggagggccagaggggggtggggtgggggagcagctgcgtgggcaggggccaagatgaatgagctactcctggagcggtcactggaaatagaaggagtggccacaggcagtgacgctgggaccagggcaggaggcctgtaaacaaggaagccacctgggggagacgcagggcggccactggtcctggggagcaggtgcttcctgaggcccgccctggagagggccctgggggccgccccgccgagtctgcagtgggcactagggggcgccgtctaccggcttcccgagcccaccgctccctaccctggctcctgggggtgtggccgccggagggtgtgccggcccagagtcccaggccctgcctgcccggcctctccctcccttctcctgtcaccgcggccgactggccaagggcaccagccctggagagggcacagggctcagcgtggccagctcggatgtgagctcattcccccgagaccaccagttctagttcctgcccctcccccaaaggctcgggtcgcaggctggtgcctggcacccaccccaaaggttgggagggggctcgaggccatcaggctccaggccgcacttggcgctgccccctggcgccagggaaacaaaggttaggggcccagagggagttatctggccccaccgccaccgggtgggggaaggggaccaagagggggcgcagttcccctccactcccccagccctactgattcttcgagacactttcacaggcggaaattcccagaggtcagaggagggaaacggttaattccttttattcaatgggtcccccctacacgcctccccccaacttcctccctccacttcccgcccccccctgtgtgaacaggaagtggagaggaaaaggctctgagcggagcagctgggagcaggaggcagggagtgggcggcgggcttggtgccagccctgcccctcatgcttacttgccggagggccaggccaaccgcggcctgggaaagaacctgcagccccgctggcgagtggcagttgaaccgggaaacagcaaactccatgccctctttccttaacctgctcccaggttacaggctgctgtcctcagggtgccagacatcttctgctcaagagccagctgccctggccaccacagccccacctccaccaccaggctgggcatcccgaggctggcaggcatctcttcaggcagccgccagtcctg

SEQ ID NO: 61548 - DNA, 1060 bp, Homo sapiens
cctttctgtaggcgtaggaccctgagacctgtcccagctcatccctcacaaggccctctgacttcttcagatatcagagtggaattggaagaaagaagcttgcttgagtaggtttttctggtttcttgaacaatggcgattctaaggaaaagaggttcaggatgagaatgagaggaagcccacaggcatgtagaatatggccacaggtgggacaagagtgcttccttgggatgggggtcctggttccctgaaggaaaggagacagggcactactccagctccaggagtctcataggacaggccaagagggctgggcagacaccatgctggccgctgatcaggcatgactcctctgccagcctgccctcgcaggccagcccagaacttgcacaacagtcggcctggctggcactctcccgggagcttcaggaagtcccccttgtcctccccttgacctttgaccccttgggcctgctgccgaccagaataccaggcagatgttctctcttttaccttttgttcctggtctttccctctaaggctggaactcagagataccccaaacccccagcttccagctcatccttccccatgctctcagtgcggaccagctggagcctccactgggccgctctccatgtgagccagtgtggatccttggccacagccggcaggacgcttgcaagtgccccgactccagacatcctcccaggtgtccttcccgactagctccctgtcccaggccccagcaggtgaagcaggaacagcagacagagcctccttccctccccggcatcctctgaacagtcaaagttggaagaaccctagatattgttccacattaaactatgcacgcctcgtggcactcagtttcacaatcaaataactccctctggttttctagtggaatttctgcttttattttatagggtttcttggcttctttttttttttttaagcaatcagtctaaatttgtcatcacacatcccccatttccgcccctaagggcctccttttcatcccctggaatctggaaaccatatgtgtgggcagaaaccc

SEQ ID NO: 61549 - DNA, 2058 bp, Homo sapiens
ggctgcacaggctgccagactcgcagagaagagccccggagaggagttggctggcaaagctcacagctgctctgatgcactagatggggagctggagagcccaccaaaaaagctggctttctggggaaagtggggacccgtggggaacttggtctgggcagctccgacctgcagctcatgccaggctccacctttaacaacatcccacaagctgggcaggcacttggggtgtaaacaggccacagcggaggaagccccttctccccaggatttcctgagagtccagccccttctgataggtaaggcacccaagaccctcatgatcacttgagtgtcctggggtacaggagatttcctaggcttggcagaaaggaggccagataatggttctagactcactgtgaggtgccttccacaggttagcaaatgcccacctttaatttgcatgggtatttcaccagggaattcggagtttagtagttccttaacagcctggagccagtgccctgcctggagaatcaatttgaccccacggtgacctgaggacagctgcttttccagggcccctcggctggtagagtcagggaggggttgtgcagaaggagaaatgactttatcctgcttgctcagccagggttcctctcctgcctcagggccagggtcagcctggtcagggggtagggaaaaaaggacagtggctcccacctcccccatcccaggctagaaaaggccaccagactaaaccacggtggtgtggatgctccatctcttgactgggacccacagagctctccgtagcttccctcgccgcagctctcccagcctctccctctggatccacaggatcagcggccccagccctccgccccacgtggcttgctgcattccgggaagggggtggaaatgattcactgggggaactgtgactgtcccttcctcgggcggggatgcgcctgcgaggtcccagcggccttccctgggcggctgcgccctccctcgcgcccagggcgccccgaggcctgcgcggcggcggaaggggcaggtgcgcctgcccgcccgggtcagccctccacctgccgccgccgtgccccgcagctcccgcggctccccgccccccgcgctctttgttacagcccgacttcctgtttgcggcagccgacccggctcacttcccgggccgggaagccgccgaaggccgcgagcttctcggaggctcccccgcccgctcggctccgcctcctgcctccccaatctcgctccggccgcggccgcgggaagcggagccgcgggcgggcaggcgggctggaccgcgcgggccccgctgcccggcactagagggcgctgcgcggccgtcggggctgcgcgcgggaggggccgccgaccccgggaggctctctggggccgccctttctccgttcggggccgatgggacgaaggcggcagggggcggccagacgcccgagctccctccgggctccgagcccctaagccgagcgggcaaaatggggagaacccagtgcggggctttcccccaaatatcctcccagtgtcctggggaacaggccctttcccctgcccccgccgtcgcagcagccagtccccctcgccacccaacaggcctccggccatcctggtccagagacatcctcaagggaagagaatggggtcgaggagggccggacaccggtgtgagttatggggctggagctcccttccagcgccacccctcattgccgggtgctctgggacaagtccatctacttcattccttcaacactgattagcattggaggcaggacttgctgtctgcccagggccgctaactatctagctgcttatccttaacctccctgctaactatctagctgcttatccttaacctctctgcgggtaatgcctgttaggcgttgctaggggggttgaaatgaggatgtatggaagcgtttgtgagcagtgttgtaacctctgctggtgggttaatcctcctcacgcatctctaagtgagccactttctggagctcccactgctccggcccgcatcagcggggtgggacctag

SEQ ID NO: 61550 - DNA, 864 bp, Homo sapiens
cacatgcctggcttgtgttggttctcttgggccttcaaccatgaaccatactctggggaagtgctcaggtgagtgagaggcaggacgcaaacgattcccagcaaggaggctctggagctggcccagctgccttcagatccaggctccactactttctgccacgtcaccaacagggtttacctagctttcctgcatgcttatctgtgaaatgatatttacctcacaaagtagtgaagaaatgtgtaattagaatggatgatgtaaaggcgtttagcaaattgcctggcacatgttatacacataataaatgagtgtttctgttgtaagcacgagttggaagggacagataagtaaactgcagtggcgtaaagtgttgtgggagtgtagaggagggagtgtctgactctgccaggagcaagatcaggttattgaggacattgccaaaagagttatgaaacactgggactttggtcagggtgggaggaggtctgagaacgggcatcatgaaaatgttccctaaatgtttcaggtatgctatccatccctccccctccagaaaaccactaatgactctttaaaagtaacttttttttttttttttagacaggatcttgctctgttgcccaggttagagagcagtggcacaatcatggctcactacagcctcgacctcctgggctcaagcaaccctcctgcctcggtctcctgagtagctgggactacaggtgcatgttgctaagcccggctaatttttaaaaatttttttgtagagatgaggtttcattatgtttcccaggctggtctcaaactcctgagctcaagtgatcctcctgcttggcctcccaaagtgctgagattacaggt

SEQ ID NO: 61551 - DNA, 2148 bp, Homo sapiens
gaaagtcctcctctggtgccagcctctgctaactgtttaggtatattcttccagattatttattacacgaatactttttgtttttaaagaaatagctttgtactatacacactgttgtgcaagtttcccacttatatctgcgacaccttcggaatgaatatgtgaagtgtgaagatcacgtttagtttaaatattgaattagaatcgaatgagaagccatgttgcacattgcccctgccagccatctcctggccagtttagagagaaggccttcagctgcctctgtttcccttttacagtcagtgacatcccctgagggcagtcccttgctgcgtattgggtcaacccccggcggcctgtggactcggctgggaggccagaagccgagggagaagaccagtagctggccatagtcttgtgggggcctcactgggccctccttgcccgctgctcccggaaccttgtgcctatggattaatcattgctgcaaaatctcacgtccaggaagaattaaacccatcgccttgggggcaagactagcctggcttttgcatctttatagcctttctccgcaggtgcagccaccacctccaaagtgactgccggtcggtccaagcgctctaacaggctcttccccgagcctacctgggctcgaggggtcccacacctggtccggggcgtagcccatgtgaggcctgcaagctccgggcgcctggcctacctaactcagccccgcagtctctgcagaaccccctgcagccccgtggcccagtttctccatttgctcacaatggccaacggcgtgaggcacttgagcggaatgcggacggtgcctccgacagctttcccgcagtgcatgatctcaggaggggccccagagacggaagtttacgacgcccagagcgctccttctggacgtgccctggactcgacttgggactgagtctgtgccgcctaggctggcagggactcggccagatgcactagcggcaaggctgggctgacaccgcctgggactcgctcgccgtacctccaaggggcccaggtcatgagggggcggctggggagacgcccgcccggtgcccgccctgggcccggcgggtgccccctgcccgccgcctgacgcaatccgaggcgcccttgctgcatgccggcgctggagaaacctcccctgccgttgcatcactcctgccaggtttgccacagaggtggagctgaaccaatcagcgggcgcgctgggcccgcggcgcggttaagtgagaagcagaatccgaagttgattggccaaaaggggatttgccccaccccaatcaccgcggcagctggccgcggtgggcgtggtctcccggcaagaaggtttaaagggcgcctccatggggggcgctcagctggagctaccgagcggtgccaggccaggtgtgtgcgtccgtcggtctttccgtgcccacgccggagaccagccccggaggccgcctgggcctatccctgtgccaggcaccatgaagcaggagtctgcagccccgaacaccccgcccacctcgcagtcccctacgccgtccgctcagttcccccgaaacgacggcgaccctcaagcgctgtggattttcgggtacggctccctggtgtggaggcccgacttcgcctacagcgacagccgtgtgggcttcgtgcgcggctacagccgccgtttctggcagggagacaccttccatcggggcagcgacaagatggtgagcatccaaccgtgcccaggggagtgagggggttgggggcgggatactgggcgccagtgccctggaatgtccggggctctctgggccaatagaaagaaatgtgtaaacctgtgtctggggtttgtggctcatttaaatgtatgtgcccagtgcatcactgtgatggctggagtctgtgaacctgtggatccctgtgttgatcaccaactgggaccactgacatgtcagtgtttctggacgtttctcctacatccgtgcatcgctcccccaccttcccctgcatgaatgggactcagcatgcagagtggggcacttggaggcccgggtcagcgggattgataaaggtttccttgctgatggcagagctgatttctaacttgtctatttcaaaatatttcttccctccctagcctgg

SEQ ID NO: 61552 - DNA, 1055 bp, Homo sapiens
aggagaaaacaaaatcccagaaggcagcatggtggtctgggtgccctctctaggaggctgaaaaggcatctcaactcagggtctcttagaacagaccttaaagactaggcatctggctggtctgtaaagaggcctataaaaccacacagcaaagacatgtgtaggtctcgctctcactcttctttaataacccactgaggtgactttgcaccaacatacccaaatagtgctaggcacatagctgactgcagtaaaggcttgttgaatgactgaaaaacaaccacaatgaaagacaactgtgaatctctacaacactcacaaagaaaaaatccatgctacagtcactttttcctcatgttttccaaagagtcacactgagtggtcagataatggggagaggatccatttggtaaaggtcatgggttaggaggaagggaagcaaaggccaaagcaccacagagcaaagaccttgtgaatggcttccaggatcacgcactggtcacatgccctgaatgctgccccgtcaggacatcctggccaaacagtctttagtctcagtcagactttttcctggaaggatccttcataaataaatcttgtatgaaaggaatgtaaatggctttttataggcgttgttgtttactctggctgacctttgaccacagggctttccagttgaaactgcaattttttcttttgatgtccttcattaacagtaattaaaatatttgggaaggagtgcttgtgtccaaaaacacctgtctttttctctatatcaggcgattgcagtcactcaaatttataagttgagcattttccgccctttggaggggtcagcatatgcatagtccagattctacacatgagaaatagattacttctttgccataatcccaactctaagcaaccagtttgtaatgtaggcagggatcagaaggagactttagtctctttttccattttgcccaatattagacagagggtgttaaaatgatggttacccaaatgttgactctaaataacattcactgttacctaagtaattctaagttgta

SEQ ID NO: 61553 - DNA, 739 bp, Homo sapiens
aggtgtccatataacagggaacaacaatgtcttggaagaatggtgctttttgtataaaaagcagaactgataaaaatgtattacagtagtaacatatattaccaaatttaggggttgagagaaggaattaatctttacagaagattaagcaactcttcagacataccagtgttcccagtagacatactaggaatatttcaccagcaggaaatcaccctgccaccactgacagcattactccaaacaggctggaatccaattacattaatttgcattactgattccctctccaaagtccaaaaattacatgaagcaatgcttaagaaaccaactgggaaaacagaagagaaggaaatcatgtgagcttttcagtgtacagggggcaaatactgaatgagctagccaaagaatgtccttcattctacaacagtaactgtaaaactaccccataacattttctataggatacaaggaaaatgacctagtttctaaacttcaatctagctgaaggactataacaaagaactgtcactcctcttctcaaaactctctagcattactcatttcactcagaataaattccaaaccctcagcaattcttatgaggttccatatgacctggacctacatctataacttcagttcctgtcaccttctttcaccttctttgtcacctactattctgtaagggccaagaattatatgaaactgtacacaacatcattacttttcatggaaa

SEQ ID NO: 61554 - DNA, 2912 bp, Homo sapiens
tgaacctgggaggcggaggtcgcagtgagtcgggaccccgccactgcactccagcctggacgacagagcgagactcagtctcaaaaaaaaaaaaaaaaaggaattaagtactgatacctgctacaacacggatgaaccttgaaaacaccatgttaagtgaaacaaactaggcaaagaaagatacatatgtttcttttttaggtaaatttaggcaaaaaatatattaatagttacctaagactggagggagggggaatggggagtgactgctaaatggcttctagagattctcttttagggtgatgaattaaatagtggttgatggctacagaatttaataaatatagtttcagaaaattacttaattatacgctttagaaagcggaattttttggtatttgaatcatatttcaataaagctattatttaatttaagttgccactgaaaagccacaataattttgttgtggaggaaataatgaaagtcactgactggaaaagtaacctgtgacgttagccaggtcaacctccaaattccttcccccatttctaacaagtacatcaaactagagacagtgtgtgaatcaaagaattccaggcacagttggctgttaactagaatagtaagtggctgcctaggttctgtcattcctaaactgtagggggcttctagcctcggagattacggaagtagtactttccattagcgagctcaagaaggaatgtcaaaataggatgacactttcctagtcgctatgtaaaaacctaaaaaaccagaagaggtgtcatctagacactcccaagtctatgcaggtgtcagcctgcccccacccaacaccagccagcagcgtgcaccattcaaccgtatctcaacttgccccttacaaaatgacacactaacaagcccttagatctcatttgtttaaaatgacagatacacaaccttcacggggttcccactcaaggccttccagcctccgccctgcccctgcccacccccaaacctacacacgtgttagcccgacaccgccccaccgggtcccacgtgcacctggtctaacacactccccacgtgtgggcgccccacgggcttcctcaggtggctgaggtcaccgcatgaccccgggtctccagagatatgaaacgggaaggacaaggccctagtccctgaggtcccaaccctgcggggagtgtccacacccatcctccatactaaccccaacaaatccaagggccgggggcgacggcccctttaagacgcggcccagttgtcgcccgcagagaggggcgcaacaagacctacacaacccccactccgttcgcccgcccacgtctagttgcctcacctcgggccgcctggccccgccgccgcgacggcggcggagggggggcggggtgcgggcggggtccggaggggggggtcgccccgccgacggtggagccgcggttcgctctctgaggccgtgggacggtgactgcgttgggcgtggacgctcctagctcgctccctccgcggctcctgggaccccaagatggcggcggcgctgaggcggctgcgggcgctgggccggcggcggcggcggccactttcactcactgagaggagcggagcagggacacggggagccatggcgggggggaggagaggcgccatagccaggccagaacaatcgagccgctacacgggtggcttacccccaccccgcccacactcactgctcgtcgcctgcccgtggccacccgtagtgccgctgccgtcggcctcgcgcagctcgcaccccgccgctgccacctgacgccccgtgcgaaccggggttcgaggggagaccctgatccatgccatctgagtacagattagtcgggactgggactggcgaagattgccgaaaggcggcggggaggaggaggaggatgtcatcgctacagtgagcaagcagatctcgcaggagaaaatgtcgcgagagctttccaggcccgcaaccgccgatgcaaggttacttttcccggaagtaacgtcaatcgaaaccgcccgggatcctgggatatttgttcccgcaggctagaggtgggaaggtgcagccaagttgataagatctctttaggggaaggagaggctcgcagctggtattttgttactagtttctgacccctttggatggggttgtagattgtcggggaagtgcctggtgtgtagttcgactactatacagtaattagtttggggctcccatttagactctgggagcaagaacgctataggttgggtaggacagcatagttagataagatgtctacgtgaaggttgtgggatacaaggacttgggaacacgcagacctgttatcggaaatgccagcctgttctcacatccacacagtgtgcctctgaaaagcgaataattgcttttacctgtgccaattctacaatttgagtccactgccacccacatttactaaacttggggtctcgctatgttgcccagtctactgggctggttcccagtctcctggcctgaagtgatcctcctgcctggaaggatcacctcaggccaaacgtctcagagcagtccattagactggtcaacatagcgagaccccgtctctacaaaaaagacaacataataaatgtaatcgacccaactaccaggatgtgtggtgagaattgcctagggtaaggcctaggtgtagataagaattagaacttactgaaagttaaatatgctgttaattcagttcctttgggtctcattctttaatccattttaacctggcccttagcatttaactaaaaagtactttattaaggtcatcaagtagccttcttgtgctgagttaactgacctttaaaaagttaaatttgtgtcagggtgcagtgccacacgcctgtaatcccagcactttgggaggtcaggtgg

SEQ ID NO: 61555 - DNA, 924 bp, Homo sapiens
cctgcctggccgcgtaatgttttatttcttgaactggatgttcactttggatttttccgtaaacagtacattttcatttagttaacttctaagtatatttcacaataaaaaagtttttaaaatttcctggcattcctctcttgttcctctaaggcttccttgaaagtttccagttaccactctcacctggaaatcactacaaattagtttcgtaattgagatttcacaagatgctagatcaaaatgctttaccgatagcccaattttgaatatctaacacttctcttcttctctcattcctggaattcttaatccaaaaatcccccagaaaaccactcataccaatctgacaaggtcaactatttaaattcatcactgctgttgattagtcagaattccttcatcctttagaggcgtacacattttttctttttaaatatttatttctttatttgatttaattttgagattagaatcgcactgtggtgatttccagaaacattttccgaaattcatgtattctttcctcattcttcctgaattcctattatttgttcagcacctacaacaaaatcaggggggcgggggacgtaggaatatcacaatgacacatcgttgatatttacaaaaataacagcaaatgaaagatttaatctatgtcatacaatgagaaacacaactgatggatgatactttgatttccctgttgtttttaaacattagcaacgagtcatacaatattactggtatttgcatttcatcatcactaggcctaattttttctaaccgaagggagattttcaacatacagttagcttttcattcatctgcctgaccaaaatctaatcctctgacatctaaatctttcttggttgtcaagtttcttctaatctcatttataggatatcactccaaacaccactt

SEQ ID NO: 61556 - DNA, 1907 bp, Homo sapiens
cgtgagccaccgtgccaggcctacctttttaatcaaaacaaacaatacaccatgagaataaaatgcaaaatttctcatttttaagacaaaataaggaacttcaaataaatggcggaccataagctaggaattcactgtcctccatcgttagggctttttcctccgaaggaagtttgggaaatctggatcctaatttcagccaagtggtgcgttcctcgaacttcagtctagaactaaaagaagaggggctgcaatgaaggaagaagtctcgggacgctccacgccacccggcggcggttatcaaatcacaggctgaaaacctggagaaaggtccgcgacgccggggacacacgccgcagaggcgacgcccgcccggcccaacgtccagtctcgtctgtttcccgaggagccaatcagcacgcggccccgaggccggctccccagcgccccctgcggccgggaggaggacggcagccaggaaagatgaagagcgcgtgcagtccccgaagggtacaccctagggttcccccccacgcgaagtttctctccgcaatccgtgccacctatcgagtaggattcctagtgttcgattcctgtgagaaaaggtagactacgctgcctgtcgcaggttagtttgttgtaaaactgttggtcaatgacgttgcccttttaattgcgtcgttagcgaccgagtggcatcgcccctttaaggccggtggcagctgcggttccgggggcggggtccgtcttcagcaggacttgggctggagctgggctgattcattcggggctggaactcgaacgctgacgttggctcctgagccgggcgctgcctcgcgcctgattggcgggtcctcggggccgccctccccagcgcaccacccctgggttccctcccgggtccgcagtggaaacactgccctctcccttcttgacccctagcccttccttccctccctccttccctcctgtcgccgtctcttctggcgccgctgctcccggaggagctcccggcacggcgatgggttctcgggcctccacgttactgcgggacgaagagctcgaggagatcaagaaggagaccggctgtgagttcgggttgggggtgggaacgccgggcgcctcaggctggcctcacaaccaagggcggctgtcgctaaggtctggagctcgggtgcctgtgaggttggggggtcctgggcagcctccaggtttggggaccgagagctggaagacctgttcttccagctgcagcttcctggagcggggctctagctactgtggggctgtccttcccttcaaaatcgggactcttgatcactcgtagagcgtcgacgccccccttttctgcaccctgcccatcaaagtccccgaactcctttcctttctgttgcctcgcaccacccttccctatgaagaggcatcctgaacagtaggtaaagcccgagaagcaaattcaggaactcgagatggattctgtagaaaatccgtttctgggtaaggacctaaaacctctgacaactatgggaaattacaaacaagttcttgtcacaaattgggaaaaccacccagaaagcaagaccgtgtagtaaggctttgggagacatgacccgatgcctggagacctttaaacaatcaggggtctgggattgtgagacttctttcaatctgaacttctagagaaaaaacacggatactgtgaccaccagttttttacttacacgacgatacttgctgtcctaatctcatatatgtattgatttctactatgctggtgtacttttttattcgctattgaaattggatgtgctccaaaaatctccgtgtgaatttgtactaggaactgattttttttttttttttttttgaaacggagtctccctctgtcaaccaggctggagtgcagt

SEQ ID NO: 61557 - DNA, 498 bp, Homo sapiens
gaaagtgtaaaccatagtgaagatgcaaaaagccatttttgcttcagaatgaagggagcagtaatcccattctggtttatatacatttgaccaaatggaaatgacctggatgggatatttttaccatgtggcttgtggacaaacaactaagtgctcatggaaaagctgttttccccattgccaaagagtgagtcacttgtgagggagattctctccacaaccagtgcaaatgtatgtattgagccagaatgcttagtgaaacaagtgcttactgaatttttacagtgtctgttcagtactgtgctaggtactcagagcagatggtgacaaaaaacgcccccaacctggttggggagataagcccaagagagttatgattagcatcatgacataagaaagctgagaattgtgtgtcatccaccttcagaaatcaggcaagagagagagtccttgtgggctgtcctcatggaggacaggaattgggccttgatacatggg

SEQ ID NO: 61558 - DNA, 1175 bp, Homo sapiens
taattctttaactgacttatttttgttaaactaaagggaactttagtacaagaatagcctttgaggcctgaggccagaactgggatagactggtcaagttcttaaagaaaacggttgtaactggcaaagtcaggagggaaatggagagtaattagtgcagcagtaatacttgtgccttcaggctcaggatgtaagcatgatgctgataatagctaatctggagtgcttgccatgtgcctggcactttgccaagcattttcctttcattgactggtgagttcgctctacaatcccattcacttacctctctctggtaagccatggtgctagcaatggaatcagaatctgtctgcctaaccctcacaagtgtgtacactttacagtgagccatttatacctgtccggctggcaaaacagtccacaactgtctccttagtggctggatccctgctggctctgccccgatggaaatgcttttgccttctctgctcagtgatcactttagagcactaggacagaacagagcccagcttcgagggtgaaacctgatgctgaagaattcacagccacacatagtgtgtcctcttatcccagctctgggccactcactacctgcttgtccctgttcactttgtcccattgttcccaacactacaagtacatttttgtttcatgagctgagggaggaggacaccttatctgaatgactttggccacccctttaaacctctgaaggtacagcctcggacaaagtccacacttgtcacaccctttttggctgttgtcttttctcctctgtttgtttcccctctcttacttccaatctatcaggagactaaactatttcccagaaaggcctttttgagtttttagtattattatgtacctgccattattgcctcattttaattgtcaacttgtatcttgagtttatggactaaatccaaaatgaggagcaaaatagctttctggtagatgtcatctgatgatagcatgaccattttacgaatttgcctaatttgcttccttggagccagttcccttcctgggaactcagtgaagctcatgccatcacagaaaagaggttgatctttatgttttccaagggaaaagataaagcctttaatgcttggtgtaggagtaaaccagagttttaaaatagaatctgtttgatg

SEQ ID NO: 61559 - DNA, 606 bp, Homo sapiens
gatggttttgatctcctgaccttgtgatccacctgccttggcctcccaaagtgctaagattacaggcgtaagccactgcgcccggcctcgccttcaccttaagaaggcagttgtagttattaggagaaagattttcacttcaacaattttttttttttttttttactttcctctttcaaggtgctccatgtctgggcctgaagccaaattctgcagagtgagaggctacagtgtacagtctggggcattctgcattcctttgtagtgatcagctccagtggaacataaggcagaactgtggaaggctttggttagaatggagcttcttcagagtgctttcagagactcactccgaagcatgctttatagaacagtcattccttggtctatcaataggtgttatgttaaaaaaaaaaaaaaaaagcaaaaagttattgactaaaatttgtgaaaaccttggtcaacaaggttaaataggctacctaattactagatttcaccacatctttaatttacctgggtgaattgggaacattcaagggagaagtgtttgccaaattgatttgcaatttccctgtctgcctttttacatggaccatctcttca

SEQ ID NO: 61560 - DNA, 2168 bp, Homo sapiens
aggaggttgcagtgaacccagagatcaagccactacactccagcctgggagcgaaactccatctcaaaaaaataaaaataaagaatttgggggagagtaactttcattcaaaaggttcaatattagggctgggcaccgtggctcactcctgtaatcccacccagcactttgggaggccgaggccggcagatcacctgaggtcaggagttcaagaccagcctggccaacatggtgaaactccgtctctactaaatgtacaaaaaactagccaggcgtggtggagagtgcctgtaatcccagctacttgggaggctgaggcaggagaatcgcttgaacctgggaagtggaggtggcagtgagccaagaccatgccattgcattccagcctgggtgactgagcaagactctgtctcaaaaaaaagttcaatataggaaagaaatatggtttttagaaaaagaacacatactttgacttacagacttagatttaaatcacagttctgctacttaggagtagtgtggctttgggcaagttactttatcttcctgactctcaatttcctcagctctaaaagggtatacataaaacattggcgtgaagaaatgagaataatgtatgtaaacagagcagcacatgatatatatgtgatgaatggtaactgacaatattcgctttggtataacctcgcctaagtcatgtgaggatgactgctcttgtcatgtttgagggttaaatacttctgtagccctagtccacagaacatggaaatggagaaaaagccagagtcagaacaaggaaatcaattggttgtcacattatttccttgcatgtaaatagcacctaagaattccttgcattttgtaagtgcctaaaaatcttaacaaggatatggagacccctctaagtgtttgtccccatattcaagttctgcagtatttgatactttccatttgctgttcactttccaaacttaataactaggtacgcaatgctaatgttcaagaaatcatttactaagggacagcttagtatttgtccatcagttggcttattgacgtaacctgtgtgctaaattcactggaatgtggcgtaatcaaatctggctccttccacttctgagttggtgcaagaaacacttggcagctattaaagtgctattctttgcagttatttggtataatttgccacagaagtaaattccaggaggtaatattcttgctaggttacaccctgttacctcctgacttaaggagttcatgctaagggcaatgatctctatctaactcaaggtgattctcttggcagccgggaagatttccagaggattccagaacttgccatcaacccactgggggaccggatcatcaatgccttctttccagaggggtgagtcagtacagttgttggacttccttcctgaggctatcacaacctaaattatttgctaatctggaataatgatattggttgtgccatctcagactgtgataccccctgattatattgagcaattctaattttgtcatttctagaatatctcttctgttctaccctcctgtgtgttttaaacttcaaatagatatatgagcctatcttcaaaattcttatgtttatcattgatgtaaaactagacttttaaaaaatgtttatttggaaataatttcaaatttacaaaaaagttgcaaaagttaaaagtaattcggagaatacttgtatatttattgccctgatgcatctactgttatattgttaacattttgcctcatttgtgtgctctcttcttagtagtagccaataaaaatataatgcaagccacatacgtaattttacattttctagtaaccacatttaaaaagtaaaaataagttaactttggtaatatatattttatttaatatatttaaaatattatttccatatataatcaatattaaaaataactgagatccttttttcgtttgtttgtttgttttaagacagagtcttgctcggtcgctcaggctggagtacagtggtgccatctcggctcactgcaacctctgcctcccgggttcaagcgattctcctgcctcagcctccgagatagttgggattacagccacatgccaccatacctggctaatttttgtatttttagtagagacagggtttcaccatgttggccagg

SEQ ID NO: 61561 - DNA, 2256 bp, Homo sapiens
cttatctaatctattactctgttttattaacatattatccagtttattctaatttatattcatattccaattttgtcatccaataatctgttttatagcacttccccgcctccagtacaggatctagtctgggtcagttgtcatgtctctttagcctcctttaatctggaacatttccccagcctttattttactttcgtgatattgaataaacatagttctcaccacatatgctttgtcaagtagattgttcttaatgtgggtttttctaacatgaaactagtcttttgatatgctttactacctaatacactgccttcacagtagtgagtaaatatttactgatttgattaggtaccttttcaacaataaaacttacatataagcttgttttaagtaatttcctaaacaatctattcctggtttatatggatagtctatgacccacaggacttcaaaatattatatgggtgccagtttttaataatgagactgtcaatgaggacactgtcagataaaatgcctggagaggaaattttagaactctaaattgagagcaaaggaatttgctagttgagagggttgggcattcaggaaatgtgagtgaaagtcagaaggggaattaggtcgggcagttagttcatgtaaagatgggaatcaaatcacgttgactatgaggaatcttatgccctctttcattttttcctttctctctccttgaactgccctgtttgtttcaggtgtggtttttatgctgaattcttccttttttctaattcctcttttacccctgcaaagcattgaaccctatccagagataactttcacagctatgctttgtatccaaaccttttgcaatgaaaagtaaacccaggagagtcactttgccaactttttttcagaattccttagtcaccattgattacttgaagaagcagcttgtgggaagctgttttgtaagactaaactacatttgctgtgactacaatatcacctgtcattctgtccaccaatctactgctaaggaaatgggacagagtgcatatgaggaagtggagggctctactgggctgcactgcttagctcttagcaagctgcgactctgcttcttgctctaatcagatagatatatttggcttctgggtttttctttcttccctaggcatatgcacattggggcttttttttttttttttttaaagaatgagatttgaaagtggaccatggttattcaattcccttttacccagaaactttatgctagcaataatcattaatgtgttttttctagcatatgttttaaactttactccacattacttgattcctcagatctgacatttttgaccagatactggtccattagcagtatagatacatcgaagaactaaaaggtcattcttttgttttgttttttgtttttttgagacggagtctccctctgtctcccaggctggcatgcagtggtgtgatcttggctcaccgcaacctctgcctcctgggttcgagtgattctcctgcctcagcctccccaagtagctgggactacaggctcacgccaccacgcctggctaaggtttcaccacgttggccaggctggttttgaactcttgacctcaggtgatccgcccgccccggcctcccagagtgctgggattatgggcgtgagccactgcacccagccaaggtcattcttttgagtacagatggctcacaggctagcctttgaactctgcctttagaagggctatgaactgcatgtctatagagcacagaagagaacctacatacctcagctattcggtggggcacagaaaggctggggttttttttttttttaggtaaccacaggaaccaggccatctgccttagataaataaattatattatgttacatggggcattcttttttaatattaaagaacattcttcattcaagttttgagaattatttcttacagggttattgattagcctgtggcacaatgaaaagattttctccaagcttaagtaccaaaaaggctttatacacaagaggtctttcaaaacttttttttttttttttttgagatggagtctccctctgtcacccaggctggagtgcagtggtgcagtctcgactcattgcaccctccatctttggggttcaagtgattctcctgcctcaggctctcaagtagctgggattacaggcatgcaccaccaggcccagctaatttttgtatttttagtagagacggggtttcaccatgttgg

SEQ ID NO: 61562 - DNA, 766 bp, Homo sapiens
tgaaacagtgttaaattctcttactcaattctcgcagccttttaattgtgcttgttatttttctcagaaggggatttagcatttaactcttcaaggatttttatgttttcttgggccatactttaggaatagttggcttaatgcagcacttcgaagaggacgacattttgggtgggatttcagaaagccccaccaaactgatttaaatcaataaggaactagttaggctcacgcaacaagaatgtttggcatagattgtccaggctggtacagtacctaactgatgtccaggaaccaggcttattctgtgttcctgccctggcatccatagctcatattactcacctcatggctccagggtggctgcagtgccaccagacagaatgaggtaagaagaatgaggaagggcaaaatgcaaaggactctcccttagtctttgtcttcttatccagtcacctagataagttctgcttacatcattgcctagatgagaagataaaggtttcagccttttagctgttacttagtcacatgatggtaaagatggggatacattctgagatatgcaatgttaggcaattttgtagttgtaggaacatcatagaatgtacctacatgaacctagatggtatagcctactacacacctaggctatgtggtgtggcctattgttcctagactacaaacccgtgcagcaagttactgttctgactactatatgcagttgtaacataatggtaagtatttgtgtatctaaacatatctg

SEQ ID NO: 61563 - DNA, 458 bp, Homo sapiens
aaaattagccaggcgtggtggcgcgtgcctgtaatcccagctacttgggaggctgaggcaggagaatcgcttgaacccaggaggccaaggttgcagtgagccgagaccacaccactgcactccagcctggcaacagagtgagactctgcctccaaaaaaaaaaaaaaaagttacgttttactgcacaggaggaaggggggaaaacattactcagataagagcttgggagtgttgtaatcttcataacctttgtaactgttactggttttctcccccaggttttggagaaggtggatgtagaacagaaaatgagcatccgatttcttcactaaaggagaccaaactgttccttgcggtctagtatttaagaactggaacttgaaagtcctccttctaccaactccacctccaccccctcattccccttctcccaaagtactactgctgttgcatgacaa

SEQ ID NO: 61564 - DNA, 2366 bp, Homo sapiens
ggcagaaacaaatcacaatggtgaatgtcatcagttaaggctattttcacttctttgtggatcttcagttgcttcaggccatctggatgtatacgtgcaggtcacaggggatatgatggcttagcttgggctcagaggcctgacacctgcccctctgggaaatgatgcagaagaaaggatgccctacagttgggtgtagcaaacaacaaaactgccagttacagcaggtttcctctatgcaggagggccttcagaaaagtgacgaatccttctctcctgtattgaccaaagctgtaaacagccggacaacgtttgggccctttaagagtcaaagacagagacaaactggaagcattaaattttttccctaggtgttgtgctacccctggattaaaagcctgggcgcggtggctcatgcctgtaatcccagcacttcgggagaccgaggcgggtggatcacctgaggtcaggagttcgacaccagtctggccaacgtagtgaaatctcgtctctactaaaaatacaaaaattagctgggtgtggtggcatgcgcctgtagtcccagctacttgaggggctgaggcaggagaatcgtttaaacccgggaggcggaggttgcagtgagtcaagatcgcgccactgcactccagcttgggcgacagtgagagactctgtctcaaaaaacaaaacaaaacaaaaaccctcgggcctgagaatgaaattattagtactacagtttaacctaacagtggcttaaaatagtcacgcggcctagccacactatcttaccacgtggtacagcttctacggcggaaattttacattcttaataattgaattacaaaagcatttctccctgttacctcaattctgggacccaatccggatcgaaagagtggggcgagtgctattgattgacgtgcattccaaccaacctacgacgcaaggagagcgcgcgcgagcaagacgatgcccaataaacactcagccccagcggcgggggcggggcttgtgggaacggcccaccgcagggttggccaccttgagaagctgcgaagatggcggagtaaggcgtgccgctgcaaactggcctctgggccgggggcgagcagcccccgggaggccgagtgcatctgttggaccgtgcgaggtgagccgagaaggccagtgacggtgggacgagcaggcgccgaggaggtggcgtggcccagacgggccgggtacggaagcgcgcaggaacctgcgagttgcgggcagccggcctcggcctcggctgggcgggggttccaacctcggcggctccagggcagccgtcacccgccttctgggtgtgttgcacggcccacccctcagcccgtctcggtccttcccagtgccgtgcctttagccacctttgtgctttctgcttgcacccacacggggctgtatctggcagccgctgcttctgccatcgatttatttttcgaagaatatctttgttttattgatttacttatacccctcgccttaggacttcgttccccctctttgcccgtcagcggtatcagttgaggcctgttgtggctctgagtattttgtgtccccagcccgttgaccttgagacttgtaacaggtttcccttgggaattgcattcgggtgtgtttatcgcggacaccctggtgcaacttttactaaagccgtccgctcccactcccacctcccaaacttttatgatctgagtaagcggttctggcactgatgtcctgataacgttctaatggcgcattaattttggctgatgccagggtcttgatagaattcaccgtttttggtttccgacccagaagtacaggagttcagtgtacaatattgtttttatagagacagaatgatagggaaatgttattagaacgtagtttgtgtaaagtggtggggttgcacagtgtcaacactgaggcatttggtattctgttctcctttaaccgaacgggttgtctcttttggtaatttggattgttgtaaccttaccctcatccggtctctcaggtaagattctaggaaagttcctgttactaggtttctgaattggtgtggcctgtttaaaactggcacattagttaagttccaacggacacaccattagacaaatgaatgtttttgggtatgctctttgttggccctggatttgctagagctgaaaaataatacagaaggacttttatatgagaccttttttgtcgctctgtcagtttattttttgtttttttgtctttgtctcatccaggagaagaaaaaaaatatcggccagaggagaggaactaaccgaacattcttcctccctaccttatagaggggagtggtcatctacactaaagcaaagtgttag

SEQ ID NO: 61565 - DNA, 1502 bp, Homo sapiens
cttagcctcacttcacttgtacaagccacctgggagaagtggccctcaggaagatcctaaaaccaatacacaaatacaactttttcatttcattaatacatcaagttcatataagagtcaaacaggtaaaagcagcatcccaaactgttttctcctcgtacatgtcagttccacgatcctcagtctcataaagtcagggactagagaccaatgtaattatcaatacgtacctgcctttgagtgaaccttcaatgccaactaggaagggcgcttccaaaacgacgttatttgtaactcctaggaagacaaacacgggtcagaacccatactctgcgggccttgaaatggaaaatctctcctctagacagactcatcctggccgtaaatatcaggagactccccgattccctgccccatccccaggccaaggagttatttgcttccaacttttcatcccgttttcttccccaggtggttctccgccacccggtggagaaagcgggaacaccctctcgggctagcctctgcctttcccgaacgcttcactgcactcactggagaagaccacggccccgagggaccgcgacaggtcccaggcgaggtgcaccgagtcggcgagcactgcgtgacactgtgcgcactggaacacagcgcacctctcaggctgcagccaagacggcagctgcgggccggcggctggctcctcagcccccagccctgcggggccgagcggcgaggaccccttcaccacctgcgtatcccactccatggaggtcgtaaaagaagcttggtcaatcgccctctcagtgccaccacaaaagtccccccggggcggcgttgcacaacgtgagcgatgccgcagcggctgagccgccatcttcccgcagccggcgccttcctttcgaatacacgccaggccccgccccaagcacagctcctgcgtcctcattggacatcatgggcaatccaagcactggagtccgagtccgcgcactcgttacctgaacaggcgttacaggccctttggcgcctgcgtattcgtgaagtgtgaaaaaagcgcgcctctgttgggacgggaaatcagcctttctattggtcagggttagaaaccccgcctttgaggcattttcaaccaatggaagcgcggcattcttcatttaaactgtctataaatttctgcctagtcaaagttaagagtggcgccagggatttgaaccgcgctgacgaagtttggtgatccatcttccgagtatcgccgggatttcgaatcgcgatgatcatcccctctctagaggagctggactccctcaagtacagtgacctgcagaacttagccaagagtctgggtctccgggccaacctgagggtacggcgctggcggtgcgggtccctgggcgggcgcggcgggaatagcggcctcggggagatgcggtgcgaagggaccgagagggaagcccgggactgaggcagctctccctgcccctcgggcagtagatgtggtt

SEQ ID NO: 61566 - DNA, 436 bp, Homo sapiens
taaggagaaacttttccattgacttaaatatagaagtgaagctaaatgcttacagaaagtatctcattacagtgaactgaaaaattaactcttcctcaaataccaatatcgtaacctagtgggaactacagtatcatcactatctcatgccccattgatccctgtttttgtttacttgtaacttttctgacatcaaagtcaccttcagtgggactttccccatagatcaaagtcttcagattacttctaatatcaaaactttattttctacttttttaaagacatttgcagtatctaatagaactggtgcatgacagcccttctccaacatgtgcaattatctaacataattgtattttttattttattcttttttttttttttttttttttttgagacagtattgctctgtcacccaggctggagtgtggtggcg

SEQ ID NO: 61567 - DNA, 1794 bp, Homo sapiens
tgcccaacttttttttttttttttttaagacagagtccagctctgtcccccaagttggagtgcagttgtgcgatctcggctcattgtaacctccacctcctggtttcaagcaattctcttgcctcagtcactgggattacaggcgtgcgccaccacgcccagctaatttttgtatttttagtagagacagggtttcaccatgttggccaggctggtctcgaactcctgacctcaagtgatccgcccgcctcggcctcccaaagtgctgggattacaggcgtgagccaccgcgcccagccgacattatcaataaggtttgttgataaatcaaaaccatgtaaacagtatgttttcacatgtattataaacgttaagggaaccaggaaaaattaacagttgatctgaggtcccggaattatggataatatttaaattcccccgcgccggttgcacttaaatgattttacctctacacataccgaaatttgagaaacaaatgatagctcataaaatgttttccaaaccctccgtagtgttacttctctaataatataactttaattataaatgctttgtttcatttttttttttctaccagtaaacagaaaatctaaactattaactggacaataccgccctgaggttgacggtgggttttgacaacacaatccacgcagctagaagtgagtagaattagtaaagctatccatgccttaccatgtgccagaaactgctctaagtgtttcactgacggctcacaacaatcctgagagaggtactattattatttcaattatagagacgaagaaactgacgttccaaggctaatttacccgaggtcacacaggtagtgagtggcaaaattcttccgccttggcgtatacctcccgcactcacggcctggcctccggaggctagacggttcgccgcgctggggaggccccctcaaccctcaagtgccagggctctgtcgcctccccacacccgggacacaccaaccgccggcctgccgccgcttacctccccgagcctatagtgtaccttccgcccagaagccactttacccgtataggtccatctgcttttcccttccgatgccaaacaaggcgtcagaacaccaaagttccggccgagtacagaagcccaggaaggacagcaaggaccccgtagcccagccaactgaggtttttggaggtttttggtccacttggtcgccagttgtaaggaagcagtgagaattcagataagtttttcgcctctccttcctgtatcctttcaggcggcaaactccatccctgcgtctttttttttttttttttttttgagacggattctcgctctgtcgcccaggctggagtgcagtggcgcgatctcggctcactacaacctctgcctcccagattcaagcgattctcctgcctcagcctcccgagtagctgggattacaggtgcgcgccatcatgcccgactaatttttgtatttttagtagagacggggtttcaccatgttagccgggatgatctcgatctcctgacctcgtgatccacccgcctcggcctcccaaagtgctgagattacaggcgcgagccaccaagcccggccccctgcgtctttcaaatagaacccagttattgctaacgcgcctgtatcccttccttccttatctgtcgcctcggtccccacaagaactgcctgaggcctcaaaaggccgattctgctggaattgcccccatgaattcttgaggaccaccacgcacctggacagcagcccctcctaccagcccttcccgagt

SEQ ID NO: 61568 - DNA, 2209 bp, Homo sapiens
ctgaggcaggagaatcgcttgaacctgggaagcggagttgcagtgagctgccactgcactccaggccgggcaacaagagcgactccgtctccaaaacaaacgaacaaacaaacaaacaaacaaaaaaacaccaccacaaatcaggctgggcacggtagctcacgcctgtaatcccagcactttgggaggccaaggcaggaggatcccttgggcccaggggttcgagaccagcctgggcaatatagggaggccccgtctctactaaaacacaaaaccacacacaaatcaaatcatgtggttcttcagtttaaaatctttcaatactcaagttcaaactccctaattcagcttacttattaggatctgagtgaggcagtcgccgtgtccttctccagcctggtctgtcgcctatccccacccacaatctctgctctggccataactaacttcagttctccgaacctaactttattatcgccgggccattttgcctacgctgttctctgcatgcaacactctactctccttttgggtaattcagatgcattctccaggtcccagctcagctgtcattcgcacagcccgggtcggcagtctccagcccccaaccggtgtccaccgcgtggtccaggcgacttatgtcttccaggccgtcggccccttaagtacacgccatcagtgttggacagcttgaaagtaggtagacacgtgagccccctcagagagaacctggatccttgcggctccagcccccgataggaagagagcccaccaaacttcggctccgcagcagagatacagccaaggactccagggcagtcgcgggtaaagccaccaccactctctgccgggaaccagcgacgggggaaggccccgcctctcacgctgcgtcgggggcggggcagggcggggcacccggcgacctgcgaacggcgtgcggcgagcagggggcggggccaggggggcggagcggagcgcgcatgcgcggtcgcctttgtgtgggtcgagcagcggcggcggcggcggcagtggcggtcccactggcaggcgggcaagaggggagtccgggcggcggccggcgtgggagccgggggaccaccatggtaaagaagcggaaaggccgcgtcgtgatcgactcggacacagaggacagcggcagcgacgagaacctggatcaggtgagggcaggccgcggaggcgcgggccggcggagccagagggctgtcggggccgcgggagccggagacggccgggcctggagccttcctaccagagcgcccagctcgccccgtgccctgggcaccactacagcccctttcccgtcttcctggagtgtgcggggccttggagaccggcccgggcctggagacggagccccgaggacttggcgccttgggcggggaggcggggcagggaccgggccgttgggcctcgggctcgggggtagcgaaaggggccgcgatcttccggggccagatcggggcggcgggctgtagtccaggagatccgggctgggagagataggaagtatcgcccgccaacctgggaggctgggaggttttggaggaggtgcaagggtgcgcgtcgagcagttgggggcgagggccaagaagatccggactctggaagatggaagtttttcggacaagggatgtggacagaggaaggacactcgtaaatgttcctaggagcctctgccatgcttgccaaggatgacttagctgtgggcacgagtttatttggcgactagggtcgtttgtgtttgagaagggcccttgttgaggtgtcagacccaaaaaaacactcttgggtggaggaaagagggcagatactggaagaaatagagaactatgtagggcgacatggagggactgtgcatagcccaggcctcctcttggccctttcacgcagcatcccagaattctttcttacttgaagactgcaggaagcactgaaagtaacttttggcctcagtgtcttggggttgaactgtttatatactctagaaaacattgtagggaggaatctgctctttgtagcagtgctctagtgataccaggcgatacaaagatggtctcctttctgtttaatgagcaaatgatgtaaagaaagaatatgcaagagatagtagcttttgagtagaaagagtattgaacttggagtctgaaaatttgaattctaggctgggcttatgctattttctagctat

SEQ ID NO: 61569 - DNA, 1780 bp, Homo sapiens
agggatgtgcggctcccgggacaccctccttgttcccctcgttttaaccaaggccaaataccttgaataactgtccgtggtcagcgcgaaggactttctttagatccacgtttcgcaagtgtccctgaggccgaggaagaggcgaggggcgcccccggcctcgggcgtctggggcctgcccataagtccgggtcggcgcggcggggcggggagagctgtggccgcgcgcctgctccgccgcacaatcggctgggacaaggcagggaagctgtggcgacctgcaggggttcacaagcccggaggccgatggggtttgtcagtgacaccagaggggaaaagcctcacagagcaggaacaccccccgccgccaggtgctgggtgcgccggctcggtcactagcctgccgcttccccttcttccccggtggtcagagcagccccggacccaggatcgtttctggggtaacccttgcctaggtcggggggcggatgccggggcttcccaggatgtggagtgtggggcagtgagaggccccccgccccgcctcttcggaaaagcctgagcagcagctcccggggcgcggaagctctgacacctgagagccggtgcaggcgaaagggcgcgaagcgcgggcgcgtcccgcttccctcttccgcccgcagggactcggcgaagtgcctgggagagggagtgcgctaggaggaggtcctgcggcccaagcctgggtgtagagaccgccccggctaaggtcaagcctcggggacctgggcgaccccgccgccctccgagccgtcgggagccggtgcaaatcgccgctgagggcccttccagctccaaggctgcggcttccaggccttccccacccccaggcccgccggggcctccccgaagtcaaacagccacagcggcggcagataagccaggggctgttgacagaggctgcctgagtccgtgtggaagggcccagggcggactttgcctcgccgcaggtcccagagccgcacagcgcgccggcccaggccaatttagggcttccccaggcaggaagcaaggctggtccggctgaccgtgaaggatgcacgtgggccggactctaggactcccggcttaccagccccttacgcgcggcccaggcaggccggagcccaggaagtttctgcctgcctgcctgcctacctctctgcctggggcatacgtagtccccttcacctcctaggagccctctccagcctgcccagagcagggaaattgaaactgggcagcctcactccggcagaggaaaaagtcacaggcaggcttttcctaaccagccaggggagaagttggaggcccacccgcaaggtcagctgcatgactctatggccttgcctgcctcctcaaacaattgtggggtattgctggaggaaaagagagggtgtttggctcctgttcatctggttttcttctttctgtgctccaggataggtaaggagacctggatgccatcccctcctggactcagaattcccacacatcgctttccactaattatagagcagaatttaggttaacagacttcctttttaaacagctaatgcccatgggaaggtgaagtcgtgggtcacttataccttagtgcaaatcgttttataaatttaaactgattgctcttcccaccaccacgaccacagggagtgctagtttgatagggcaattggaacatggggagggtattgggctggtagagagcttcaaccagagcctggatgactggaggcagggagcaagggtgagtgccaaa

SEQ ID NO: 61570 - DNA, 683 bp, Homo sapiens
agcaacctctccctcttgaacacccctaaagcactttatacctcccacaacaatcgtcacttgagatatacatttacatagctatatctaaacatcctcccacactggacgacaggcctctgaaaggcactgtgcaccgatgaatctccaatcccctgcccagcacccaccacagggcctggcacacagcaaatctctataccatctttcccagtggcctactgctcctcccagtctgtgaccccaggagtccagaccttgggcaaaggtaggacatacccatgcaggtgacgttatccacagctagctccatgccttctgggcacaggcattcagccagctggagctctgcctgccattggcagtctctcaaagggcagtgactgcagttgaggtgccttcggatctctacctctccgtggttctcggtgactgtgagtaaaagaactgatatgatatggtgtggtagggctgggatatagtaaatacatgcctttggctgggtacagtggcacacgcctataatcattgcactttgggaggccgtggtgagcggatcaccggaggtcagaagttcaagaccagcctggccaaccccgcctctactaaaaatacaaaattagccgggtgtggtggcgcacgcctgcaatcccagctactccagcactgaggctgcagaatca

SEQ ID NO: 61571 - DNA, 1181 bp, Homo sapiens
agctgggattacaggcgcctgccaccacgcccggctaattttttgtatttttttagtacagacggggtttcaccatgttggccagactggtctcgaactcctgatctcaggtgacccgcccgcctcggcctcccaaagtgctgggattacaggcgtgagccaccgtgcgcggcctctatgctgtcttaagtcccatttccacaactgtaaaatgtgagtaacaggtcctatataataggaaatgtgtgaggatttaaatgactatacacgcaaaacgcctagcccagtgcctgttacttatataaataaacctcagtaacaattattttagtcctaagtaaagccaccagtgtgtttccccacaaatccagcgcagatttgtccagaaccaatcagtgctagaagtgataacattttcagttattaatagaataagaatgggttggccgggcgcggtggctcacgcctgtaatcctaaagagtaatgcctaaagagtaactcgtaaaaaaaagtagtcctaacaatggacctctgggtttatgttggcctctgaggagtctctggggctcttacattgcagcctatcctccagagccaggatccaatcccgagtcgggacgcgtgactgcccttaccgctcaggtcaagggctccagttaagcctcctggaccacccaactctacaatgaggaatcatcgagtcgcagctttcgccgcccgttgaagggccgtgcccgagatctatgcacagaggaggccacagttgctcccttacagaccaaaggcccgcaggcaggttccagcaaagaaactggacacgctaccctgggtcctcctcccagatcacctgaaatccgtccctccagccccgccacctacgtgctccaggcctgtctgggcgccgccatcttgccccgcagagatcgcgtttccgccgccgccagattccagcttccgccccgcagcccagccccgcctctcccggtcttatctcggagcattctgggctttgcttgttcagtgcagcggactggtgagcgcggtgctgcgcggctggcggtttattacccccacgtaagctctataccatcacccagaacacacatcctttttttttttttttttttttgagacagagtcttgctctgtcgcacaggctggagtgctgtggcgcaatctc

SEQ ID NO: 61572 - DNA, 1373 bp, Homo sapiens
gattctgggatcagagtccgaacaagagttggggtgtggtgggggctgacagcggggttttgagggaaggctctggagggctgggttagaaaagatgccggagcgggtttagggaaaggaggggcgtggccggggagcccatcctggaggccaagccggatcctcaggtttggccagggggcggctggggccggcgtgccggcggggcgccggcggggccgcgggggtttgcggcgctggctgggattcgcgctccgagccagtcgccggggctccgcgggggggcggtgcgagctcgggctgcgggcgggccgggaggaggcggcggctccgagaagaacatgaatcagcggcggcgacggcggcgacggcagtggaaggagcgcggtggcgcgggagcggccccggggaccccgcgctgctgacggcggcgaccgcggccggaggcgggcgcgggtctcggaggcggtcgcctcagcaccgccccacgggcggccccagcccctcccgcagccctcctccctcccgctcccttcccgccgcctcctccccgccctcctccctcctcgctcgcgggccgggcccggcatggtgcggcgtcgccgccgatggcgctgaggcggagcatggggcggccggggctcccgccgctgccgctgccgccgccaccgcggctcgggctgctgctggcggctctggcttctctgctgctcccggagtccgccgccgcaggtaggggctggcacgggaggcggcgggaagcggggggctgcggaggggcgcggccgggggtcggagcccggggcgggcctggcgggctggagtcggggtgggggtccggagccgaaggccgaggctcggagccgggacagggcacgctgcggagtgctcgccgccagatctccggccgggcccccacccccaactttctggcgctcggggctcttctggcggggtggaagagaagggagcggggtgtgggctgtgtggtcagcggggagtgtttgggactgcattttcccgcctcgatgttcccagctgttagctccctccttcccagtactggggaccccattctgcctgccccgcacgcgaaggtccgcctcggaaaccacacgggccggggctgggcacccaaaggccaccctgataccatttaggtacacaggggctgtgagggtgcccagtcacaaaaaacaaatgggcacactcgagttcctgtgccctcagagcttcctgaaagcagaaccttggagaggatgggctggtgccaggttgctggtctttgggaggggttagtcttgtgttcccacatagccactgaggcatttgctggtgacaagagcgttccatgcagcacggtgctctccaag

SEQ ID NO: 61573 - DNA, 1767 bp, Homo sapiens
tgagttaggagacggtgtttttttttttttctcgtttccaatataccatatttcgtacgaggtggaaccagcaactgtgatagacatgtccccgcctcctttaaaacgcctcttgctcttaccacccctactttccccaacagtagcaataagtttagcaagaaaggtctcatcttctatcccaagggaaattctaagtgccatttccaccctcaagtggggctcctggtaagttgcatttaaattagcattctttttcactggccaggaaagggctgcagttcatttgcaggcaaatacccttgctgttttttttttttttcctgaatctttacaaagtcactcagcaggcacacactaaacgcttgctccgtggagaaaggttaaacggtttccccaagaccacacagatcaaacaagtgggagaggaggggctgaaagtgcctggtatacctcgccacactcccataattacccaaaccgtctcattccaagcccaaggaccgggctttcaaggggacacgaaaggaacgcccgggaggtgagcgccaggagatcgggagaggtgcctttcccggcatgctctgcagcacaccgaggggcgccaggcgtatcccggcgtgcatcggggagcgcccaagggcgatggttcccggctcctggagaggcgtgcgaagttaagccggtaggtgcgagcttccttagctttgagcctctggtttctcgtttcctctttatgggtttaaatccataacggcagaaaaggatggccctctaactaccctccctctccgcgtgcgaacgactcggcgccgcttcgagctcggtgccaggtgattagcgggtaggggcgggcttgcgaccagcacgtgacccgaactggcagccaatgactagccgggtggtccagcagcgcgaggattccgggacccgcgagcggagcggcgcgtgggtcggttgcggtcggccccggcaggtatgcgcaggcgccttgcttgccacgcgctacgcccgtccccacgcgcctggtggcgtgttcttggcgcgaagtgttaagagtctgggtgtttttgtgcgttggggggaaggagagggtggcgggggcgggggggcgctgaggcgtcacgtggacgccacagccaatctcaggccgaggcgcacccacagctttccccggcgccccggggtgcgacgtgttcactgaggttcgaccgggccctgacggcctgagcggtctttcgaagcgcgtgtgcggcctgtaaattctggccgcggcttttcgtggcgtcctgctccgcggtgagcacagacgacaagttctcagcaaaatggctgctggaaagagtcgccaagcagggggagtgctggggccgcgtgaaggtcacatgacgaggttggcagcgcgtgctgctggcgcggggtagggggagggtggggggcgtggcgggtcacgtgccttcgactgcgccggcctgtggttttccagcgtctttgctgcggtcggattgcctgtttttactcctcccacatcgaagcgtggcaagcgtcggtgagaagctgtgtggtgtactgggatgagccgagatctgggaattcggaggcctggggtccaggcctttggctagtttcatcttgccaccctcggcttccatttctcattcagctcggtagaggagatcaccttttaaggtccctcatacggcctctgacttcctcacctcaatttcatgcagataaaataatttaacaaattcttaaaaattataa

SEQ ID NO: 61574 - DNA, 1054 bp, Homo sapiens
ggtggtgtgtaagtgcagaaatgagggaggggaaaacaggtgggaagagcaggtgttattttctttattcctctgtggggcagccttttacctagttctgtttatggggtttcccgtttctgttaaatggtcaagtaggtctctgccctcagtgcaaggtatctgggacattaacatcacccccccaccgcccccccaaagctccagtagccaaagttgagggatctatgtgtcagaagaatatggggaaactagggatcgtttcagactgggtcgggagtgcaaaagtggtagtgtcttgctgtacagatttttgccttgcctttcgaaccctgggaatgccttctttctctggccggggtggaagcaggaacgggtaaatgaggtctgaaaggaggggttactgatggcagaccaacacgagaaaccaaagtgcactcttttattgggaagataactttcccaaggttcgcctcgccggagcaaacacgtggatcatgagaagtctcgagcccacccgcgcgtgttgttgtagagcttgccaggcttatgcggctgagtccctggttaacaactgcttgctctgttcgttctttttgggcacgatgccgcggctaggctgcagggaaagtgcctgggggcggcgtgacggctgctgggaagggggttggcaggggagggtctggtggctggttctgtagtctccaaggtaacagaacgcggctgggtcccgcagagcgatcatcgggttccggccggcggcacgtgatctgtcgggactcttccccggaagagctttccttgcggcattttttcacgtggttcttggccagctgtcctttgcagttgaaaagcggcggtttgtgggtcattaatagtcgacggcgtctgctcctctcggggaaggcagtgagaccgagccttttactttcctgcgtatcggaacagcgctagtgtttcttgccgccaacggttgtttctagcgtttgtgtgggttaagtgggttgggtccactttacagaaaacacaggctaaagacttgaggaaattcagt

SEQ ID NO: 61575 - DNA, 1621 bp, Homo sapiens
ggaagcacaatgggatgttggaggctaaagaagccatgaaacctaaagtattataacatagcatattcacttctctttcccccgcacgcccaaagctctgttcaaggccaccctttcccctttcatgatgaccaggttgcccagtgcaaaaatactgttcttagctattaaattgcattactcagaataatcctttccacgttgagtctacgtgccggactggctgcgagcagaaactacttcagtcgctttaaatctcaacacttgtggtcgctgggagcagagcttttaggctgtagctcagtcttgtaattctgagctaggagtttcagctacggtccctcgggcctatcagatgacaaccttaacaccctggaggcgtggttatcgtcttggggctctgggaagtgcagttccatgggggaccaggcctgataataccataaaaggcttggttctctcaattctgaagccatgttctgttgaccttcctctaaaagcggtacccgcaattgtgcggattccgtggttccctagtcccaagccgtctgcttcctgggccctttcattggctccgcccccgtaaaccttgctcgtccactctggaagcgctctcctgactacaggccgcgcccctcgcgtcggctccgcccacccagcccgcggcttggcccaggcggtagttcgcgttttgagccgatcgtgccaccatagctcctgctgctgcctctaccgctgcggctaccgcggcggagctgaaattgccgaacgcgatgcccgagggcgctgtgagcggggtggccttagctcgccgaggctggtgaggctgggcccgaacgggggcgctgacgagtagcaggggcctcagaggcgggtgaaagataaaggtccagagccgctgtggagggcggagagcgagctctggaggatagggagtgggggagggaggctcccgtggcagaacgagttgtgggctacggcgagccccgccgcgtccccgccggcgctagcgcaggtgtccaggcctgcggaaatccctggtggtctcggcggcctcctcccttggacactacagttgccatgggaacagttgggcattaacgggaaccagatcgtccacgagaccaactggggcccatcccatccatctcgccagttaaacgcctctggcgggcgtgggcctggcatttcttcgtggcttaggattttccccccctttttcgtgagcctttccttccgacgttgtaagaaactgtgcagggctagaaggtggggatgagggaaatggtgagagcaatacccagaggtaaaagctgcagacttcgctaggcagaaggtaagacactgtgatactaaggtggcttctgccatctcaggtcagtgagagggcatactgggaagccctctggagtgggaagacagtgccgctgttgagacaagacccaggactgggccggggactgtcccaaagggtttctcgtcataatggctgtggaagggtcaaccattaccagccggatcaagaatctgttgagatctccatccatcaaactgcgcaggagtaaggcaggaaaccgacgagaggacctcagctccaaggtgagtcctgttgggatccacc

SEQ ID NO: 61576 - DNA, 1062 bp, Homo sapiens
tagggtggggatagagtagggactgttgttacatgaaaaaaaccttaagttctttgggtactttgttgactggccaggtttgggaacttttgttccagtcttcttgtccccaggggctgtggctagcggctttgtcaggttaccctttccaagcagtggcaaatgcaccttccttagaaactaaggctgttttaatcttagtctggagaattgactcagctccaactaattctaaaccgttaagcaggataccctttttttgtttgtttgtcacattggaagttatttgtttctgggagtctttgtggtatagatggaactctacatcagccaaactgggtagagaccaggagcagagactagacccaaggtctgctctcttcttcagctggccattgtgcccctgcctacctctgaccagatggcactttgaactttgaagcaacaggaatgagttagcctgggcatgatacctgcccttcctccccattcccaggtctggtcactgggtccctgccctactgtctaagtctctgcacaaagcctcctggccttggcttcttctgtggcttttgcgttaagtggcagttctcagaatctggtagagaatctgctttgtgagattagagtgtagtgtgtgggcaagagacaaatatagttcttaacctgcaggaagggaggggaaggcgaagagtgctctgccttggacaggtctctgacatgcttgtttatagaaacagcaagtccatggtttggctggaatgacttacaactcaggtatttataacttgaattgagtgggattgagaagtgggggaagggaaaagggggaagaaagtagctggtggcaacaaaacatagcaacaaaaacagatctttttcctcacagttgctggggtttctttaccagtatgaggtcagccaaatcctaggggaccctggccttttgtgactctggcctcttagttctctatctcaagggagcagccactcccgtgccattgcagacttcctgtagtggtccctcacactaaaagggaaagcatttcctgccaacttctg

SEQ ID NO: 61577 - DNA, 732 bp, Homo sapiens
gcagaaagaccaatgaattaatttgaggttagttcgtgtgggtcctgaggcctgcagacagtgtggggtaacaatactaatgatgagagtgatgagtgtctcccgtggccgtgtcctctctgaatctctgagcattttatctttcatctctgtgggagttgcggcttagtaataataattagagtaccctgagcatcggtgctttgtagaacacagcattaagccctgtttctgcctccttggagtgtagtctgtatgaactggcagacatttgggaggtggagccctctgacagaggggaagaacatgatagaatgcaaaggtcagggatattctgagtcacctaattgatacctaacattcttttggctcttggtaggtcagagtggcctttccttcatgcctgccaaagcacaaagatcagtggcctcacccaagtctcacagacccaagagtctagtctggggatcccaggctctagcttatacatggtaccttcctggttttggggaatgcttgttcctctgtggccatgagttatgctttaacgagttggtgttctttcctgtggtaccagcagactgagccctgccgaaaataggtgatgcacgctgggtttttcccgtgtgatcaagaagcccggtgggcagaacagaagaagctgcagaagtcatagctccattctcctgaaaacatgggtgtctggaaagtagccagtgcctcaggatggtc

SEQ ID NO: 61578 - DNA, 1357 bp, Homo sapiens
accagccgcgcccaccgcaggtgggactcaggttcgccctctgggccaggtccttcacgaggagggagctacccttcgccagaagtttgtgagaatgtggccgcccttttcctgccctctgccccatgtgggtggggggcctcgtggcccggccggcgccccgtccccttctgcatgtctgaggccaccggcaaccgccgccccactccagatttgcccccgccttgttttgaaagccccttatttataacttttatactttgtgcaggtcgcggcgcttcctgcctcatcctcggctgcatggggcgggggcgctgtttttaacgtgcccgtttgtactgatgtatgaacttgtcaataaacacaattgtttgttaaccctgggatgccggccagtggggcaggccgaagcgggcgctgccagtcgctccaccgcttcggtggcagaacccggtgtgtgtccaggggcaggacggggcggggtgctgggggtgtggcctgcggcgggtgcctctggaagggcggggcgagggtctgggggtgtggcctgcggcggggactctggggagggcggggcgagtgcttggggtgtggcctgcggcggggcgtcggggaaaggcggggtctcggccggcgctgacgcagccatggcggaggcggctttggaagccgtgcggagcgagttacgagaattcccggccgctgcaaggggtgagtggctctcccacaggctgcggcgatttccgaacacgggaggggccctgggatgccgctgacaccgggggctcggaacctcgtgtgtgcgactgccctgaggccccgctcgggttgctcttctgtggcaacctgcttcccttctcccgtgttcgcgcgctcccgcggcttcctgggtgattctgttcacgttgttcccaaggcccggtgccgtcttgaccgtggtcgcggcgaagccctgtgtttcctacagtcttgagcagcttgctgttacccttgttgaaagctcatcgaaggcacacagctggtggtcggattcctcccccacgcgccccacctccgacctcaactcccttgtcgcactttgggaggattgcaggctgaccaaatggtccctggctcttcccctgcttggtttttattccttttctttctttctctcttccctccttccttcttttttctatttttaaatgatttcttaccactgaacagcaacacaggctcatgtgtatgtgatgggtatgtaatatacagtggtacgcaatgtaaatgaagcaaggtttcctcccagccccagtttgcattcttacagaaagattgtttatatccgtgcacacacgactttttaccctttttttgt

SEQ ID NO: 61579 - DNA, 659 bp, Homo sapiens
gtcttgaactcctgacctcaggtgatccacccgccttggcctcccaaagtgctgagattacaggcatgagccaccaggcccggcctaacatcttgataactcactttctcacatgccacatctgatctgtctgcaaattctacttggcactacctgcaaaatctatccagaaccccaccccttgtcaccactgctgctccgtcctggattactgcaatagctttgtaactggtctctctgcttctgcctttgccccttggatctattcccaacatgacatccaggtgagcatcgcaaaacaaaagtcagattgtgtcactcgtctgctccagccctccactgatttcccatcatctctctgagtaaaagccaaatcgttactgtgccctgcaaggcccgacttgacctccttccctacctcgtcacccctgtgcccccctgacctcagctcctgccacttgttcactttggccaacactggcctccaggctatttttcaaacctgccaggcatgtgctcgcctaaaaggacactgcatttgccgtttcctccgcctagaatactctgtctcccacgtctgcatggccagctcgtcacttctttctggtttttacttagaagtcaacttcccagtgaatcccctctagccactcaaactt

SEQ ID NO: 61580 - DNA, 1114 bp, Homo sapiens
catgtccctcctcccactcctggggtgggcagggccacttgcccgtggtggtgacggaacactgcctaaaactgctcaaacctctcctcttttcgaggccctgcccgcccctcccatagttagtagctccagttccatgtgggcattcctaccactgcccccagcactttctgtgtggctctgtctgtgcaaccccaggctctcctggctgcatgttcacctttgtgtccctccagcacccgtgcagtgagcatccagcacgaggcaggcaccaagagttccttcttgtccccaggttccaacctcactaatctagccctcagacgatccccatcccttcttagaactcaaagattatctccaaaactgtgagtgtccctgattatgtctagaataaatgtttccagaacaaattctccatgactagcctctgctgcaattctcaacctttgctcagtctcttactaagccccaccctctccactgcacaaaccacactgggctctgctgttccgcagcagcatcctgtacttccctgtctccacacccttgctcaggcttttctttctgtctggaatgccctttcctcttctccaactacagccactcatccctctggggaactttcctccaggtggccttcccccacccagtggaacagaaccgcctttcctgtttcctcctgatggggtctgtagcagcctgagagcagggccaagtcttcactgtgtctgtaacccaaaggcccactgcagatgccttacactatcaaatcaggttcccggggatagagtcttatagctttaatgaatttccttcatagcacttatactctgaaatggtatatacatttgctgactataagacagaaattctgagggcagagactccactccttattctattcaccactatacacccaggaattactactgagcacagtaggtgttcaatacatttggtttattcctccaaaaactaaaaatggaactatcatatcatccagcaatcccactttgggtatttgtccaaaagaactgaaatcaggactttgaagagatatctgcacacccatgttcactgcagcattattggcatcatttctttatccatt

SEQ ID NO: 61581 - DNA, 3317 bp, Homo sapiens
gatacttaaaaatgcgtaaagagggtagatttcgttaagtgttcttatcacagtaaaatacagtaaaattggtttaatcaagtgaattcacttgaacaagaaatgtaactgatttttagcaatctggcaagtttagttgcttaaatagtggtatgcgtttctaaaaaagggttgttactaactaggggaagtgtaaatcatctcaaagtaaacatcaactatctgggatcgctcaggtattataaatacacttcgaaaagagtccctttagttaataataacagccacttcagggcaaggagtctctgcattgtttcctggctgagtttacttcgcaactagaaaagtctgcttctgaaaatgtcttctgaaaatgtcattgtggcagagagcaaaatgatagctataaatcaacaactgcagcaaatatttacttagctcttactacattcctgcactgccctgtgagctccatatcactacaatcttgtaatccttgcaacaatcccatgaagtaggtacttttattacccccattttacaggggaggaaaaaagactcagagaggttaagtatccgacccaaggcacacagctgtttctcaggggagcccggattcaaacccagggactcggatcctagagcctgtgctttcacccgctgcgctgcaccatatgtgtaccaggatggtagaatcagaggtgagtgtactttattttctcctttttgatttgtggtttcctaagtgttctacaatgaatatatattatttttatatcaagaaaacaaatatgcatattgtaaaaattattggcccacttgcattattattgaggaggttgttctttttcttctacaatggtgcttctggtgaaggtctggattccagcatttccctgccagaggctatggtgggtgtgccgagcaccaccctgagggggaagcagtatctcagcaactacacccccgaggaagaggcagtccccaatcagcgggagcaatgggacctgctgatgacaaaataagccacagaatgaatggctctgctccactggccttctctcctccctgcccccttttccccagctgaccagatgcagggcagtggcagggaggggctgataccaaacccggtctgggagactgcccggagggaacacaggttcccaagctccttttggagaggctggatgtgagttcacctcgaacctttcagctggtaatggccacctcttggagaatgtaactggttaccagaaaaccccagaggttgtctcccagtacctagcctaaagtgggtgtggccacagaacctaccaaaatttaaataaaagcaagaactaggcgtgtccagggatggcgttgtgctgtttatccgctctctgctcttcccactcctccttcctttgggattttgtccaagactctgtaaattaatttttctgtgcctgtttcctcataaaataaacaagctaacctcacagcctgtccctccttcctctgggggatatgtgacaataacagatgggtgagccacatgtccctgaaggcccctccagggcaagggcgggagagccccacatcacaggttcgtgccacgccacagacatgggaacagaggaaggttccacgccagtactcggcccactgaacgctgctgcttctgggcatgtgaccaagtgaaagggaaaattgggtttcgcatctcactttccatctcagattaaataccagatgaagaagcaggcccatttaaagaaggctgagccctggagaaagacagcaacatggtattatcagtcattttaggctctttgctggagagggaagttggtaaaaaaacctaccaagaaaatcctgtaagtcctggagcctggcttaacaatttcattctgctgggcctcagtttctatacctgtgagtcagatgatcaaaaaggattctttctagatcttaaattttagctatatagggtggttccaaacagtaagcttctttgaaataaaaagccagattcccaggaaaatcgatttagctcagcgtctgtatagtacagacacgaactagttacagtgccagcctaagatgacccttcagatggctacagtagacccttcagatggctacaggaatactgaatgaacaactctaaatgacacaattatcaaacagtaagtttcattttattacatcccttctactggattcatgtgctatatagcatttgggccaatttgaaggtccttgaatgtttctataggtgtaattagttgccccaaagtttaacttattgtcatccaattccaaacaactctatactgaaagaaactatctgaggaagggttgtggaatgtatgacttccaaggatgcttaagaagtcaccccatctaaccttctgatattattatatattaggatgaacagatccaggaatcccgtgtcacgcacatggaaattgtccattcctcatttttcaagtgggctttgtgtataagtcaggctagaaagtctcatacaatatgtctataaatcagacggagttggcgtggcaaacattacttgcactgaattttcttgaggcaaaatgccaacagactccacccaaatgtgatgaggtcaaacatttataagcaaggctttgaccgtgacaatgcatcttgtcattctgtggttcagaagggcaaaggtaatgtttcttcaggctacagttttctaaagagaaatgttaaaccaacgggatgacaactggggtcataaagggctagaaagcaacttctgacctgaagaccccacccctcgccctgccctgttcctcttttcaaacatcttggcattgcacaagtgtcctgcatgcctgtggacaacagctggcactgcagaccagctctagcaattaagttatcagctaaccagctcctcaagccaaactattactcagagacagttatttctgggcttatgtcacagatggaaagaaagacccagtcagtgggaaccatgggaatccacacggggctccttataaaaaaatgactcactgattttgctaaaagtagcccatgtagttaccaacagtatttcaaaacagtcaaatacctccagaaaaggaaatactttaaaaaggtatacatgaaaagatgctcaaccacactaaccatgaggaatgaaaattagaatcataatgagatggtgggcatgtaaacaggcatgccttctacagtggcatttttggcaccagctaacataataaaaagaccgccgctccttttgattccaaaattccacctctaggaatgcatcttagagttacatctgc

SEQ ID NO: 61582 - DNA, 1600 bp, Homo sapiens
acagagaacagatgctggcccatgggacaggtatgagaggtgcacaagcacctgctgccatctgccacctgatgcctttctgttcattttgattttagctaacatttattgaacatgcaggtatcttacaaatatcctctcatttgatcctcatattgacctcatgaggtgaaggaattatgcttaacataagagaggttaagtaatgctcagggtcactcagagcggtgccttaaaccaaggtcagcctgcctccaaagccatgggcctcacctctcctggctccatgctggcccctgcccaagcatcctgggcctctccccctgggaatcccatgccttcttcaggatgcactggcccactgggctggagagccccaagctccctgcctatttcctagcatgaaagctgaagggactggggcctgtttccccatctgatgccccaggaacttagcatccagcccagtgtcccctatggctttagggccagggaggggcaggcacctgtgacacccaacatcctccaggtgcttaggagtctaggggagctggagagtaggtgaggggaccaggttggggaaggccctggctgagcatctttaggcccctcttgttcctcatttgcctgataccatctcctcctcctgatcctggtccctttccctgtagtcactgcccttgtatccactccacggaagcagagtgcggaggaaaaatctagcctgtgggtcagcagacctgggttcaagttctgcccagcgtttcctgataatctgctatgggactctgggtaagggcctccctgctctgggtcttgggttcctcacatgaaaatggtggcttcccgacagggtctggcgatgtccttttagctttcagactgagtaactccaaaagtgatggcaggaagtgctttgttacttccaccctgggcaccagggtctgggatggacctttgtgaggcactgtgcatgtttaaggcagaaagtgtagaatgcctctccttttcctttactatggatggctgacatctgtgtctgtgtgggcagaaagctaaaagctcaattcttccgtacgatggaagtggtggggattactcacaaagtaaaaatgctgggaatgcaggacagggaggcctggccagcctccacagtgcacatgtggacaccacagccctgggtatgagcggccgttactgacatttcaaaatcactttctctgaaggggcttgggatacgatttttcacacagtctttcctacattttcaaatcggcccaggaagatatagaaaaagacattaggatccttttgcaggtggaaaagttgaagcacaaagcagttatgacattctgaggccatgctgctaatgcacggctggttgcagactgcaacctactgtttctgatgtcagtggggtggaatttaacccacaaagttaaaaacctcataacattaaaagtaaagggtcaagttagtggaagagaagcccccaatttccacctgtctgcagacacttgtgcacagtcccctcctgtaccccaacctttaaataaaccctactacccaacacggggagaggtttgtgggaataaagcac

SEQ ID NO: 61583 - DNA, 3336 bp, Homo sapiens
taaaataagttttggaaagtttcatgtaatatatttttcttcagaatacttacttgatccactatttcactaggagagggatgaaaaggaagagttactacttctactctgatttgatttgagcctggaaagatgttttaagagcagtttctggccgggcacggtggctcacacctgtaatcccagcactttgagaggctgaggtggatggatcatgtgaggtcaggagttcaaggccaccctgtggcaaacacggtgaaaccccgtctctactaaaagcacaaaaattagccgggcgtggtggtgcgcacctgtaatcccagctactcgggaggatgaggcaggagaattgcttgaacctgggaggcggaggttgcagtgagccaaaattgcaccactgcattccagactgggtgagactccacctcaaaaaaaaaaaaaaaaaagcagtttctattgtttaatctatccttgtgtttcacaccaggaaaagtaagtgggagaatcaagcatttattacttccaaagtcttacaagataggccaagatatataaatatttcctagcaaaacagtatgacctgcactatcactgcttctagatactaacaaatgacaggttactctgaagccgtactgtacagtttataatgcatttcacacattcagcttatttcatcctcactgccatgggagcaggtatttttattcctagtttatagaggagaaaactgcttatgccaagttaaatagcttacaggagaccacattaatactgggtaatgactacttttaacattttgatgtatttccatcccatcatttttcagtaaatgtaattttcctttataaaattgagataaaagttaaacaattttgcatcttgatttttcaccattagtctttcctcataccattaaaaattctttgaaaacatgatttttaatggctgcatactattctaagttgaatatgtatcaatttattttgtcatttcctgttaggcatttaaatagctttctattttttgctgttataaataatgctgagataaacatccctgaacaaacatctcatctacttaaaaaagtctcctttgaattactgaaaaactaagttaggctgatcttcacttacatttttttttttttttttttttgagatggagtcttgctttgtcacccaggctggagtgcagtggcatgatctcagctcactgcaacctctgcctcctgggttcaagtgattctcctgcctcagcctcccaagtagctgggattacaggcgtccgccacacactgggctaatttttgtatttttagtagagacggggttttaccatgttgtccaggctggtctcaaactcctgacctcaggtgatctgcccgcctcagccttccaaaatgctgggattagaggtgtgagccaccgcgccagcctcacttacattttaaatgtgaaaactaagttttattttcatttttcctttagttaaatcattgacatgttatcaccaggactgtttgttcagatgatgtcacctttgaaactgctgtgcctactaagggaatggacattaggtcattgaaccaataaactggaatttgctgggtaaaacttttcgtatctcaggctatttttccagctatggatgggatttatactcctcagggctgagatgtgcttgaaagcacactgctgtctacccactgccattacctgtaagttgctccactccaccttccatgctgttttgggaggagggtgaaagaaagggaggggaatttcactagaatcaaatcagtttcttacagttctatttgttcttccagtctttcagtcatgcaatgactatttattgagtgtttttgatgttgtaacttgtaatttaggagtatgacaacagactttaggttgtaaactctttgatctgggagtactgtaaatcgtcatgaggaggttatggaacacagcatatcccaaagttacttgactatggaacccttttattttctttgaacacttacgaatgatctcccacaactgcattccacagaacataggttaaaggaaaaggctaaaaggcatctaacaaactccatatccattttgtttttttctccaaatagaatcatttaaatgaaatccttttaaaactagtaatagataatttcttaatgcaattaatttatagataagaagccaccagctgacataatctcttaaggtgaaataacataggcaataccattaagattagaagcttgatatgaatgcctacttcctggtattatgaaatatggaacagaaggggagacaaagtaatcatgaaggtaactgatacagttatctatctagaaaacctaagagaatctactgacaagctgtcagaataacttcttgagtcaaatgaccagatataaaacaaaaatgtacaactcagtagcttccttacatatcagcaataccctgccaaaaaaaataagagaaataaaaagcccattcataagagcaacagggcataaaatacctaatacattaataagagctccataggacctgtatgagtaaatcaatcacttttccaagaaggtctgcgttaaagcaatggtgagctgctgcttgggaagagcaaatacaaaaatgtaacttagagacagaatgcagttccaggacaaatggatcccagtgggatttttttttgtttgttttgaagaacctaactaagaaagttcttctcaaagaatgacagaaaatgagaattgatagcatttgaaaaataaagagtaatgcacgcagaagagtcttgagctaaaattattaaaaagtatttcaaagtgacaatatttaagatggtatggtgttggcataagaatttacaaacagaataacacgagacaaaggtcctaacagactcaatatagtatttaataacttagcgtatgaggaagcctcatgtgacagcagaaaaaggtagatttaataatagtgttagaaaatgacaaaagacaaaaaaaaaaaaacccacaacaatataattgagacagattttacttccaggtgggttaaaaagttaaatatttaaaaagtaatcctattttaaaaagagcgcccggccagccgccccgtccgggagggaggcggggggcagcccccacccggccgccgccccgtctgggaggtggggggcgcctctgcccagccaccctgtctgggaagtgaggagcccctctgcccggccgccaccctgtctgggaggtgtacccaacagctcattgagaacgggccatgatgaggatggcggttttgtcgaatagaaaagggggaaatgtgggga

SEQ ID NO: 61584 - DNA, 673 bp, Homo sapiens
tatccatccttcctcggctagtacagagtctaagatgacatggtcactttcccccatgcccatctcccctccttctctggccaattctttattgccagtcaaaggcagaagagccaacagcaataagagaagattcccaccatgtcagcacaggttctgtgtcatcagtgacctcttggaatgtgcaggaagccagggagataagaatctatggctatgtagattaggtacaccccacagccaagtatgagcttctagggcccaatcgctagaagcaaacaacccagaccactaaccaggctctaactaaggcaggatccaggatgctcagcaccctgggccaacccttccgctcaagatgaatccatggttcatttacagtgtctggggtgatatttaattccaagttcacaagtctccagggtagctgcccttttgtttggggatttcctcccgggtgctaaatcacttcctcctagctccaatctgaaaagcaattcaggtctcctgtggcctcaccaagcttcctgcccacactgattttcttctaacctcactggtctaccttgtgtacatcacctaacaacaaagccacttagctcaaggaaagcctcaagaacaaatggcttcctaataaggtgattcctccctcaccctagggtggcccacagct

SEQ ID NO: 61585 - DNA, 1817 bp, Homo sapiens
tttgaaactatatgatttgaaccacagggtatgcacagtgattgtgtgctttcagaaacacggtaagcatgacaaatattttcagttgtcaagggtaagcgaggagggaatgacccacctaagaaatggaaactaacaaatagtaatatgacactcccccttagttccacaggctggtgcggctgctacacgcagctcacttcctacgggcggctaaaggcggtgcatgaactgaacgtaggcggcctctttatcccctccccacaacactgtggggtggcacgtaaagacctcaagggaagggggcctgggcgatacgctctcctgctgccattcatttgttcaagaaatagttgaacaaatgaatagttaaacaaactctccaactaggactctgtcccattcggataccctacgcctctccccccatttccatccctaggcatcactccctcgtcaagaatatgctgattatggctcgcgccccctctctcccttggaccctcccgccagggcgaccggacgaggccagcgggagcaacgccttccgaaccgcaaggaaggagggctcggagtgcgcagggcgcgggttcgcgggaccctccagcgcgcggggctggccagccggggcggggccgagggcaccgggcgccgagctccgggaggggtccccgaggtcgcgccggccgggaggggcagcggcgggaggcggccgactgcggcgcacacgtggggagggcggagcggggcgggagccgggcgaggggcggtgacggtacctgatgaaggtggtcttgccggtgctgtactggcccaccagcaggatcatgggcttgttctcgaagtcggcgtcctccagcgcaggcgagtggaactcgtggaagcggtacgcctcctccagcggcagcaccttgcgcaggtagagcgagcgcagcccgcccgtcaccgtctgcaccgcgtccgcgccgccagcgcgttcgcgcccgcccgcctgccgccccatccagctgaacatcctgccgccagtccacgctcggatgggaccctgctccgggttcgactctccccggctcgcactgagccgccccggccgcgctggccgccgcccgaggagggccccgccttgtgctgccacagccagtcttcggccgctacgtcacgcgcgctcgcccactattcagacgagctctctcaggtccttcctgattggatctctgccagagagggctgaaggcgtcagccaattgagaggaggttcttaatgaattattgatgacggagtcattctagaggactgggcggggagatggtgtcttcccggccgggtggcactgaccggtcatgctcagggcccccttctggttgccggtgcctcacctctggccaggtggcatcggcttccgggtaaatctgagctgcccaaagcgagcctccggaggctgctccatctcctggaacgtttactcattcaggcctctggacgtcgatactggggatgaaaagttcagaaagtggacaggcaggttctgtcttcccgggggcgggtggttatgactccgttttacaggccaagagacccaggctcacgggcataattgacacaatcttgaggggaagtggactggaatctatttgagtagccgtttctcctacttctccacattgccctcactaaattctggatcagctaaaggctttttccccttagttttctttatgtgtttttctgtaaagccgaaaatttagtcattactctcattattacattatcctcattattacaactttatttccacatattgacatgtgagtcattg

SEQ ID NO: 61586 - DNA, 4383 bp, Homo sapiens
gtgaaactagctattcagcaagatctaggagcaggaacccccatctccatatggcttaatgcctccactgcatccagccaggctcttcttacctatcctgatctgcagcatcaggttatggcccaagaaaccctcccctctgtggccacatacttctttttcattctaaatgaacaacccaagtgtgatgttgctggatatgctctggagaagggacagaggctttgaccccaacaagccctcccaaaatgacagaaggtctcctaagtcttccacctggagcaacagaagggatagggtgaaaatagtagcccagactggctccctgctctagtctacctgggaggagggaggcagaggggccatgactgcccctgtcactctcctggcagttggtgagggtgaggcccagggtacacaccagatacataggaaatggtgaaagccagcagtttccagtgtcagagagtcctctcgatggtaaagctggcaggaggatgggagttctacactggtaggactgattcaaactagtttttaattattaatagtcactgatgagagtggagccagggctttcttcgccctgcgttgtcaccacactgaaaggtttatcagaatcaacagccctgatctaaatcacaggtgttcctagcttctgatttcatccctgaagtctggttaatctttgaggcctcatcatccagtgaattggaattcacagccctcctcctattgaagaaaggtgagatgacactctcttttagatgtcatgataatcacttaatccagacaaaaagaatgattgaaacccaacagaatcaaaagaaaatgatgacctcatcaacctactcttcccttctatgctcaacctgctcttccttatcatcactcaggtgtccaggccagaaatcagtgtcatccttgactctcacattcagttgatttaaccctttgtctctctcaggacccccaacttctcatctgccctgccactgccctggtgtagaccaccataatctctgaggccacttcccagataggcttcccatctcctgtcttgccccactctaatcttttctccaaagagaagccacaaggagctttttagatatgaccatgccattccccagttcgagatcctccaggggctcccttctgccctcaggaaggagtcccagccactcaaagtggctgaccctgctcacttccccagcctcagtctcatctctccaccctccctaataccccacccctgccctgtgtgtgcgagcatgtgtatgtgtgcacacatgtacattcacacacatttacacacatacgcattcactcaaacttacacacacgcactcaccgtttagactccagccaaacacagtcacttgtattcaaaactgcctttgcacatgtagctccctctgcccagaacactcttccactttcacccacccttctccttgctagccccttgggacttcagtaggaacctcctctggaagctttccctgagcacccaagtctggaccaggtaccccagagcccagagtcctctgttcctctcctggggagcacccctatgctgctctgcaacaacaggtggactcatctgtctccatcacactgtggccacaggatacaggtacagatacatcactgcagatacaggtcagaggtcagtgtgtctcattgctctgctgatagggagactcaccaggaacctgctcagccctcttgaacccttcccttggcttttccagaacactggcccccccaccccgggcctggaccacacccttcaggtctgtctccggtacgctgggagcctgcaggcagggtgccagctctatacctactggttctgtaatgcacttggcgcgcatgatttgatggaccctgtaagagccccttccctctaaaattgttttcctgtcattcgtccatgcctaaaattctccgataaagcccattaaataaaaactcagtatttttggcctaaggcttaaatgtctagttaagataaagaaatattcctggcagagacaagattgatcagacacccacattccaagcattagtttttcagttcttttgcagagagctgcttcccctgtccacccccagcaatgaatggttaggcaacggtgacctggttctgagaatttcatggactatggggatttcctaggcacagataagttctaatccttgttcctagtggagtgacagagggcttggtcatctgaatgacatgtctcctttcctggaatgtgggtggcagagatgactcaatcatctctatagatgttcagaactttgtctctctaatacctctggagacacctgtctgatatcccttggggtgctggtttcagttttaatttctcaagagaaacaaaaactcctgacaactgggaggtttctaggcctgattgtctctcagtcctggcccaaggctctttcagttatcgaggagtcagccctgaatcttgagtattcactgccatttggcctcttggaaactttaggagactcaggcacaagttacaagactaaatggaagtgctgtttattttggattcaaactagaaggaaaaaatttgggacaagggtaacccaggacctaaaagacatcgggatagtcttaatctaacccaggcaaggtagcaacacagcccagcctgcagcaactgtggaatccagaccagacatgactggggttggcaccccgagatgccacatgtgccttccgccttgttcttcggggaaatgaggaaaacgtaagcaacaggggggtttccaaagagggccaggtatcgcccaaaggcagcctgtctgcccaaggggcatgtagggaagggaggaggcttgtagagccagactacagcctgtttctctagctgcctgctcttcctcacaccccgtcacctgctgagtgacaggtgtggcaggaagaagacagaagaaaggaccctggacagtgggaagtctgagcatgcaggtgcaggcatgcatgggggcatgcagccaggtgactggagaggctgggacagacacacctcaaaaggagttggagggctgggcatagtggttcacgcctgtaatcccagcattttgggagactgagacagaggatcacttgagcccagaagttcgaaaccagcttgggcaacatggtgaaaccctgtctccacaaataattttttttttttaaagttagccaggtgtggtggcccatgcctgtagtcccagctacttggcaggctgagatgggaggatcacctgagcccaggaggtcgaggctgcagtgagatgagattgagccactgcactccagcctgggcaacagagtgagactctgtctcaaaataaaataaaaataaaaataaaaataaaaagcagaaggggttggaggaaggtaagcactgctgtggatatgtgggagctgggttgtcccaaggatgagggtgaactctgcccaagagtgggaaagtgtctgagtgaccaccgtggcatggacaagaaaggcaagagaggtggccacgtcctggatccagaggacactccctggatcctcaaatcattcaccgataggctgggaaagaccccaagaagcttgaggaaaagtccctggccctttggttggccacttggcagacacagacccaaactggaggctactggagccactcctgctggcgcaggctctggacacattgccctccagaggctctgtctctggaatcctgcttggtccctttgctgtctctggggctcagggccctcccacacttatccattcacactcagccctgcattggagtgacagcttcctacaagttcccagactctccgcacctgcactctagcacaagctgcatacaaggcctcaggaagtcatgcaatctcttcctcaagaccccaggtaccccaacactttgaaggcatccaatccctcctctgcctcacttcctggttctccatacctggcttgtctcctctcttgccacactctccacacctgggaccagaccctacttccctcttaggcaatcattaacctcttgttgcaaaatgggcctccagggcctctcctcaagttgctgggagcatcgggtagtgtgtggatgtctggctacaggtcagccaggcaggtgctcagggggtgtggctcccctccctcaggacagcctctccccaagatcgggctcccaaggcctctggatactcaggtcctgcccctctcagaccccaggctctctgtgcagcctttcttggccactcccagctctcattgttctcctctgcctctaaactccctggtgacaagatgggaacgttgttattctataactgctttggacatagatagctcctcttgttaaa

SEQ ID NO: 61587 - DNA, 2480 bp, Homo sapiens
ttattggcaagttatccagtctttctgagccttagtttcttccttggtaaaacagggataataatgataccgactttatagaagtgcgagaactaacgcctgccaaatagtagggcacaattaatgttagtgtcttttctgcccaattgcccagtacagaaagtgttgcttcagtaacctaggcgaatgccaggactgattcataggaatatcatagatatattcgcaacgtctaaaatgatctcgttataacaatgatcgtttttacaaaaataagatatattgactgttttgtatcccatgaaggtgaggggagggattttcctaactttccttccagaatccgctattagggtgatggactcagcacctttctgtcctcccctacccgtcttaagagttcctcgtcacagagtcggaaatggggatagagcttggcccaagttagaatttccaccactccaggggcagaatgcagaaagaagagaaaagtagcggggggcctggcgcagctgctaatgcggtgcagaaactctttgagctgccaccctggcagggccggccttgggggatgtgcctgaggatggtgggtgagcaaagccacctgccccggcacagagcctgcgggttgtgctctgcaaagccctcccggtttcattcccagagaccgggcgagaaagggcaagccaggcagcagacgctggggggcgcgtggccaggctacccggatcgtccagcgcgacatggagtctgtgtgtcctcaccagtgctgcgtgacaggagccgggcaccaccgacgccataggcttgtcggtgtctcagcactgacaccgtgtggccctgagaaaaagcagtgaggggtccgcagaaagtcttggagacgggaggttgtcccatttcctttcctcgggatgttaatcagcatccctgggactttcctggttatcgctgatggcagaagtccaggagggaaaggaatgtgtctgagctcaaaggctgaaggcttcaagacttagaagtcaattcgatcactaatgagaaagaatgtaatctcaaggtgaactccagagtagggagtgagtgtgtatcgtgaccttgggggctagtcatcaccccagcctagacaaagatgatgtaaaacacccgcgtcagggttgtgacatcctcctgacgtcgaggagcgaccgccccttcccggatgatgtggctcgcacagcttacactttctccacctccgctggccgtacctgcttcagtaagtggccctgccatccacccagttgcgtaatggattagtcaagactctcttagtcataggtaggagccaaactgaacaagctgaggcataaaaagcaatttactgcctcacctagctgggcaagaggccgaactaactcacaggtttgacacaaggaagattctgggaagttggagaagaacagaacctgggattggcagcggccagggctgtttgtcctgcccttgtctcctctgtcccccttcacccactggcctcactctctctttctgtagacagccctcctccagtggtggggatacagcccctggcagcccaggctcagccaccccaacatcaagggagaaattttttcaacaggaatctttctaatagggaagggctcagatgggcttgctcaagttaggtgtctgccccccgaggcaatccccagtggcaaggagatgacacactgagataggccagtcctggtcacaccctctctcctagggctgctggacaggagttgtcaacagagaagagtgacaggaacacttacttggcaggcacaaatcacaggttgctgtgctccactatgcagatgatgacaccctcagattttttctctttagtaaactcttaaaactagacatatacacagaaaactgcatgaattatgagtgtgcagtgtttattcacaagagcaaggacatagaatcaacccaggcacccatcaaaagtagattaaagaaaatgtggtgcatatacaccatggaatactacacagccataaaaaagaacaaaatcgtgtcctttgcagtaccatggataaggctggaggctgttaccttaattgaattaacacagaaacagaaaactaaatactacgtgttcttacttgtaagtggcagacacaaagatgggaaaaataaacaccgggaattccaaaagcggggagggagagagtgggagaagggtggacaaactgcctattgggtactatgttcgctacttgggtagggcccaaacctcagtaccatgcgatatacccatgtaaccccaaacctgtacatgtacccccagaatctaaaatttgttttaaaaaagaaaataaatatgtatagaaatagcagaatgtaagatacctttaagttcacctttcagagataacactgatgatgttatcagcatttattattttctttaaggatctcatttctatttatttatttatatatatata

SEQ ID NO: 61588 - DNA, 520 bp, Homo sapiens
gaaagtcaggcccaaattgcaccacagattcagctgtcctagatcctgtgagaggatgagaaactcgttaggcctcctggcttatgatgcactggccaatccagcaaaccagagctctgcgttgggattgaggattaacaggtgcttgtcctgcctgtgaaaacagtccttggcagcatgtagggtagtccagcatgtgacttctgcaggcaggtggcctggattcagatcctggctccacctcctgctggctctgtggccttgagcaggttatttcaccaacctgacctcagaacccaacgcttagcacagcacatacctcactgtggctgttgtgaaaattcaatgtgaaaatgcagatgcttggaagcattcagcccacaggtcgtgcgccacaaatgacagcccttgccattccctttgcttcttcagctgccaaactgcctcccaagttctgatcctaagacttacttatttttagtatgaaatgcttcataaatacaaaggaatatatatcaca

SEQ ID NO: 61589 - DNA, 1285 bp, Homo sapiens
ggctgtcctctgtggcctaactgggggacaatgacaaggccaggcccccgtggccttgccaagggagcctctgcatgctgtctgtgaagcataccagcagatgcccgccacccacgctccacacaatcactgaatttgcccacctgctgtgtgtctccatcacctcctaagaggcagtgccatcggcttgactttattttcatgtgtatttttaaaagtaatacccgtccatcaaacagcccctaggagcttaaatgctgggctctaggtgccttcgcccgtgaccctggacccgcctgctcccaggtctgtgctgctggtctgggtcactgtgataatcgagcgcgtcgcccgctcgccaccttgcggccatttctgtccactgcagcttcgtgagcccgtggtcaggagcgctgaccaggactctccccagtcccaaggaggagctagctgcctgagcctctgatcctcctaggttggcagtacaccgccctgggaactccctctgagcctcggtgacctcaacgtgaacaaccggaaggtgggcctggcctacctgatttcttcaccgcttcccagggaagcactcagtcaatccctagaactatgagttcaccgcaggtgactaaacaccttccggaagcaccccgaacagccgtgggccagaacctcctctcagcagagccctgcctcccctctctctatgcgccccttagctccaggcccctccaagacccacagccacaggtgaccacctggctggaaggctaggggtggttttaccacgaagccctgccccttccttgtccctgctggtccacaccccaggcagctgccctccctccccaagcgtctgctctggggcccctcccctaagcctggggaaggtgcttaccacaatgactttgttggtgatgaggttttctgggcgatctgacctggaaaaatcaaaccatgcaaaggcaaacgcttcctgcattgacctcccgctcccgcccatgtggggtctccctgggtgatgctgagggctctgtaagtcctggattcggttcagggacaaggggagatgctttgcaggaggagaggggaggggagagagcagagagagaaaacatcggccttcctctctgtgtttccctaagagaagccccgccccactcccgacctctctggcaggggtaggagatgagggacagtcaggctggactgaccacagggagatctgggtcagggccatttcctcagagcctgagtcctgagacactccctgggctgtgtgacatta

SEQ ID NO: 61590 - DNA, 1051 bp, Homo sapiens
aagacagtctggaaactcttccgcctacagttaggtaacttggacactttggatataaggtaatcaaccgcttggctagattcaaaggttagctaactacatgagttccctacaggaatgagaaatgaacgaatgatcactaaggggaaaaaaaagcatatggtgttaacttgttcaatgcccccaaaaccagggttgactttcatctagaaaacaacacaaacatctggacaacttcaagcccctggcaggctgagaacttcttactgctttgaccctctaaaatgaagtcttcgtgggaatcaaaatgggccaaagctgagcacaactaaaaaggaaagctcatcctcccactctgcacagagagcaaaagcaaggggaactcccctaaatgactggatcactgggatcacccaagtagccccacagacatcgatgtctatagccggtggtcatctctctgccttctctcatcctaagcccctctcgtgtagcatccaaccgaagcccacacggatggacgcctgtccacttccccggcctcagaaaagatccggaccgctcctgtgctgactccgcctcggccccgcggcccctcggctcaccccaggcagccagacagtcgatttgcagaggcagcttttctaggatcggcactggctcgaaagcgtcgtgcatggcggcaaggggagagttgccaccgccgtctcgcccagagtgttccgggccgggctggggtccggaacgagtctgggctaagggtagaccgggatccggccaggaaccccccggctacaggcccttcaacaacacagccatcgtcaaccccggacttcctgctagttaggcccgcctcttccgcagccgaagtcccgccccttcctcccggtgcactctaaatgaattgttttgttgctgagttgccatcgtcactctggacccatagctactccatcccgagtagccatgggcttaccatagaaggaacaaactcttaatcttagaactgctttaggcagtgggcgtgatggttaaaaactcggcctttggc

SEQ ID NO: 61591 - DNA, 3870 bp, Homo sapiens
aagactgctagaaattccaacttaacttaaatctttatgggacgtaccccttaatcagttcattccctttactcaccaatcactgctcagaataaccaatcattttttctaatgaactattctgtgtgcaaataaccagagttttattttcaaatctaaaaagacttaactattaaccattttagtaacaagtaaaaacctaactgaacacctgaaaatcttcaccactgaacaaaaggtataacgtttaccataataaaagcccaaataagatttggacattacagtcagtgagcagagcagaatgaaacaaaaaggccaacgtaggtttaatggggctaatgcttttcagcatttcctccctgcatctggtttttgtctgctcacaggactatacctgttactgaaataaggtttaaaatgggtaaggggcagaaagggtcaacccatgtagttaattatccaaatgaaagactagccttaccacattaaattttaagtactatttcttcaattttaaccattcccatgttaaaacacatttcttaaatctctatgctttctagtcacacagtaaagcttagaatagccattccaaagttgaagcgaagtcgaaccatctcgtaagcagaattacccagggaccaagaagtgcagaggaagaaaaagaaagaaagaaatgaagactcctatttacatatctttcttatccaacccggggacactggattctgtgaaacatctgaaagataaacaactctccgtttgtacatcaagtttacatctcaagtcaggcactgaaagttctgtttttctgatgagaagccgctccaccactcctttctgttgctgaagtggcccttacattcccgctagcctaatcacagaagtgcgcggctttccactccagggaggtgggtcccagttggctagccacacagaccatcccagcaaccccaccccttttgaagagacttttgcggaaccttcatggaccccttgggccgccgtagccccaccccttgctcctctaggttcagacgttagtgaagtgaatactcaccgacggtatcggaatgtgccatttggaccggtcggcagcagctacggttgccggtcccgcactgaaaaacgacagtggtgacgggtgagctcccagaagcagaagaatgacaggcaacacctgaagccacgcagccgccgccatcttcacagccgtggagtgcctaccgaaagcatttcaccctcttccggttcgtcccgccttcttccggctctgctctaagggcgggattatccgggtcctggaaacgtcgcggagcttgtttgctgtgcggcgtagcggcccctctctcagacagtcgtctgtgcgccgtgagactttggacctactgcgcaggcgtcatcctgttggaacctggtcagctgggttagagagatcgctacatgccagcctggcctgagtcttttctgtctcccagccgttaaaggttttaggaccaggcaggcaccccgtgcaggatttggctctctacttccgctcgccccagcccttcatcccttctaagtcaatgtcagactttggggccagaaagtctggaaaagccctaagcctggctgcccaagtggcgtctagtagtgagttctccggtttgggtggtatttaagcaaaggctggaattcggcggtggtggagtacacgcgattcctagactgggtagtgtaacaaccttcaaaggccccttctagccctgaagagtacgatgctgcagtacaatctggctggagacctagcctccagcaaagacccggccggcacttcccacccttaaccgaaaacggagacagagagggtcagttttcaaaatctgtggcgtgaccccgccactgagatagatctgcagatgcttcgtcccagtcagggaggccgtctcggcatttccaggttcttaacgctcttgatttttaccctctaggactcattgcgtacacgccctcaccgccgcccagtttcggttcctaacaaaagcacgttcctcatcagccacccataatcaagacaaatttgccaaataaatcattgtagaaacgctagtttgggcctgaaaaattccaggagcaagagtcaagatttgtcactccatgagaatctggaggggactcccttcccagaaacttgacgatgaagtactggttgtaattttagaaagacacccaatcggcttttttaaaagatcgcccagggcccttgtcctgagagctgggagctggtcggagtgacagagaagccatggaagcagcagtgaaagaggaaataaggtaaaggccaagtgcttctgtagcgagtgaccccagggtccctagaaacagggaatagtgttttaattgcatttcttatttgcgtatttggtatttgctgacctttatcttttctctcaattcgcgggaagttagttgatattaatagcctctcataaaatactttcaggatggttaaataggccgggtgcagtggctcacgcaggtaatcccacagcactttgggaggctaaggtgggaggatcgcttgagttcaggagttcgagaccccctccccgccccctcggagtcccagctacttgggagaccactgggaggatggatttggaggctgcagtggagctgtgatcttgccactgcttgggcaacaaagtgagaccctgtctccaaaaaaaaaggatggttaaataacattaacagtggaaaagttgcaatcagaactcttaacacgtgaatttcaggcatgttgctttccaaattcatctataatcaccccttcctatatcatcccagagttaattcttcgaagctgtaaagaggaaacaaaagattctccaatctttgtacacttgattaaaataaactgggccggttcgctcatgcctgtaatcccagcactttgggaggcctataggtgggcagattgcttgaacccaggagttcagaccagcctgggcaacatgctgaatccctgtctctacaaaaattttaaagttagccagacgtggtgatgtgggcctgtagtcccagctactcaggaggctgaggcaggaagatagcctgagcccaggaggcggcagttgcagcaagccaagatcgtgccacttcactccaacgtaggaggcagagcgagatcctgtctcaaaaaaaatttttttaataaattaaaataaacggacaaagactgagttcagtgaaggacaaacagttttttagtatggccaagtatatctgcctgggcttgttttcataatatttcgacgtttgtgttcagtcatagctttctacataatcatggacatgctgactacagatgcattcggccacactagtgcatgaaagccggtgtaatttttttttctccttataatctgtagttgttttaatcagatggaggctagtttaaatacatatactcaaacttcaatatacatatatctcattcatgttttatcccagaaacagctcttctggaaacttggttttaaaaaacatggcccctagtttgtcacctcatcttaaaaagcaagaaattccccttctacgtctgttctgttcttattctagcaccttgcacctctattaaagcatttgtcagcttgtattgtgattgctggtaaaaccctaactgatagcttgaacacagttcatatcttcctcagagcccagctctcaggaagaatattctgaaaatattttcttgaataaatcggtgggtgggttatggttcttagtttgtctggttggttggttttggtttgttcgttttgggatgctgttttggttttcctccttcagattttacttttgtggtcatagccttcagtcatt

SEQ ID NO: 61592 - DNA, 1186 bp, Homo sapiens
cccctgcttaggaagttcttgcccatttttgcctactcaaagtcttactaattcctgaaggccctgcttaaatctctattcctctagagaaatgtccagaacttctaaccctacagtcatcattaataacccttcttaatctcttgcctttctgttttaaaacttatcacagaatgctctgtgttagctttgcatctcttttatctcctccaatttcagcctccccaaaagttcaatcattgcaataatagatgccaaataaatgttaattgaatggaatttgagagagcaatggaaacacatgtttaaatagtgagaaaatacataatctaacagaatttgaactttgtacttggacatatttccaaatgttaaaattttgattgtacgctaaaagtagtttaaatacataaaagaacattaaacatgcaagcagtaattacagtatgatcactattgcatcataaccctgccttagaatatctagaaaaggatccacagccatagcactgtttacttgttcactgttcattatcatgttacagtttaactgccctgattgcttccctgttttcgcaagaggcaaagttccagtaacatcatgtttttggtgctggcttggtattcttcatatttcttatcttttacttgcaccacattgtacccattctaagctatgtcacacaacttaccgagtttagctgtcatttaacagacataatagtaacaacacaggcacccagtagtaaccaaaatttggcatcatacttcgtgaggaaattgcaattgactagtgtggcatggcccaccagttgaaaaccatggtcttaaaatatttttctaggtgctcattttgtagcctgagtcctgtcatttctgttctcctagagcttcttgttctgtgttttatttttcaaattctctattatcttcatgattctacattgtttccgtgtcccacggtaggcagaattttacttaggttccccagcctcttgtaaaagttccccgggtctattttcccagctgtgaaaaatcaattccagtttgattttagtgcaccaagcctcctttcatccaccactagagaactccaatgatcatcattttattctgtactgttttctcttctgtagcctgccacccttcatctttcatccagctggaatctagttactctgctttt

SEQ ID NO: 61593 - DNA, 560 bp, Homo sapiens
accagacttgcctcttcctccccctccttcctgagcttctgctggggccgagcgtgcagtaatgacaactacgatttgctgggggaaggctacgtgccaagcactcttttaggtgctttccatgattaattccttcctcacaacagccctatgagattagtactataactatccccattttcagagggagaaaaggtacagacttgactaacttgcccaaggccacacagccagagaggggcagagccagtacttagagccaggcagtctgggtccagagtccgtgtcctgaaccacaagaggccatcatacaccatcagatttggtgctagcatttctggtggtgcctggtggtgatggatccatcacaggggtcctccaggtactggtgctggcccagaccagagctgacactcctcaggcactaccacattccaggcactgtgcttggggtcagtccctctcttttttttcccccccaattataacagtatctacaaagtaggtgctgttatttttcccctttcacaggtgagatagactcaaagaagtgaacttgc

SEQ ID NO: 61594 - DNA, 1843 bp, Homo sapiens
aggttgcagtgagctaagatcgcgccactgcaccccagcctggcaacaagagcgaaactttgtctcaaaaaaaaaaaaagaagttatttgtgctttgaataaactggatataaaccattatggtggatacagcacttatttgctaggtaagagaacttcgcttacctaggatgacagtctcaagttgctaaaagccacggatatctcaaacttctcaataagatgccttaatcttactctcaaagatgattacacaacaaattgaaaggggaagaggatgtaaagcatttcctctccacaattatacaccgagattcggactaaatattaaacggacacagtaagctgttgttactatttgttattagttgttattatcaagacgcatcccacaaggagagaaacgaaaggaggaaaaagaacggaggttgtcagtcgcgagaggttgaaatgtgtccctggcctgagacctacgggctttaaggaccagggtctttggactccctgcccaactggggacgaaggaggtcagtggcttcccctaaaggtcaaggctttggagccacgtttccttctggggctgggagcagagctggaacgcccccgcgaaaatccgtaccccgaagccagcagcaccgcctgcccataaacccgcgccggctctgggagagtggaccaccaggttgcccctgagccgcagcctgcaggagtagaaacccggtggtgtcttgcagccccacaacctccctaaggggcagacgaccaggacccttgggctccgatacgctcaacgcaggccggcccgtcgatactcacattcacagccaacccctcttactccatcaggccgccgagagccaggcgagggagctccctgacgcctcagacgcccccttcagttttgggtccgggagcctgctccggacccgctccccgccgggccccgccacagccgccgccaacgcgcaggcgcacaccgaagccgtcacgctcgcttttttttcctttgccgtccgcagttctcaataatctagctttatttgaacacaagagagtgaacaacggacacacaggaagaggtttttctcaaaaagaatggaggaagaacaaaggcaggcccgcttgcgggagagtcagtacgcagcgttggacgctatgaacagcctccctggtccctttttcattctccttgtttctccttgttctttcccggcctccctgtagctcctactctcttccttggtgtcccgccatttcctttagtcagtggcaactgttcgggctacattttgaaaacactccttccttgtaaaactttctgaagttgaatggaaggtgcaagagctttagaacagccagacctgagtttcagatcttggactagctacgaataatttgtgactttgggtaaattacaattcttcttggaacctcaggttcttgagttaaaattaggataatgttatctcacagggtgttgctaggattaaataacataggtcaagtgtttatctatgaatgctgcctatcacagagcagacattccataatactgactttattcttactcatgcctaaggtatttataatattttttaagtagagacggggtttcaccatgttgcccaggctggtctcaaactcctcggctcaagtgatctgcctgccttggccttccaaagttctgggattgcaggtgtcagccaccgcgcccagcctacatttattatttatttatttagttagttagttagttagttattttgagatggagtcttgctctgtcgttcaggctgtagtgcagaaccgctctcttggttcactgcaacctccaccttccggg

SEQ ID NO: 61595 - DNA, 1922 bp, Homo sapiens
ctggcactgtcgccagtgatagacattatgatagtaatgtagctgggattacagacacccgccaccacacccagctattttttctttcttttttttttttttttgtaggggggacggaatttcactctcgttgcccagcctggagtgcaatggcatgatcttggcccactgcaacctccgcctcccaggttcaagcgattctcctgcctcagcctcccgactagctgggattacaggcgcctgccaccatgcccggctaattttttgtatttttagtagagatggggtttctctatgttggccaggctggtctggaactcctgacctcgtgatctgcccgcttcagcctcccaaagtgctgggattgattacaggcgtgagccactgtgcctggtgaagcactttcttttcttgatttccagcagtttattttattcttagaggtgcatggaggggttcctgcagcaaatagtttacaataatcctccatctgcttaaaactcttcaatagctttcagtgcccctagtacaaagtggtctaaaattccaaggccttccaagatctagcgattgttggccttctaaagctttctttcctctacactcggggatgtacgattagcactaagcctctaacaaggatgaactactagaaatttccagaaggcgttatgctgttctcgacataagctgttccccagagcctggaaaactctagctctttctctgccggatttccgggggaactcctacttatccttcatgactcaagtcacttcctccgggaacccttccagacacccctaagaataaaacgctttgttcattatcagccaaaggcgcctcaaattttctatgtgctatgcactgtattctatccactataatttgtttacatatctatatcttagtctagacatattgaaaggcgatgaagagcagggaaagcactgtattcgctttcttttcttcagcgttcatccagcacagtgcctggcatacggtttgccctcagtaaatgtttattgcatgaacacctcccagcttcgggcaggactgaaatctatccggttaactagtgaattcccagactctccgtctgcgtggcagggacatttaaacccccagcaccgtgattggctccagctgcaggggtgtgtctgtgtccgcggcgaacgggaagtgagcaggcgcgcgggctcggcgcgcgcaggcgcgactagggtgcagcgccaggtccggtgttggggtgtccgagttgccgccggagaggagtggcctcgcccgcttggtgagtctccaggagtgggacggagggagctggccgggatgaagtctgagactatgtcctgagaagaaagagtgtatcgtattggttgaaaagttggtggggtcgggcttaagcggaggagggggctctctggcccttactcggcagatgggcccggagagaggacgggaggtgccgggagaacatcgagggaccagtggaggaagggtagctggatggtaattctctggacccttcctcgaaattaaacagagatcactttccgcccctcacccttactgtgttgctgtagttgacattaatagactgcctgtatggtgaccacagtgatcagatagctctgagataatggcttgaggaaggactctgaggttcctggtattggatagcccttgctctctagaaaggttcagccttacctcgcggcattactgcacaaattagaggatcaggaaaagaatgaatttcacaattcgggattggagtggtggggggaaaaagtactgtaaagtgtagtttcatctcgtcctttttttcttctttaatcagtcaccacaatgttaggaaaggcagttgatggtaggaggaaacgtaaagacataaaagtgggagaggaaaaaaaagtcaagaa

SEQ ID NO: 61596 - DNA, 521 bp, Homo sapiens
ttctcctgcctcagcctcccgagtagctgggattacaggcaggcgccaccatacctggctaattttatatttttagtagagacggacggggtttctccatgttagtgaggctggtctcgagctcccgacctcaggtgatccgctcgcctcagcctcccaaagtgttgggattacaggcgtgagccaccgcgcccggtctaaggtcacatcttttctaatcatttagaacacaacctagaaccagaaagaaagtaaacaaaaacaggcctgtactcatgggacagctgtggagtcttcacctatgagtcataccaccatcataatttttgccatttagagtactgttgttattttacttcatgtttaatgggttttttaaaaaaacattgcccacttccaaagtgataatctgtgaaatcatggtttttatgtattttatagcttttttagcatccattataataaatacataactattaaatatataactctttcatatgtaacagttaaaatcatattct

SEQ ID NO: 61597 - DNA, 1489 bp, Homo sapiens
agaaaaccacccctggtaacagctgatcactagcaaaagcctccctggcgagagccatactcagtttgttgttgttcagggagaggctcttcagcagagtgaactttcctatcagcaaaggcggtaggctttcgatcttgttgttggacaagtcgatggtcctgagattgctcgtcagcttctgcaagtctgcggggaactggagaaaggagttcacagcgtggggaatcccgcaccgactaagttcgccgcccccgccgtccctctccctttaagttccctggtcgtgtccctcccagtctcacctcggtcagccctcggtccttaagctgaaagacaccagttttctgcgccgtttccacatgagcgcggagcgcactgtttcccatcctagcgccgcggctcaggtccctgcgggaaggaagcgctgctgtcaccgcccagtccacccggtcggcctcccggctggggctcctgccccagctctcaactcccgccgatccctggctcctggggcccgacccaagagcgacaaggaagaaacggaagaacacacagcccgaccaccaagccctgccgcctttgcagctctgcggaggccaggcgcctctgggagcctacggaagatcagggagccccggactcgcctcccaccgctcagctgccgtaaggctccgcaggtgaagacccaggacccgcagtagccgggatgcgctccccggcttagtcccgggcgggaacgccctgtgacgtcatcgagccgcgccgtgcgttcgccctgcgatcccgctcactcttggcgccttcgcggaaggtgcgtccgagccatggccgctgccaacccgtgggacccggcgtccgcgcctaacggcgctgggctagtgctaggccacttcatagcttcggggatggtcaatcaggtacgtgggggtggcggtggtgtcatcaagggggtgcccaaggtggcaacaatatggctgtgagttggtgctgctggctgtgggagtggtgagggtcctggttggggtctgtactagagtaataagagccccttccaggcaacagccgcgaacgttctgccgtggatgcttggaaagcggggatctgagtagatggtgtttagggtagactgtgttttgagtgtctgtagggtaaatttgtcccagtccagtttgtgggagattagactgttaccagcctttttttcatccagtgatactgcctctagactgtagtgtaagggcggggatgggaaatacgggtcgttctgtccccttgcggaacaagcatttccaacaaccctcgtttgtgggaagtgttgaatcgtatttggggcgggaggtgctgggtagagaagagcgccagaagctcttttttgacatttttattttattttattatttatttatttatttatatgagacagagtctcgctctaacgcccaggctggagtgcagtggcgtggtctcggctcactgcaacctccgc

SEQ ID NO: 61598 - DNA, 1191 bp, Homo sapiens
cctcccaaagtgctgggattacagacgtgagccactgcacccggcctgcctcgaaaatttaaccacagaattgacagttcaagcgaacgcagagaataaaagtatttagcaaattactttgcaaactttcggaccaaaagttgatttacttgactttacatagcacggacacctagtcgaggaacaaaaactatttctgggtaagcggggccaggaacaacagacttagcactgagtcctcgcggcccactcggctcaggattggctgaagctgggccggcactgctgggcccggtgcggcacgcgcatgggtgggggcgtcccaagaggctgtagggcggagcgaggcggggcgagcccgggcgtcctcccgcccaccgactagccaaggctcggcgggcaccacccagctcgggatgcagcgcgtgtttgggcgggggcgacccgggaggcttcggatggaacgaggcggagcgagccctggcatcctcccgcccaccaggctaaggactggccgaacgtccacacgggcccgcctgctctggctgcggcgcgtgtttgggcgggggcgagtcaggaggctttaaggaggattgaggggaggcggggccgggagttctcccgcccaccgggctcaggattggccgaagctaggcaggcaccgccccgctcgggcggcagctcgcgtccgcgcggcggcgtccccagaggcgcgtggggcgggcggggctgggttggggctgtgtctgggcttagggcgggggcctgggatgctgccgctgagctgacccgctggacttgggttgtggcagacggatggcgaacgtgcaggtcgccgtgcgggtccggccgctcagcaagaggtgagtctccgcgggagagggcgcctgaggcttcacaggagctgaaaagagcgggaggtccgcgtctccccctgcagagattctggcgcgcagaaatcggtgacaaagtgacccggggggtcggggtccggaatccacggaggcctggcgggacgggacctcagtcgagctttcgcgttgtgtcctggggatagcggttcccggacggccgcgggagggctgccctgggtgagcgtcgctggcgtcctgccagcaggagtttcgagggacggcggctcgaggcttgctgcatcgggttgggcctttgagaaaggctgggagagggatg

SEQ ID NO: 61599 - DNA, 591 bp, Homo sapiens
gaggctgaagcaggagaattgctttaacccgggaagcggtggttgcagtaagccgagatcgcaccactgcactccagccagggcaacagagcaagagtccatcttaaaaaaaaaaaaaaaatgtctggacattagccactaatctaggccaaccctcatatgttacagatctggccatgtaatttatggcattatacaggtggttagtgctcaagctggaacagacccaggcttccttatggtggtctttttattgcattgtatcattctctgtctttttatatttacagcctcaaaagataggttcaaagttaaaattccttagtgctttggcactcttcctggtccttagtggtgaaatgcctgagtaaatagatcagttgtcaccaactagggactactagaggacaagtcagctactgcaagttctactgagaagcagctttatttgttaaatgcctattgatagccagatacaattgtaaatgtttatcacttcattcacgttctattagatctatattatttactccattttgtagataaggaaactgaggcatagaacgtttataggacttgccagtaagtggt

SEQ ID NO: 61600 - DNA, 410 bp, Homo sapiens
tttgttattactttatactcctttaataggaaagaaaggtggtagttttctttttcaaggtttatgaatagttaaaaaagtaataaaaactttatacttattaagttggcaaaatttaggaagccagatgatgccagattttggcaggactttgaggatattggaaccattacaggttcctatgactcagcaatgtttgcataggttatgagagaacatgtaaggaattgtttattaaggcattatttgaagtggcaatgagttggaggacattcgcaaatccatcactgagaagagtggataggtaaaatgtggtagttgcacacatgaaatattaatactatgcaagactcgaaatcagcagattaaacacctaggcagaatactgagtgaaaaactttttttttttt

SEQ ID NO: 61601 - DNA, 659 bp, Homo sapiens
cagtgcctggatcttgcagcccatcactgtggaagggaaggaagtcaccagagtcatctacttggcccaggtgataaatcctttgcagctggcctcacagcacaggctgacttggtcccacagccccctgggatttttctgtctcgcttttgaacaccctccagtgcccaggccctttggcctgagacctggagacttgagggcttcctgggcttttgcagtaaggggagtcagtggggaattggagagaagggaatgcgacaggagtttatcaatcttttctgaagctgctgttaccgaaaacctagtgacctgcatcctgtgggtgatcccagtgtccttaggagatagatgagtcattgtgaggcaaaagcagcagcctcagcagagcggaatgatgacctgttgggttcacctctcccgtcccagtcccttgacttgtactttgtcactaggaggtgaacgccaatacttagatctggatggcagagcccaggggcctgtaaacaccaaaccacaatctgaggtgcttctcccatcaccacaggctgaggggactccatgggactggagtacgcctggcattctctcaaatctatttgcaccttaaattcttctctctctgctttcaggtggaacttggtgctccaggcttccca

SEQ ID NO: 61602 - DNA, 1716 bp, Homo sapiens
gctgagtctcaccctgtagggccggggggaaccgagcctacgggagggaactcctccaggttgctgaggtttggcggatcagacagcgtgaggctggggcggctggggctgccagagcccctaagcctccggcccccggctccgggcaggctctccccgctgaccccctcctccaggccgcggcctccacgctcgcgggccggccccgggccccgcctcctgcccccgcggcgggccagaggggcctcggcagcggtgctctgggcctcggtcggagggaaaagctggctgcgcgccccgcggctaccccgcggcgggcctcccggcctccctggcaaggctgccgaggcgcccggggtcttggcgggggtcgggggcccctgcgggaggacgcggctgctctgctccctcaggaagttcaacaggaacggtacgaattctttccgcagggcccggagtgagctcagcgcggccgcctccccagcgttatcctagggcagaagcacaggtggaggggcgagagggtcagccgccggcccgcgggccgtgagcagccggggccgtagggcgcgcctcgggtgggcggcccgggcagcggcgcccagttggagtgcactcggcccggctggcagccaggcgccctagaggaaggggactggagggctggactccactgcgggaaccggcttcgagtcagacctgggggcgtgtcaccgctgttacctccgaaccctgggtgctgcgcgcgatccaccgcacgacggctgcgaccgacacctcttctcgcagcagcgactccaaaacggccgccatcccggtcggggcgctctggggcgactgcgcaggcgccggcgcgccgcgggcggccagggaggggcggggccggcggcggggaacgaccgttgggtcgcgggatggggagggacccggctggcggggcggggcggagccggctgttgcccagacccacggagtcaaggcctcgctgagtcctcaaccccggccgagaggccggttgttaggaggtgaaatgtggatcacagcgcctggggaggcccaccttggctgcccgccctggagcgacctgaagggagggattcgagctgggagtggggctgccgcgggtcggacgcccctctagggagacccaggacccgggagagaggtagaggggagcagagacagccaccagcttctatcttctgctctaagcacattctttcacgagtttaagtttcctagatccaactggcaccaccccagagaaattataatctaatctttcattttgactttgttcttctcaaaggccgatttttcaatcccttggccgagcagtacccatcggcttttcagcgctcaccatcaactgaccatttaggaaagaattatttctaggaggttcttaataatccccaagccacaacccttaaagtgcctcgggccaccctgcacacagaattgcttgtatgtagctttatttacttaagtgggtttacatgaggttaatatttcaactactttgcagtttagatgtcagtaagcatatcatgattagcttctgggagcttgaggtttgtatttttgggtttggtgttttttgtttttgttttgttttttttgagacagggtcttgctctgttgcccaggctggagtgcagtggcgtgagcacggctcactgcagccttggcctcctgggctcaagcaatcctccc

SEQ ID NO: 61603 - DNA, 1745 bp, Homo sapiens
caaatccctcagatcattacttcagcaccctaagtacaagaaagtcgcggccttcactgtcgttacaacacagcaaacagattcagtagtcccatgttcctttccatgatagttggggaggcggggtgggaaataagcgctcagatttcctaggaatccttcgtgttcggtgctggtaccagaagtggcatgggtacaagtgatatgtgggtcacccacagagagagacgcagaacgaagcttcgtgaccctccaagttcagtgaagacacccaaagcctggggcaaaacgaggcggcagccttcggggaaatcgggcagaaccagaacgatctccgagatggagagtgacggggtctggcacgagccccgggcttgcagcgaactgaaagtccccggtacccctcccctcctcagcaggctcggtcactcggcgaggggtgcggccggaggagggggtcgagactgggggagggcggcgccctggggggtcggggggtgtgtcctacctgggccgtggcggacgcaggggtttctggaggagggctctggtccagctcaggaccgggaccggcgggggttaaccctcggcaggcgggaccgccactgcctgcccatcccccaccgccgactgcggcgggacccgagcgcggcttccagggccggccggctgggtagtcccctggggtaccgtccgcgtttactggcggcggcggcggcggctgctgctgctgttactgctgctgccggctcccccaagccgctgctcttgtgccagcacctgctccccctcctgccgccgccgccgcctcgtccccaccgctcccatcgccgctgcggcgactactgcagagcccgctgacccgacccgacgttattctcccccctcgtaacccgacacagcctagcccacctgccctgccagcgcgcacgcccacctctccgctacaggtgctgattggagagtgcgttccgaactcgcagcgtcggttggctagtcccattgcctatcacgaagggggcggagagtcgggcagaaaccgtctccgccccccaccggagaattgccgctatcttcaggtttgcctgagagggcgagttaccgggaaaggagcatcacaatggcagcgcgcatgcgcctaggaattctgggcctcgtagttccagccatagccgcaactccccgcctgtcccgaggagagaagtagggcttccgagacaagtagtttgcgcacataggtgttctcctagcgtgacagttaaattggttatagagggatggttgggaccccatggttgggcttttcggaataaaatcggaaatgctttgtcacgatacgaaattacacactgaggcagtcgcgatgaagggcccaaatcgtgaggccctgcaagccttaaggatccatcctcttcctcagcatcagcgctgacagcatcccgcaaattggcgccgtccccagaaccgcctaacgtgaagctaatcatctttgggggactggggaagggccttaggtgtgacgaggaaaggagatgggcacttccataaacgaatgtcaacttggagaccggagtgtccttacggtttcacaacccaagaacaagatttcattccctttgtgaaacaccaccagctaaagactcaatggccagccccggtgcacaccagtatgcgatgctgagcaagtgtatgcgggaggtgctcaaagactttcaaagaaaagcgaggagggcggagcaaggacg

SEQ ID NO: 61604 - DNA, 450 bp, Homo sapiens
gactctgtttcaaaaaaaaaaaaaaaaaaggattttaataattataatcaatcctgtaaatttctaattcttacctgcaagaataggttgtctctccacttttgaaaaccctcccacaaagctgaaatgctccactgtgcttcaatttctctaagcaaatatctggatcttctccaaataagtaccattccagtggagtgaatattgacatttgtacactttcctcctgcttttccaagtctgggtccatttcagcaaagtaaatttctggcaccaattgtgccaaatgatgcaagaaagcagtataaaaatcaacttgctgatcccaccactaaaagaaaagaagatgaaaattagactgacttacaagttccttcttaatcatctaggggcacaaataatgacataattctacaatttcaaagtaatttacagtatatttcatctttc

SEQ ID NO: 61605 - DNA, 1528 bp, Homo sapiens
cttcccattctttcaaaatgcaagagcaaagtatagattccgacatcaattaatggtattgctctggcttgaaatgtttgggagtcctttcttcacctttaaaaagtagcgacagatgatgggtttctccactgagggttaggcctggggttcccaagatgctatacgcaaggacaattactacacctcacatctagacatgacttgacagtagcagcactacctaccaatatcaggtcccggccagcaggctatgcaataaaataccaggtgctgcgttcccatcatcaagagtaaagggttagtactgcttctatacgaaaatggctcttgctccaaccccgcctcggcccccacatcaaaccgtctaataacatcactggttctttctacttcagaatagagacatgcacacttgagatcatcaagaataatacataacaaagtcattatattccgtagacttggctggcagaaatgtgggttgcgactaactttttattcggtggcttccttccagatcaatccagataactccccctccccagagccgccataaggggtgaagccccacatcctcctaagcgcagtagggagggaccggggggaggacaaaagagacttgcctatagggacttacagatgccagacgctgaggggtctggggtaactccgcgctgatttccatcctctcagtacctccagcctcctcgtccgccatcttgagggaaactgacgcctgcagttgccgacccccggccagaggcaagcggaaacctgtggccggtcggagagacagggacgacacttttacgacggcccctgaagtcgggtttgacgcagactcgaggagtggcttccggcccgcttcccggaagcaagcgtcacgacgtgaagggactggagattttttttttcccctctaatttatcaggcgtagctcttggtagctgaatggttgtatatctgggtttggtgctgggaactgttgcatctacgaggtaaaaaaaacaaagtcagcgtccattatgaaaggaagaaaacttgtcgggggctaaagcaagaacctgtcctagctggccggttgttggcctggggatgttttgtatcccaacctccctgcagtagttccccagagcctacaaaatgaaaaagaaagtactcacacatcttctatttttaggattctaccccgtgggcacttgcacatgtgtacaaaaaaagctcgggatccagctttattgggggacacggggggaaataacaaaaaattggaaacctagtcattcatcgatagaggaaagacaagatatactatggtacattcgcattttgaaatactgtgcagctcttgagcaagataaatctgcgtgaaaagatcaagataaattgagagaaaaaaaagccaagttgctgcaaactatatatttgcacacataggcatttaaatgtgaaggagtaagtctgaaaggggaaagggcaaagtagtaactctgagggccaggattcggattggaggaagaaggtg

SEQ ID NO: 61606 - DNA, 1901 bp, Homo sapiens
caataagggagttgttagataaattaaggtagggctgaatctaattctcctgggtctggcccataggaagtatttaatacttattaaatgaatggtatactaccgtgttgcaatattatttactcaggtgcatgtgaaatcagtttaagggaaaaataactttcacaaaacataggaattacatctatagaaaacctatgctgccgggcgcggtggctcagcctgtagtcccagcactttgggaggcggaggcgggaggatcgcttgaacctaggagttccgaggccagcccgggcaacacagacagatcccagtctctacaaaaactatatttaaaaaattagctgggcgtggtggtgcgagcctgtaattccagctacttaaggtcagggaggtcgaggctgcagtgagccatgatcgcgccactgcattcctgcctgggggatagagaccctgtctgagaagtgaaggaaaggggaatggtagagggaaggggaagagaaagaaaagaaaacctatggaggtacgttaataatcagaaggggccagaggaagccacctgacacatttgtgagacaatttaaaaggcgttctcatacattctcactttgatacaacaaccctgcaaagtgcgcacggaaggtgttattaactccgttttacaggtaaggagatcgacccactgaggtcaggagtgactgaccaaggcggagccaggactctagcccccgcctcccggccactggtcccggtctccttccccgccaccactcggccaccgtcattggtgttcagagtttcggttctcttttctgtgatcgtattacttatgcaaaacgagcccagtcacttgcgcggccagagaggggcaggtgctgggcggcggctgacgggcgcagcaccctaggcccagtgtctggctccagccccgcatccggcgccggccccgcatccagctctggccctgcgacaatagagtccggaagtgcaggcaaagcggctcccgggagcgccgcgcggtcctgcgcgggatcagcgagggccgcgccccggcgggcgggcggcatggctgcagtgctggctctcagggtggtcgcggggttggcggccgcagcgctggtggccatgctcttggagcactacggcctggcgggccagccctcgccgctgccgcgccccgcgccccccaggaggccgcaccctgcgccagggcccggagacagcaacatcttctggggcctgcaggtgacgcggcgggaagccgggccgggaggcaggtgcagatcgggcaccgtgcggtgggacccttgcgggtgttgggccccacgctccaggctggggacctcagtcagattgtaactcgaggctctgtctagtgctggccctgtccttacctggggggttcgttatgcattgcctctttgccttttccttctgcccgagagagccgctgagccgcccctccccatgctgcctcttcctggctcagatctctctgttcaatacctgttttcggcagatatccgacattcacctgagcaggtttcgagatccaggcagagcggtagacttagagaaattctgttctgaaactattgacatcattcaaccagctctcgtcctagcaacaggtagggaggcttgccgtgctgtggtggtggtctgtggtccgcatggtagaactctagccagggctgtggcttttcattttggggacgttgggagcagtatagccacagccccaggtgagctctgtgaggtggaagagattggacattctaacccctttgcctatggataactgaatgagtcaagatccaggcaaaatgatttgacgtagcaaggttttgtcaaagcagtagaagcaaggctcctggttctcatgtcagtctgttgtctga

SEQ ID NO: 61607 - DNA, 1482 bp, Homo sapiens
cctaaggggcaagagaaggcgtggcctgtcctggcctctgagagtgggatggttggtgctgtacctcaggggacagggcggggcgggaggaggcggggccaggcctggtctctgataacgggatgggtggtgctggacctcgggcggggccgggcctcgtggcgggaggaggcagggcagggcctctgggacggggctggacggcttgttgacggaaacgagcccttgacgctgtggcccggaagtggagcggctgtcgcagtgcggctccggcagtggcagcggaggcctgtgtttgcggccttcggcaagcgactgagatggcgagcgcaactgcacctgcagccgcagtccccaccctggcttcgcctttggagcagctccggcacttggcggaggagctgcggttgctcctgcctcgagtgcggggtgagctgacggagttagaacgggcgacggcaggggcgggctcggggtcggggagaggccgggctcggggtcggggagaggccgggctcggggtcgcggagagggcgggctggggcggcggcggggagccgggcttgggcgagggaggtggctccgcttacctcagcttttccattcgccaccgttcggcccccacacgccacacccacaagtcggcgaagcccaggagaccaccgaggagtttaatcgagagatgttctggagaagactcagtgagtgcgcctccttccgggctccccttgcctcagttcctccagcgtcccgaccccttttcctcccgctgtcccccacggaggggactgctctcccccgctgcatcctttctgtgaggtaccttacccacctcagcacctgagagggtgaaatagaattctaacctcgacattcgggaagtgtttttgagaagtctcggtcggtaagggaagtcttccaagtccgtgcagcactaacgtattggcacctgcctcctcttcggccaccccccagatgaggcagctgtgactgtgtcaagggaagccacgactctgaccatagtcttctctcagcttccactgccgtctccacaggtgggcttcactttcgtggaatccttgggctgccgagttacaccttaggaatcctctaattttctttccaccttttgcacgcacgccaggagatttcttttcttcatctgtccagtgaggttaccgtttttacttcacaggattgttgtgaagaccgaattgccaagtgcagttcctggcgcggagtaggcaggtcttataaatattggttcagtctgaagtttatcctggttgtttcccttctgataattttttaagcactttttatttgctgggtgttttcacatacttgatggccatctgacagatgagcaaggaggctcagaagctcagcttaagatttaaaaaaaagcaggggggctagaatttaaatcaaggtctatctgatgtctaagctacctattctgttatactgcataataccctt

SEQ ID NO: 61608 - DNA, 327 bp, Homo sapiens
aggcagaaatgaccaacatccacatacccctgagaggtctttcccaggccagtaggaagcctgcctgctgttcttctccagtgacacagccagggataggaaaggagggccgtgactaaacatgaggactcagtgcttggcagagaggcgaggtttcacattcctgcaagggcagctcgggtggccctctcctgatggcagggagccacctggaacacagcatgacagggcagtgacagggcaccacggaaatgcccaatggtacctcatggggatgggtgcagctgacacatgaggcggagtgaggacatgcaggctcctaccctt

SEQ ID NO: 61609 - DNA, 2122 bp, Homo sapiens
tcttgagagcaagtgaaactggctcactcggcagtgccgcccctcctgctctccaaatcctcctgcactgagaataacgtctgggctcaagaagacagaggcgtggccatatctcttcaggtttgggacctggccctcgctactgactacgctggcagggaatacccctgaaggcgaagcaggatttacgcgaggaaatgcctctgaggatggaaacactagggtgtgggagagggtgtctcccctagaagctgccagaatgaaataatgggcgcacttcagatgccactcctcaaattcgtcaaagggttcaatattttccacccgccggcgttcttctgcgggaagaaagcagtgatagaattcattcatgtccacggcaccgcaggcggtccagccagcttgaaggaagcggcgccgctgcgcctccacgtcaggaaaacgctccaggccatgcaggggggagtttagctgccgaaaatgttgcagcatgaactggccaaaggcgtcttgaggcctcatctgctcatagaccacgaaaagggcattaggaaaacgctgggctgcccaggcgatgagggccgcggcactctccggctcgaggtaggtcagcaccgcctcggccaggagcagagtgggtgaggctgcgtcgagccccgcggcgcccagggcctcctccactcgctggagctgccgcaagtccagacccaggatgcagtagtctgcgctctcaaagcacagcgcggacgcgggctcccccctctcgaaaggcccggttaacgcgcacagctctggcgtctctccaatcctttctgctttgcgccgcgccacgtccggaaaatccacctcccagactgcagcccgggccaggcggcccgcggtttttaagcgaaaatagagcgagtcgaagccagcgccgagagacaagatctgcgcgcgaagcgcggcctggggcgcgccaatctgctccaaaaaagcgcgcacgcagtgcctcacggcgcgtgcgcggacgtagtagcctcggtgaatgagcggtgcgcggcgcgccgcgcccggaaccagcaacgcggcaaaggggtcctgcacgtacccgcgcgcggccagggaacgcttgctgagggcgctgctgtcgttggtgttctgtaccgcgcctgcccgacgctcacggctccgggggcccatggccagaagagactcaggaatggcagtctgtcacggttgtgagccgccccttggttagcacacacctcacggacctcggtagggggaaaaaaaccacccatgctcctggacttccccttccgccggcacttgtgcgtcacttccgggaagagcgcatctcgccaaccagaattgaggagggtgtagccagtgctaagttcgcttgcggctgacctttctttggaatgtcgtgagttccatttgtcccagaatacggtccgctaccgctgtgacatgagtgttagggaaggcgggttgtcacgtttctacaagccttccagtcaaaagggaaaccttgcctaagtccttgtagttgagaaatctctaagaggtgagtctgtggggactgacgacttggcttccttggaccgccaaggaagggtctggtaggagccaagaagggtcggcaccacggaccttcagtaggcaaggattagttagcttccttgggtgctaatagttgctgatttatttaatgctctcacagttgcaaaagagaaccccatttaaaacttgaaaacaagtcactaaggccagggtgcaaactgaagaaaccgacctttacaaataatttatagacacctaacaagaagacgtttccccacagatagtagactgttgattcccttgtattcccagccctatgttagactgacggtgaataaaccactcagcctctctttctcatcacaccgccttggagaattctgtggattttaaagtagtgttgaatatgtccccagaaaggggagtcactgaagagaggtgattgttccctgtgatatgttctgagctttgtttttaaggagtaaatccaggttagacttcagaataatcataaagtttctaaattgggtgtctgggagtcatccataggaaaccacttccagagacatttagg

SEQ ID NO: 61610 - DNA, 1669 bp, Homo sapiens
cccacctcctccaaatccgatcccatttaacttccctggccaatgttgcacagtgagtccgaaccatataggagagctggagttcgagaggatctaaagacaagtcaccatcctgcttgaaggcaacaaaaagcctctgtccagctggtcgcagctgatctcccccagtatctccgcagtccttcccgaggccttctgcgtccgccccgccccctcgggctgcacaactcccaaagcccaccccaggcaaaaatcacgtccagaatctcgggtctttgttttccccgcgtagtagtagccgctcagcaaggattagggagctacctgtcggaaaacctcgcgcaaggagagaagctggttttggctccaaagcgaggaccatgggggcttggggagagtcacattgggcaggagagacggaatccgaggagcagtagtaacgggcttcctgaggacgggctcgggtgtcggccagaggctccaggtgctgccggttcgcggacgcagagctctcagcccaaggagcagcggctgcgggattctggcctcttttgtctccgctccctccggccgggtaacccggagccgtcgtgcggtccctccagaggcctctgacccggctaaggcgccctgagggcgccctccagcccacccctgggagcgtctccctctcgagctgcccctcaaccccctcgcatccttgcctccgggccagcctcacccactcggggtccgaccctgaccccggccccggccccggccccggccccggctctccagcctcccaagtacagctcccaaaccggaagtccgagcgggcggctcggggcaccgagggcgcatgcgcgagggcagcgaccgcgactcagtctccgcagagcccgggcgggagtagctggtggaccccgttgagctgccgaacttccgggactcccccgcgaccccttcccagcttcccgtccgctccgccgcagcgattgtctcggtgggttgattcggcacaaaccgcccgacccaggggccggtgcgcgtgtggaaggggaagcactcccctcgtggtcgcctggaggtgcgctggaggagggggtgacataaccagggactcgaggtccgccgtgggaatgatccacgaactgctcttggctctgagcgggtaccctgggtccattttcacctggaacaagcggagtggcctgcaggtactgtccggcgcagagcgcgggaaccagggagcgcaggaggggggacctgagccagcgcctgggggagtaggctgagggacctagcgagcggggcttccagggctgggggcgtatccctggacaggtgactggagggcagccccttagggtcaaggctgatgcgacacctagagaggccgggcctaggctagaaaacggagggcagacctcgaagagccccacctgtggcggggcgaggaaagggcctgaggtccaggtgtctgacagttgctggggaatgatatagaagtgtgggaggcactttctcctatttattttcacacgtgcattgtttgagttttgaagtactgggccaaatacacagctcccaaacacatggtaagcgctcagtaaagtttgttgaaggaaataaatgaaatcgagagcgtgtggtgtttccctcattactcctttaccagaaaatttct

SEQ ID NO: 61611 - DNA, 678 bp, Homo sapiens
actcaggtggctgaggcaggaggatagctggaggtcaggatgttgaggtcacagtgagccatgatctcaccaccgcactccagcctgggcaacagagcaagattctgtctcaaaaaataaaaaagaaaataaaagaagaattcttgcctatgtttcaccaactgctattagcgttttcaggctggatgactcatgcctgaaacaattgtattctcacagccaccagatggcaaagcttaccaaccaaaacctcagtatggggtcatactcgtcctcaaagcattacaacatccatgacaaagcaaaaataacagctcaacatagtagttaatttggcaggcagaagagaaaatgacctgaggctgcagctgagtatgcgattgcagaaggaacaaggtctgtagctatctcttgttaatccttctttttctcatcaattggatcaacaatcctgagattgtggagactcttgtatcagcaacagaaaaaaggggggaaaggaactctcacatgaacaaaagtaaagacatttcaattatcttagttctaggtgtagaaaaaagcttcactgaacttaaaaaagtattaactaaaaagtctatgatccattcaaaacattgctaaatcctttatgaaagagtctcattttaactttctcattttaacttttttcctttg

SEQ ID NO: 61612 - DNA, 1462 bp, Homo sapiens
aggcaaggagtatcttgctgagagaaatctgaatccaactgacttccagtagggtccatctgctcccctggaatggaataacaaaagatcagttccgtgtaacctactagccttgctcacgcagtctaaacctaaataatggggcggaagtacaagagctgggaaacgggaccacttcaggactcctccaattagaatattatatttataattgctgcaagcactttcctatcatgcctaccaagtcaccattcctcgttatttacaataagcctgactatccctccctatttttcatcaccttctcgtagacaccctttcccctccttcctaacctcttctctccccgcccctttttccatcccccccgccacgtccttctggcgcctctacctccccccaaaagaatgttttctaaaatctgttcgccagaggccccacagcctttcagctttcctcacgaccaccaagccttcttagctaacgtttccccaccccctccttagggccctccaaccccttccccgtcaccgccgccatgcttgccaccccgccccctccggtcagccatcccttcagacccgaaatccaggccttcagagcccactgcactcccatttctctccaaacagtaccaggcatcccggcgggaggtccctcgcgctcgagctagaggtctctgcacgctccccaagtccctccagatcgatccctaggtcgccgctgtcgccaccgccgccaccggccgcgaactccccctttcccgtcacgtcacacaatatcggatcgtccattcgctgccgccgcccgccactcaagaaatcccgtggatgataggtagctgcggcagagtgccctgccccacgtaagaaaaaggaacacggcggcgcgtttccatggcagcatggacgttgcaggccctcccctttagtagagccggagaatgacggtatccttgaaccgaagggaccttgagagggcgtgaaataccttcccctgcttccaggacgattgcatttaccactactcagacatttcagtacctctacctgctttttctcgttcacgccccttaatccccgtccctcaccctctttcctggaaaaggagagagtttcccagctttctcataacagggcaaagaagaagcggcttgaggatggctaggtacttcagagctggtgaacccaacagaagagactctttcttctttgacacagggttaacctgtgtcaatcaggatcccttttgtgggcctctaccctgaatccaagggcctgacattacatctctgccagggcgtttttagtatttgtttgtttttacattgtataagggctccagtaagccatatttcttcccattgcccttttccgcctaggacgtatttcaagcttcacacttgtttatcgttgccttatcttttatgggattgcctgcagagactacagccccagacata

SEQ ID NO: 61613 - DNA, 999 bp, Homo sapiens
aagaactcccggggggtgggagggggggaagtaatacaacagtctcctgagggagacccatctcactgtcacatcacttgaagatgggaaggtctttcctaggttttactcaaatcccccttgctgcagtctgagctcattgcactcgagtcctgcactcagcagagatggaaactagccagccaactgctatcttcagaataacaactcaccagggactcaaggccggaaggtcattctgtcccctccaatactgcgcagccttccagagcactcccagggcccggggcaaggacagggaaaccgaggatggagacctcgggcaggacccaggcaggcagtgacaaaaaacaaaaaaaaaaaaaaacacgccaaacaacgataatacagacacacagacacagatggaggcaacgatacaaactcggaggcagagagggacaagatggctcccctcagttcgggcgaggctgcggaattgccagacagtacttatcagggatacatcttaactagaagcttcttccggcgccgaggcaaccgcctcgccccaccaatgggtcccccagagaccccacccccgctcaagtctaagtggaagctcccgctggtactggggagggcgtggtgggaggaagggggcggccaccaccctctagcctggcgagaccgcagagcacgagcttccagctccggcccgcccctgcggcgcctgtgccacgccccctgacaggcagcagccaatgaactgcacctgccgccggcctttaagagccgcgcgcactctgcctgcagcggaagctgccggactaacactccgcgggtgtttccatggagaccgaggccgagcctgcgcggcctcacggcgttgccatggagacaactccggggctggggctccgaagtcccggcgcaccgctggctcagaaccccgcggagctgctgtgcgaggccggagccgcggtggcggctgcacgctgggacctgcagaagcactct

SEQ ID NO: 61614 - DNA, 1510 bp, Homo sapiens
aaaacaaaacaaaacaagaaactcaataaaaaaggagcagccacaagggcaggggcccggggctggacaaagaagaacctgggtcccacctgggcctgagagaatcgggcaatgaggtggagttgggggagggcttggcctgcccacgcaagagaaaccaagtgaagagaaattggacaaaatgccaaagcctgacattttgaaaatgggtcccgtcccaagtgtgtccactccaacactccttcgggggctagctccttctctcctccattctcgcttctgggcctcacctcagcccaggttctcttcgcccactcagtcctgacttcacgcttccacctccagctcaggcgccccctgagcccggctacccctacgcaggacgagctcagggccggctcccagcctcactgcgccccatttcccgccccgcccgacccccaggtttcggctcaccccgggacccggccctagcccctgcccccagcccaggaccgggcccagccacgctcgcccagacactcgccgcctcggccccgccccgcgctccggccactcggcggtaacgagttggtcccgcccgcccgacgaaggcgacgcgcagccaatcagcggctgccacacagcggcccaagccgggtttgggggttgggacctccggctgcaggtccgcctgggccagacgcgcgagcgcaagcagcgggttagtggtcgcgcgcccgacctccgcagtcccagccgagccgcgacccttccggccgtccccaccccacctcgccgccatgcgcctccgccgcctagcgctgttcccgggtgtggcgctgcttcttgccgcggcccgcctcgccgctgcctccgacgtgctagaactcacggacgacaacttcgagagtcgcatctccgacacgggctctgcgggcctcatgctcgtcgagttcttcgccccctggtgagtccattctgccgaggcgggggaagaaaggcggggctgggccgggggcgagagcgcggggaactgttgggcctacgcagcgccggggcccttcattcctgtgggcccctgctgcggcgggcacatttctcattcccgggagctggaggcgcctcgccgagagcgggggagtcggtgctgatcggcccaaggaaaacccgaaggctgcgctcacgcagggcctcatccttatctcggtgctcttgtggcacttcctatttgcagagggttttgccaccccttcccccagtccaatatgtagctatatcttttctgcgtgagtcagtattaatgctcctccagtctacagactaggcatcccaaagccttgtagtggaagcggacgtttcaccaaatgcagaagtcctggatccctagggtatttcctttcatcttacctcacgccgcacagccattggtttctagccaaggtcactgagtggctgcagaatggtcgtaagtgctttcttgaggcaggtaatttgtccgtcacatggtgtacagtttctcccttcagct

SEQ ID NO: 61615 - DNA, 733 bp, Homo sapiens
agatcacttgagatcaggagttcagaccagcctggccaacatggggaaaccccatctctactaaaaatacaaaaattagctggacgtggtggcgcacatctgtaatcccagctatttgggaggctgagttgggaaaatcacttgaacccaggaggcagtggcgaggtaagagaccagcctgggcagcatggccagaccccatctctactaaaaaatgacaaaaattaaccgggcatggtagcacacgcctgtagtcctagctactcaggaggctgaggtgggaggagaagatcacttgagcctgggaggtggaggttgcaggaagctgagattgcaccattgcactccagcctaaatgacagtgtgagaccatctcaaaaaagaaagtaaaatgggcttttttttttttaaccttattctcgtcacaaaatagacctatttaagcaaattctttttccgctttcatgtttcaagtgaaagtgaaaggtgaaagcttgctttgcttgctttttttttttttgagacagtctctctctgttgccaaggctggagtgcagtggcgcgatcccggctctgcaacctccgcctcccctgtctggctaatttttttttttttttttttttttaagtagagaccaggtttcaccatgttggccaggctggtcttgaactcctgacttcacctgaatcacctgcgttggactcccaaagtgctgggatttcaggcgtgagc

SEQ ID NO: 61616 - DNA, 1133 bp, Homo sapiens
tttcccagccgcgtgggcggcgcttcgctctccccggccaaccgcccggacctcggcgctttcttctaggatccgcatgaatcgctttgggctatcggaagagctatccccagttctcgggagaaagagtccgcgaccagcgtctgacctctcactcagagtccccagtcctgccttagtttccccagcgaccctgaatttggagttgctgtctctaagtgaaagctgaacctgcaaccccttgagggtttcagccgcagaggggcgggagaaagggcctggttggtaggcgggctcagcggttcgcgcccagttagccccgagcttcggagacccgagagaccagaggatggctgacacgaaggggcacccgagacagcgcctgggctttttcccgcccgcggttccaccgctctgaaaccgatttctaacagagaggtaattggggccctgcggttgtggtggcagcagtgaaagttggctgtcaccgactggagcgcccccagttggtgggcagggatacgggcgcgggtagtggcaggaaagttgcagggcagagagccagaacccagtcctaggtctcacctcgtggcctaaacacgcgtcagagtggtgagaccgctccctgaggagggccaggagctgccatgaagtcgccaggcattccagagggccagatcctggtgcactgagaccccagcaccaacctctggccagcccttggtgtctccacttgttcctgtttgattatgtttcccaagagccccgatgttgtcctgtttcctaaacaggatccctctgttaaatccctggacctgcacaatccccgggaaccttaacgtcctctactacaaataaaattacctatacatttgtcaaaactcataaaaaaaaaatacatttttttttttttttttgagacgaagtcttgctctgtcgcccaggctggagtgcagtggcacgatctccgctcactgcaagccccgcctcctgggttcacgccattctcctgcctcagcctcccgagtaactgggactacgggcacccaccaccacgcctggctaatgttttgtatttttagtagagatggggtttcaccgtgttagccaggatggttttgatctcctgacct

SEQ ID NO: 61617 - DNA, 2412 bp, Homo sapiens
ggactacaggcgcccgccaccacgcccggctaattcttattaactttttttttagacgggatctcgcactgtcgcctgggctggagtgcaatggcgcgatctcggctcactgcaacttccgcctcccgggttcaagcgattctcctgcctcagcctcccaagtagctggaattacaggcgcgccaccacgcccggctaattttttgtatttttagggttttcaccattgttggtcaggctgctggtctcgaactcctgaccttctgatctgcccacctcagcctcccaaagtgctgggattacaggcgtgagccaccacgcccggccctccagggtcttaatacaaaaccgggtggctggtggcgatggtacagtaagaaaagctccagaggggaaaagcgaatatgtgaattatctaatctcagccactgatccaactccatagtctgtgacttttggagtcctccaatacttccaagctgcatgttcacatttaaagtttctgggggaaaacgaacagggtagagttttaggaaataccagatgttgctgcgattttctacagtgaaggggcgtggaaggggacaatgggagtagaagcgggtttctgaagttgtgtttgtacttgattttaagcgagctgtgaacaactcgtgtccaaataagtggctgagaggtggtcctaagtaagcacaagtttagtagtagagtactcgtaacacagaactggctgaaaccccgccctcttgtctacgggcgttctttcagggcgactttgtcagtaccccaaactgtccccgcatgaggtcactctgcacggtcacgtgctcgagcccgcgggagcgccacatcgccagccgcacccctccacccccaacctgcccacgtgacccggcctagtttctccaggcccgtccctacgtctcactcgggaagccccgccccacgctgagcgctccgcctgcgaccctccgccacttacccaccccggctcaagcacgacccgtggatccacgtgctttttcttgtccaatgggagccggctcccgggcgcgaaggggcggggaggaaaggaacgactgtgctacgttgccagaaggggcgggacctgcaacgtccgacagaacgaggggacgtaacggaggcaggttggagccgctgccgtcgccatgacccgtgagcaccgagcccccttctccttgcccttttctttccgttcaccctaaacaccaccggcgaggcgccggctttgaccttccgtagcttccctagcaaggcgtttctctgggcgcgctctgtggccaccctcacactcggtgcccggaaatcgagccctttgcccacggctacttcacgggaccaccctcccgggttaggcataggccctcccggatcttccgcggtgtaaggagaaggccagcgcccctgtgataggcccagagcccccactccacaagccagcccatcccccacggagacccaaaccgtccacacacaccttgccagctgtttgggccccacgccgccccaaaacacgcctccagctggccccttgggacctcccttctctagtccgtattttgacctggcccgtggcagattcgccactcccccctaccccaagcagcctgggcctcgatgggccgttgtcggggcccggagattgaagtggtgttggatcctgctgctggccgcgctggggtagaagggtcgccggtgtgtgggcagagcggcccccgcgtctcacctttaattttctttccttaggcggtaaccagcgtgagctcgcccgccagaagaatatgaaaaagcagagcgactcggttaagggaaagcgccgagatgacgggctttctgctgccgcccgcaagcagaggtagccccagggaggggagggaaagggacggtggagacctgggttagaccaagggttatagaaggaaagagagctacctcagggcttgaatgtggactagtcgtgaggagcagagtgcattgcttcctctagggttttatttcctccccaccctccaaattgttagctcacagccttacaggaaaggacgggggcgggcgcctgccctcagtctgatttctgagcgtccctgggtctgaccttaagggcaagggcagggagcttcacatttcaaatacagttgtggttacggcagcccagtacttttggccctccttgctgttcggttctcctcccttctcccaacctcctcactggtgttgctgggtgtggtcctcaatacagaatagagacccttgggcctgtgtcaccagacttctgaccccttgggcaacagccagatggagactggtcgccttttgagcctcagctctcttcctcttgttctcctagggtgggagtacagcagccaaacgctgaacttagtcccatccact

SEQ ID NO: 61618 - DNA, 1661 bp, Homo sapiens
ctcgacctaaacacctggggctggaaacatggcgggagagatttacagattatacctggggcaacgaaccagaacgacattagaggagaaaagaggcctgtcgtttttattggcttctgcacgtcttcctccccagcttcggccactctccccttcgcaccctctcacctgacagaagggacttttcactaggacactgctgcctccgctgtgctgctgtgccaggcccagggaggtgccggggctggggccggccttggcacccaccatccttgtcccagggattaggcttaggtccaccagatggaaggcagatgagagcagcagttgcttctgtcctcagcccattggactgccactgtgttggggctgagcacccggtcccgggcagaatggagacgtccggaagagaacactgacctccaggttgcggtaaatgcaaatgccctgtgaaggagctttgtccttagggcctcaacactgcggccactcaggctgttctctccagattagggggcagtttgtctatctggccccctgtggattagcattctttattggtttaggattagacgtcattcaggttgaacggagttccctgaggtgggtgggtgcgtgtttatgtgttgaggggactattcctagtttatgaggtggttaaggatatcggtggggtgggctggagcggtgtcgggttaggtctgagagaaggcctcgcacaaaacactgtacaaacccgaaaggaagtctgagagacgaaccgccttcctccctgaagcttctagaactggagcagaaagaaggtgtggcccagggccagccccgcctcctccccgggcggaagctgtgtcagttgccggaagtcggcgtgaggtggggcttatgcggcggcgtggtgaaatagatatggcgaccgagggggatgtggagctggagttggagactgagaccagtggaccagagcggcctccggagaagccacggaaacatgacagcggtgcggcggacttggagcgggtcaccgactatgcagaggagaaggagatccagagttccaatctggagacggtaaggttggccaagagcatgtcggggcgggctgagagcagaggggggctctgaggctgtagctggaagccagcgctccaagacggggttctgatcccgttggcaggaggaggcaatagggtagagccgagggaaacagcggtcaccggagcgcgccgcttgcctaaaggagcttgatagtgggcttaaggggacctcaggtgcatagaatggaattaaacatagtccttgctacctggtaacacttgtcatcgtgaatccatgcatgaaccgcttgttttgttggccttttagattattgggaattgtgggtagcggtgcagtaactagacctgcctttcccataggccatgtctgtgattggagacagaaggtcccgggagcagaaagccaaacaggagcggtaagtcttcaggggcagccaactttaacagttcttccctccccggtccccagacaaaaataaaaaccattattaagcctttataccgttcttcaaatttatcaccaattcctgcagatctaggcgccacaactttactcttgttagcagaaggcctcctggcaacacctgctgccaagactccagggga

SEQ ID NO: 61619 - DNA, 1382 bp, Homo sapiens
gtatttttagtagagacggggtttcgccatgatcgccaggctgtcttgaactcctgacctcaggtgttcagcccgcctcagcctcccaaagtgctgggtttatgggcataagacaccgtgcctggccgcagcacttttttgaacaaggggacaaccacctgcctctcagtagggaataaagtgtggattacagtttattttatacaatggaattcataagctgttaagatgaatgaattagatgtatagggatccaaagataattctcaaaagccatgttgagactagatacggcggcatctactcgggaggctgaggcaggaggacagcctgagccccaggaattcgagtccagcctgggcagcataagcagacttctatggacagcaaaagagggactgtatcccgcacaatgccctgccaacaggcattctctatctatctatctagtctgatattatatacatattctgatatatacttaagttcctaattattagattaataatatacttaagttcctaagtaattacactaataatacataaattcttgtaattatatgtaattagtgatattatattctaatcataatatatattagactaatacatatattctagcatatatatattagacatatatattctgatatatacttaagttcctaatgtttttatatgtgtaatatatattatatatatgtaacattagtctaaggaatttgtggaggctaacagaagagaggtgcttgctgaatacgagagcaggccacaggaacaagatcggatgcaagtgggtgggggtggaaagatcgaagaatctggcagccagatctcaagagctggcggggttggagtggtctgtccgggagaggtctggaggttgctggggccggaaggggttaaaattcgactgggaagagggtgttagcaccgtacctttctcattgcgaactgggacggccccagccgtagactgaatgggcggttgcttcatgagagcgcttgggaccgacatgttgatggcagcgacggtgattcccgaaacttgactaattccaaacagtgaacaccagcaacgtcaacgaagagaagaaattccttccacctgagtccgcgaacacagctgcgcgactgatagagaaactacttacggctgagctagataaaccggaaatacgtgacgagaggattgtgggatggtggacgacgtttgggcgcccacagctaggaagtcgagtcggtttctgcgcatgctcattggctgcccgcatgtcctctacgtcgcagaatttggaagcagcttttggcgggaaattttgcttcctttgggctttgctgttaggactctgcggtgaggaaggttcgaatgaaagattt

SEQ ID NO: 61620 - DNA, 1456 bp, Homo sapiens
tgtttagagttcaatgatctggattcaagcctatttaaaaccagataagagaaagttcccaaacatctatgtgtcttggattcttcatctgtaaaattgcgttgttgagaagataatatgagactaggcgcgcaaaacaatttgttagagctattatttctaacccggaatgtgttcgctggcagtaacagtgcattagttacgattcatcgagggcagcttctggactttctgtttggaagcccagctgaggcaaaagcagcagtgcgtttaaaaattggagctcgccacattctgaaattctttcggttcgtgaaagcagtaacctaggaaacgagactggcaccacccctttcagtcctaaagcttggtttctcccgcttttctccattatgtttagggcatcgctattttacagtctttttgttttttctttccacatcattagcacaaaagagaaattccccttctacagaagcaagtacaaaacctttctagtcgctcctttttggcagcagctcacctactatttttttctattccgcggtcgcagccccagacgtcctcaaagacaaatattttcgcgagggccagtgtagggcaggaactccctaggccttgaatcaagggaatccagtagataacaacagaaaggactccgacccaggtacctgagacatctgagaccgccaaaattaacacaacaccctacgcgacagagaaaactctgggcggggagagagaaagagagcgagcgagcgagagagagagagagcgagagagagagagagagagagagagagagagagagagagagagagaaagagagcgagcgagagagagcgagagagcgagagagcgagagagcgagagagcgagagagagagagagagagagagagagagagagagagagagagagagagagagagagacgagaggaagcaacgttctcgcgacaagaggggtgtcgacggaaactcggaaatggtcccctagacgacccggccccagctagtgggtggggccagggtacatccgcccctttccggtttttttccccgcctcccaaccgtgaggtgttgggtttgggggacgctggcagctgggttctcccggttcccttgggcaggtgcagggtcgggttcaaagcctccggaacgcgttttggcctgatttgaggaggggggcggggagggacctgcggcttgcggccccgcccccttctccggctcgcagccgaccggtaagcccgcctcctccctcggccggccctggggccgtgtccgccgggcaactccagccgaggcctgggcttctgcctgcaggtgtctgcggcgaggcccctagggtacagcccgatttggccccatggtgggtttcggggccaaccggcgggctggccgcctgccctctctcgtgctggtggtgctgctggtggtgatcgtcgtcctcgc

SEQ ID NO: 61621 - DNA, 1952 bp, Homo sapiens
ttccaaacactaggcttggttttccgataccccactagaactggattctctggactgatacattttcactctgtggagctgaccgtcctttgacctagggtcgcaggtgggagcccactggcctgaaagatccgagttttcaacctgcagaatcaccgccaacatagggttgagtcgaagggcatgaatatttatgatccaaaagcgactgctacgccctctaggcaatgagctggaaagggaaccttcaagggccaccgaaatcccaggaaaggcgccagattcgctttctcccggcctcaggcagctctccctacgaactacctcctccagcgcgccaagccgttagtcccgccttatcccctcagctccacctacccagcgcgcccacagttactaaaccctagccgccagggtgcactacgcgttcctaagccccgcctccggggcaagggcgcgctccccctcccagctctgcccaagcagttccgttaggagcgggaggaaaaaccgtccttcgggtccccgcctctccactcctaacgctttactccctactccccctgcgaccactacacagccggctacggaggcccctaatgtacaaatatcccccaggcccttgctcatcctgataggttttgtcctttcttaatcgacccagtactaaggccttgtgttcagtttttctccaggattcagactagagagtttcttccggcgtaaggaacttcaacgctcttcacggaagtaaaagtgtttttttggttgttgttgccgttgtggctgcccgcattccttccctcccacctcgcggaattgtggcgggagggggaggaggaagtcagggcgcctgcgcggagaggccgctttccatccgggtccctgtccgtgcggtgcagcaggtcggtaggcgggaaatggcgactggctgaaggagctggttctgttgctgctgcggggtaagcgggaaagacaccacacattgcgcagtcgggaccatcgccggagcctgaggacacttctctgtcgtcacagttaggtaatccccttcgtccagacgccgccgctgcttccaatctcagtcctcctcctcttccagggccgtctgccgggatctcctccccttctaaacctggtcctccagcggctctggcgccttggtaggcatgcactctttggcgcctcgtacgtccactgtgcggagccgctcctgtctggactttcccctgggaacagaaagggagctcacttcccgccagcttcacctcttaggttgcggcctgcgttgtgatttctggggttagatttcactttgctacccacccccactccgatctcaagttcctagtccccaacctctgggtaattaagttagaagtttagctttttttaacctttttggcccacctcatgttttcagcatttcattctttggagtagggtgcttttaggggggcgttgctcttatctcagttcttataaacaccttttcagaatctggaagaagggatttgactaagttctgtttatcttttgtactgttaaaatctcgagttgacattgttactttttcaaatcgggagtggtagtaaagaacagtccatgtggaaggcgtctggtttccacagtggtcagttaaagagtgaaccttattatccttaatattctctgctttctttggattttaaatgtctgtatgggtgtttacttttgcattcttgaccagagttctgtggtaaataattgcataagtaaatcttgtttatttacttctcaccctagtggtggctggatgtgtgaatgatgttaaacacttcagcgtaccttagggaaacctaaagagatctaagagctcgtaaacttacctgagatcctgaaatgaaacgtactcagtagatgttcctccgaggcagggatttatcttcctaatgctggtaacgcagtaccaa

SEQ ID NO: 61622 - DNA, 2640 bp, Homo sapiens
tgtatttttagtagaggtggggttttaccatgttggccaggctggtctcgaactcctgacagcaaatgatccgcccatctcggcctcccaaaatgctgggattacaggcgtgagccaccgcgtcctgcccacgtatctacctttttatcacatgaatgttgtaccaagttcgcgtattacatatttgaaaataaattgcgaaaataacaaaaacaaaatccatctactggctagctctttaaaatcctgcgggggagcccagtggcccaacggcgaagtttagcccatcttgccctttctggtcagtgtacctgttccatttatctctgactgcgccactcagtcaggtgagggaccactggagttttctaccggaaatgcacttcagcaaatgccacttgctctctccaacttcagtttcaaccagcgcctacctcaggaagccttccttcatcctccggcccccgccgccgctaaggttatccttttacattcaacctcataatgctgctttttgtggcagtcatcacagtgtcgaaatttgtttacatgtccatctttgctacttgatggagggcaaagatacacctcatacctagcatagaccccaggaggtccgaaattgttctgcgaaagaaaaaaaaatcaatgtgctggcctcaaaggggctcacaggaagggaaaagcctcgaagactaaggctctcttcgattccttcgtgactaactcgaggcaaacatgccaggaacgcggctctccccacccgctcctgcatctgcgcccggggatcgccggattccagaggggtcccctccacctagcgcgcgacgactccctctggggtcccggaagcccggccaccgaccccacaggcgggcgtggcctcagagccctcttctgagcacggcgtgggtatccgcaggcggccatggacggtgatcacagtgaccagagggacagcgcaccctccggtcgaagcggggtaggcgttggcaggggaggggcgacgaagactggcgaggttcaggcgccagccaaagaaccactctgctaacttcctggcacttacgtttcctacccggggcccagagtcgggcggcggtcttccagcaccacgaactccagtactggtctgcgttgtagggagctggaagcccgacccagcactcctcagccccctgtgcccctccctctgctctttccgcccctccctccgcccccctccgcccccccctccgcctctccctcagccccgcagcgccaccgaccgcgttccccgcccacttcttacccgcgcgcgtcgccgccgccgcctgagggggcgtggcctcggctcggcgcacagtcagccacggtcccatcctgctccgcgccggtcaacgagagcaaacccagtgactcacctccgccgtgctaactcctcgctagctctccctctcacacacgctcacacccggctcgagatggcggcggcggcggcggcggcgggggactcggactcctggggtgaggagaagttgctggggcagggcccgggccggcgccggccccacgcagtggcaggcactaacacggctcgctttcttccgtagacgccgacgctttctccgtggaagacccagtgcggaaggtggggggcggcggcactgccggcggggaccgctgggaaggcgaggacgaggacgaggacgtcaaggtgggtgcgggctagggcgccgggcagcgcggaagcgggctggcgctgttgccggccgactctgggccccgggtcgctgccggggcctgcgggccgtgggtccaggcgcgagcatagggcctggcggtgctctcttcccctccgcttgccggccatgtgtgggccgaagactggcagcgtggcctcccggactccctcgccggttgagagtctgctctccggcgtggatcccacccgccggctggcgacgaaaggtgacagcatcggccgggtcggcccacgtgcaagcttcgcggtccggagcctctcgcaggaatgagaccgggaagttgggaattgagccttgtagcttatccatatggaaagccttgagactcgcctgtcttttcgagctcaagtcagcccagggccagtaactcatttatgaccctgaggtctacttatacagtttgttcgagggattagatgagtgaaatattgtagttgaatttcaacctttttttcccacacgagacagctagaaacagtaaagggaaataacttttggctctcccttcccccaccctgtggtaaaaagaatgaactgaccactgagatagcccgcagttagtggacagaaacccaggtagttcacaccgtgacctgagaaatggagagacgacagttactcaactacacacatacgacacctaaggaaatattgaagatttggtggtggttgtagatgacgggcccgtggttttttgttgttgttgttgttttgtctgtgccttgtagataatcatttttacctcagtcgtttgattttgaaaactccgaagggttcattatacagctgtaagtgacatttacttctacatggtttttttttttttttacagtagttacagaagtctcaaatccaaaatgttaagactcttattaacaaagttctcaaaatcttg

SEQ ID NO: 61623 - DNA, 2393 bp, Homo sapiens
attcataggtacttgatactgctaaataaactaatttcccctaaactagtttataaataacttagtttataataagtttataaactaaacgcagagattcctctttcgagcaactagacatcaagggtagagaagacaaacccagaagagttaagcattcactgatgtatcaaatgaatctctaaatgtcaggagctgttagaggagctggagattccaagattaataagacaccttttggctactcatcttaaagaaagagttgtgaaaatacttactattaataattattaaaagaacaggtcaggctcagtggctcacacctgtaatcccaacactttggcagggagaggcgggatcacttgagcccaggagcttgagactagcctaggcaacacagtgagacctcatctctacaaaaactagaaaaattagccaggcctggtggtgcacgcctgtagtcgtagctgctggggaggctgagcccgggaggtcaaggctggctgccgtgaaccgtgactgagccactacactccagcctgggcgacagcgaccttatctttaaaaaaaaaaaaaaaaaaaaaaaagcagcagcccactcaaaacactaagagggcgttcccaaactttatgatgtaaactcttaagtactgaaccaagagttacggaagtacaaagtaatgcattattgtaatcatgtttgtcttccccaaacatgcgcgcctcgcaagaaagaagtgtcttactcaactttttaggcactgctcctatgtaacagcaagcacacaatatttgctgaataaatgaagggacaaactggactctgtccttgaagaagaggactacatgtgaaagaaaacgctattcacttcaaggacatgaaaaaagtatcaggatgattcaaattagagatgatcctcagctggcatctttaactgaaagaaatgggcatgggactcgaccctgtgacagttaatcaacctgtgttgaataatgaaagaatcagcgcctcagctgagacccgttccgggttcgccgcaggtggcaatggagctgggtgccgtctccgcccacccggaacaggagagctgggctgccagaatgcaacgaggcgagcgtttcaggtcgggggaaaggttctgtgaggaaaccacgctcgcctctggggcgtttcctgcagctggcacccttctcccgccacctctatggctgcagggaggcctcggcgtgagcccttggggctcagtcagccgagcctaggctctggactcccccaacggcccaactctccctcagcacttactgccagaaggggccctccaggcagcagcgacccccgccccggctgccaggcgtcaaagaaagcacttggaggctgcccgcagccgtcaggctccccagagcctccggctgtgtgcgcagctgcgcccgggagccgagctgccccatcgcctcggcggggactggcaccaacagcatcggtagaacccgccccatggccgcggtgccccagctaccgccggcggaagcagcactcgcgaccccttcctctgcagccatcttggcccggcggttacttccggtcactttcgccggaacctgactgcgtcgtgggcatgcgcggtgtacgtagcggctcccgctcggcctcgtgactcccgcggagacctctcggctgtctccggtcgattccattcgtttcctgtggggggcagtaccagcctctctagcaaagccacatctgccctgacgccagtcccactctgcttaactgctctggcatgcttgaaggcctagcttagcgtagcaggccgttgcagccgttctcgctctgtggcattgctctttgccttcttggtccagctgcctccagctcccttggaacccagttcctgcctcttttcttcgcttttcttattgtgctgttcgcttacaggctctggggtggtgccatttccttggtagcatggaccgtcttacagtgtggatccatagtaagggtgttgacccgaaatttgaagtcaaataatatccattgtaacagtcagagagacggggtaagtaaggggtggagatggtagagagctcctgtctgttttctcagggaagtatgatccaagatcaagagaaggagaggagcaaagagtttgaggtgagaagaggggttgaataggtattttggtaaagtctcctaaaagacaactgtaccttcttaacacatcttccacattcagaacatttcagcataaatgtaacctctattgacaggcctccccaagccattcaacctaaggtcccttctactgcagtctctcacctagttttgtttttaatcatagtatttatcactacttgatattttctgccagttcctgtccaataagaatgtaaac

SEQ ID NO: 61624 - DNA, 2919 bp, Homo sapiens
gtccataaaatgaatgggggtaattctttcctcctacagtttatttatatattcactaattcattcattcatccatccattcgttcattcggtttactgagtacctactatgtgccagcccctgttctagggtggaaactaagagaatgatgtacctagagggcgctggaagctctaaagccctagcagttactgcttttactattagtggtcgtttttttctcccccccgccccccgacaaatcaacagaacaaagaaaattacctaaacagcaaggacatagggaggaacttcttggcacagaactttccaaacactttttcctgaagggatacaagaagcaagaaaggtactctttcactaggaccttctctgagctgtcctcaggatgcttttgggactatttttcttacccagagaatggagaaaccctgcagggaattcccaagctgtagttataaacagaagttctccttctgctaggtagcattcaaagatcttaatcttctgggtttccgttttctcgaatgaaaaatgcaggtccgagcagttaactggctggggcaccattagcaagtcacttagcatctctggggccagtctgcaaagcgagggggcagccttaatgtgcctccagcctgaagtcctagaatgagcgcccggtgtcccaagctggggcgcgcaccccagatcggagggcgccgatgtacagacagcaaactcacccagtctagtgcatgccttcttaaacatcacgagactctaagaaaaggaaactgaaaacgggaaagtccctctctctaacctggcactgcgtcgctggcttggagacaggtgacggtccctgcgggccttgtcctgattggctgggcacgcgtttaatataagtggaggcgtcgcgctggcgggcattcctgaagctgacagcattcgggccgagatgtctcgctccgtggccttagctgtgctcgcgctactctctctttctggcctggaggctatccagcgtgagtctctcctaccctcccgctctggtccttcctctcccgctctgcaccctctgtggccctcgctgtgctctctcgctccgtgacttcccttctccaagttctccttggtggcccgccgtggggctagtccagggctggatctcggggaagcggcggggtggcctgggagtggggaagggggtgcgcacccgggacgcgcgctacttgcccctttcggcggggagcaggggagacctttggcctacggcgacgggagggtcgggacaaagtttagggcgtcgataagcgtcagagcgccgaggttgggggagggtttctcttccgctctttcgcggggcctctggctcccccagcgcagctggagtgggggacgggtaggctcgtcccaaaggcgcggcgctgaggtttgtgaacgcgtggaggggcgcttggggtctgggggaggcgtcgcccgggtaagcctgtctgctgcggctctgcttcccttagactggagagctgtggacttcgtctaggcgcccgctaagttcgcatgtcctagcacctctgggtctatgtggggccacaccgtggggaggaaacagcacgcgacgtttgtagaatgcttggctgtgatacaaagcggtttcgaataattaacttatttgttcccatcacatgtcacttttaaaaaattataagaactacccgttattgacatctttctgtgtgccaaggactttatgtgctttgcgtcatttaattttgaaaacagttatcttccgccatagataactactatggttatcttctgcctctcacagatgaagaaactaaggcaccgagattttaagaaacttaattacacaggggataaatggcagcaatcgagattgaagtcaagcctaaccagggcttttgcgggagcgcatgccttttggctgtaattcgtgcatttttttttaagaaaaacgcctgccttctgcgtgagattctccagagcaaactgggcggcatgggccctgtggtcttttcgtacagagggcttcctctttggctctttgcctggttgtttccaagatgtactgtgcctcttactttcggttttgaaaacatgagggggttgggcgtggtagcttacgcctgtaatcccagcacttagggaggccgaggcgggaggatggcttgaggtccgtagttgagaccagcctggccaacatggtgaagcctggtctctacaaaaaataataacaaaaattagccgggtgtggtggctcgtgcctgtggtcccagctgctccggtggctgaggcgggaggatctcttgagcttaggcttttgagctatcatggcgccagtgcactccagcgtgggcaacagagcgagaccctgtctctcaaaaaagaaaaaaaaaaaaaaagaaagagaaaagaaaagaaagaaagaagtgaaggtttgtcagtcaggggagctgtaaaaccattaataaagataatccaagatggttaccaagactgttgaggacgccagagatcttgagcactttctaagtacctggcaatacactaagcgcgctcaccttttcctctggcaaaacatgatcgaaagcagaatgttttgatcatgagaaaattgcatttaatttgaatacaatttatttacaacataaaggataatgtatatatcaccaccattactggtatttgctggttatgttagatgtcattttaaaaaataacaatctgatatttaaaaaaaaatcttattttgaaaatttccaaagtaatacatgccatgcatagaccatttctggaagataccacaagaaacatgtaatgatgattgcctctgaaggtctattttcctcctctgacctgtgtgtgggttttgtttttgttttactgtgggcataaattaatttttcagttaa

SEQ ID NO: 61625 - DNA, 3572 bp, Homo sapiens
gtgctcttcatcagcctgtctttggctatccagggttgtggaacgaggtgaaacataaaactccgaggtacttccggctccctccagtgtctgagggtaatctgcaggactgagggtaattgcagatgctagctgttagcagcaaactatgcaaaagctgaggactggcttataaagccagatctgggtgagtcatgtttcctgtcaacatcctctgctgggcccataacacatgcaaccccaaacttccattacaagttcaaagtttctaaggggatagcattacagtgtgtatgatattggactcagacctgagtttgaatcctaattccacaaaagaaattggaaaagagtcatattgctgacttgaccctttgtcaccatatccataaaatgggataattattcctatatcataaatttacttatttattcacttagtcatttgttaaataaatatggagtgtctactttgtgccgggcactctttttagggtggttctgagaaggggatggcaatgagaagggctctctaagatgcaagactccaggcaactgcttttacttccagtggttctttattttcacagctcattagagcaaattaccacagcagggagatacaggttgagtatcccttatccgaaaagcctggcaccagaagtgttttaaattttggatttttttttgatttttggaatatttgttaattatcagttgagcatctctaatgtgaaaatctaaaatccaaaatgccccagtgaccctttcctttgagcatcatgttggtgctcaaaaagtttgagatgttggagcatttaggatttcagatttttggattaaggatactcattttgtacaatggaaaacttcttggcactaatctgatgaaagaagaaactacgggagaatccctttccctaaaaggctttcagtaacaagatggccctgactcattctggacagttcctccaaaggtaggcctacaggtagaactcttttctggcagcataggggttttccagaatgaaggtgtattttttttttactgaggccaggaaaggtgaagagaatgaagggttcctagtgacgatgcagcaaccaagtcatttatgtaatggagccttatctgacagatttctaggatagaaactcagtatccaagctcaggcttggcagactgaggtgggcaccgtccccaggattgcagtgtggattagaggtttcaaccccaatcatattcaacagctccctttcccccaacaacccctttttataacaattgttttgtggtgattcttttactaatatgatcatgaaaattaagtaatttagcttgtgaatgctctagcttggctgcactgctggtataaagaagtgccagacacttgcaactgcctaggatctctgtgaaccagcggcatggaagactgagaggcacgctggattgatggctcagattcaagtatggtattgcaggttctggtgtaattttctaaaatggcgaaaatctctaggtaaaactccaaaaataaaaaaccaacatacatcttcctttgagttacctggtagttatattcctggaaaattcagtgtatatgagcctgaggtagtagatggtcaataaatactcaagaaataaaaaaataaaaaaatataaaaatataaaacacatttcttacatgtccttggtgcttgtaagcccagattatatgcaggcttttttttggacggagtctctgttgcccaggctggagtgaagtggcgagatctgggctcactgcaacctccacctcctgggttcaagcgatcctcctgcctcagcctcctgagtagctgggattacaggcacgcgccaccaccctcagctgatctttgtatttttagtagagaaggggtttcaccatgttggccaggctgatgtagaactcctgacctcaagtgatccgcccacctcggcctcccaaagtgttgggattacaggcgtgagtcacagcgcccggctgcttttttatacattaagtgtgcttgcagaggactgcgacctctggccctcggcctcttaataaatactccaagtgacttcattggaacaaccactgagaatcacttatctagagagtgggaagttgctgatctcatcactgcatggggtggggtgagggaagcaaccctgcccttcccctttctcggaaagcagctggctttgaagaaagagaaaccaggacgggaaagtcctgatttctaatctgaaacagcgctttttgtccagagaccggtgacgagcgaccctgggctcgggttttgattgggcagttcggaaactgtaaaagcgaattaaaagggtgacaagctagtgttttagcctatccagttccgggagtttgcacgcagacgctctgcttcgtgaccttggctctgctctgtgggcgccgcccccagcctgggcgcgtccatcgtcgagtaccttctcctctgcctccccctccctctgcttctatctctctccaattgccctccctggcctgcggccgcccggtcctccttcccagcccagtgcagccaggcacccgggttcggcttgctcaggtctctgtccgggactgggaagccacggagggccgggaaagtggcacactcctggagctcaagcttcctactctctcatcgctgaataactaccgggcaggactgggtggaacagacagcatatttaggtcattgatgggctgctgggtggatggagctggaaagtgatgggcactgctttctggggctgcccaggttccttccgagggctcgcttttcctgggcagagcgggaaagaggaggggcaggccggtcgcgaaacgcaaatagtcgagaatagcgatccggggagaagcaggtgtctgtggggcccaagagaagtaccatctcggtaagtaggccggtgcatgcaggggagcgcagagccctaagcccttctctggggtccgcccgttttcctgctgggcttctcatttcctcactaggttctacggtttgccgatctaaatccagttcgtgtcctattgtattgtgtaacatttttggcagcttacatctttgtttattgagatatagttcacaaaccatacaattaacatatttaagtgtacatttcagtgggttttagtatattcacagggttgtgtaaccacctcaattttaggacattttcgtcactcccaaaagaaattttgtaccagttcggtgtcactcccatttctcccaaacccctagtcctaggaaaccaccaatctttctgtctctatgggtttgcctattagtatttcatagaaacagaaacatataatatgtggtcttttgtaactggcttctgttttcaaaggtcgtcatattgtagcaaggatcagttcttcattcctatttattgatgaatattactctactgtatagatatactaagttttgtttatccatctatagttaatgggcatttggattgtttccactcttcggctactgagaataaaatgtggttatcaatattcatgtataaatttttggtgtggacatagattttcaat

SEQ ID NO: 61626 - DNA, 1223 bp, Homo sapiens
tgtacaaaaatgatgtaatattgaaagataccttaaattatagtgagggatgaaaagaatcaacatatgaaagtcaaaaacagaaacacaccacccaccttgagctcctgagatgatactataccttctgggaccaactgaataccttctgacaagtcaattatattttactcctgtcatcatgtgcaggagagcaactagtcctcaatggaataaaaattgtttctagctgaagttttcttttcctgacatcatgcttgttcctgcaaatccacgatgtccaatcagggtatctcaaacaacattgcgcctggcaatggaactcacctcagagtaaaagaaagcaggtaatgactaataccaatggaatttaccaggcttaccattacttcattatccagaagtaattagccttacagaccaagcaaaatatttgctttctccttcagatcataaaagtattacactaaaaattatttccaaaacttaactcctccatttctgacctggataagatggcagactcttgccctctctagtcctctccacaatgcacaatagcaaactgtagagactagccgtacacggtctgtgggtctttctccctgtgtgcggagaggagagatcatagaaataaagacacaagacaaagagaagaaaagacagctgggcccgggggaccactaccaccaagacgcagagactggtagtgaccccgaatgcctggctgagctgttatttattggatataaagcaaaaggggcagggtaaagagtgtgagtcatctccaatgattgataaggtcacgtgagtcatgtgtccaccggacagggggcccttccctgttaggtagcccaggcagagagagagagaacagcttacgtcattatttcttctatgctcttttcagaaagatcaaagactaatactttcactaattttgccactgcgatctagagggcggagccaggtgtacagagtggaacatgaaagtgaaacaggagagtgaccgctgaaacacagcatcacagggagacggttaggcctccggataactgcgggtgggcctgactccacaagaggtggtggagcagagtcttctctaactcccccggggaaagggagactccctttcccggtctgctaagtaacgggtgctttttctaggcactgacgctaccgctagacaaaggtccgctaggcaaccggcgtcttcccaggcg

SEQ ID NO: 61627 - DNA, 1501 bp, Homo sapiens
aaaagaggcttaattggctcacagttccacattgctggggaagcctcagaaaacctccagtcatggcagaaggtgaagaagaagcaggcaccttcctcacagggtggcaggacagagtaagtgcaagcagcagaactgccaagtgcttataaaaccaacagatctcatgagacttactcactatcacgagaacaggatgggagaaaccacgcccatgatccaatgacctccacctggtcctgcctctgacacgtggggatgatgggaattataattcaagatgagatttggatggggacacagtcaaaccatatcagagaccaaacccctgctcacccttccccttttctctcccaccccatgcctccctggaggtttcttttgatagcaccccctcaaaaaatcccataaacccagatccttgtgtcaagctcttggatataagccagttacctaagaagctcttctggagctgcatttcctcacctgtaaaaccctgataatacatcacaagtggctgtgaaaacaaggtgatgtagttttaagttccttgtataattctgggttcaataaatcatggcaaggattttttttcttctttacatttcaagagaatttctggtctctgggatatgaaacaaagagaccccaggtagcaccatcaggtgtcagcagcagctgagggactagagcaactaggagtttgtaaatgcaggaggcgccaatcagcccacgcctactgatgggccagtcaggacttgtgccaaccaagtgcactttgtacccaatttaccacaactggtgggggcagggagctggagaggaggtggtggaaggggacaggtggcagggcagtggggtgccattggaggagtttcaattcagtatatttgtaggttagcgttgctgtttaccttttaagcagaagggcaaacagatagtctaccagataaaatcgctctctctgaaatattgcttcctgactccactgtttcatctccattggcttctgcttccctctaccctctcctttcaggctggcttcccacaatcactgcagggtgagcccgagttgatgagggcacctggctttggcagcagctcatcaaagctagagttcaggtgtgtttctaggatttaattaagctagaaatgaaatccagccctgcagtggctcatcctctttattatcacatttcttactgcttgtcaggccacaatgactgcaggtcttgaaaaagaagaagcggcatgtttcctaggcagggctcagttaatctatttcacatggcatttcaggtacattcctccattttaggatgggagaaaaagtattctcagggatctttctggggaaagggatcacttttacatgaataaaggtaattcttgttataatatgtgcccactataaaaaagtataagatataacagaatgttaaaaatcacttgtaatcttaccagctagagataaacatggctagtattatatctccttcct

SEQ ID NO: 61628 - DNA, 515 bp, Homo sapiens
catggagctacagttatgggatatctcccaggactatttctgtattgcaattaaatccatgcccattggatcagcagcaccccaccagtagagcctagagtccaagagaactaggtggccacttgggctggcctctggatctgttgctggagggagtctaccaaaccacgggcaggcagccacaagggcaagccccagcaagccccaaatttgtaactgcccatgggttcaccttgtctgctgcctagacaaagttaatttatccagacaggggaactgcagtaaagaaagtaactcatgcagagccagctttgcgggagactggagttttattattactcaaatcagtctccccaagcattcaagcatacagagatcggcgtttttaatgataatttggagggtgggggaaaaccagtgagtcaggagtgctgactagttgggtcggaggtgagatcataaggggtcaaagctgtcttcttgggctgagtcagttcctgggtaggggccccaaa

SEQ ID NO: 61629 - DNA, 1504 bp, Homo sapiens
cgggaggcagagcttgcagtgagccgggatcgcaccactgtactccagcctcggcgacaaacaaacaaacaaacaaaaaaaacagcgcgctgcagatggagccagcacccgggcttctcgctcccagccccctcccgaagccccgccccgcctccgggtctggaggaggctgggaagccccgcccctccacgctagcgccgcccaggctggcacaaaggaggaagcctagtcccgcccctgcgtgcggcgcttctcccaggccccaccttccatccagtgccctggaccctcggctgggtagcgccaccagagcgaccaaacgtcccgcgccttccaggccgcactccagagccaaaagagctccatggcggcggcggccaagcccaacaacctttccctggtggtgcacggaccgggggacttgcgcctggtaagctgggaaggagggtgggaagcataccgatcctgcctcactctcctctgagcccagccatagtcctggcttcccacttccagcctggcgccggccccgcaccttaagcgccctggctgcccagatcccagctggttcccctcggggtgtgggggcagcaggtagtggctgttgcgaagggcagggatctagtcgtgtgcctcccggaacctagccccgtggctggcacgtggccggtgcccaggacggttgcaaactgtttgaatgaagctttctctctcctttgccagctgcagattcatagtccagcctcttgtcattgacctttccaaaggaaatgctaaggctgtctgaattatcggggcagaccgtgcagagcagagaaaggggggccagaggacacttagaaacagcagaacttgtatttaactcccttgcttgggactgataaacctcccttgcaggattatgatgatcacaagagtactcagcacttagtacgtgctcaggaagtgccagctccttctcctttccttccagtctaggcctccatctccagaacccctgctgttccccttgcctgtgccagacttgtggatcttgatagctcccttgtctgtaaggatccttctctccctaagaccctgtctggttcactttccagcagtttttctttccaatcccgtgcctctgtccctttaggagcattctgtatgtgtgtcctctgccttagaccctgccttttgctccctggcttgtggcaccaaagtttaggaagtggctgagtcagcagcctagtcatgccaagcctcccttgacaaagtccctctcagatgggcctgggatggcagtgggtatgtgggatgagtgccagccatctctgctgctcccctgtacctcttttccctcaaagtacatgcgtcagtatgtaaactgcagtaattcagaagcttatccaggttagcagttcttgactatttaagaatctgtggtgtcccctccacagaatgcaaatagactgagtttggcaacaatttcagactgctcaaggactccctttaagccgctct

SEQ ID NO: 61630 - DNA, 658 bp, Homo sapiens
tccatctcaaaaaaaaaaaaaaaaaaaaaaaaacctacgaagctttaatacactattttttatcattcctactattgatatctattaataagtaggttatcttttgactttgttttaaggaaatgtagatgtgagtgttttctcctccagccttactcaccctgtggtattatatccctgtctaaaaactgctgaatctccctgtttacctcctgggtagttctcacagtatcatatctgataacactgtttaatcagacctcatgccatttgacatgtctcagctagtctttccaatcacttctccatgtgcatatccccacagttcataatgattagctctgtacctgaggacttgtgtagattaattctttcaagccttccatttcttcaaatattcttccaaaggggaaaaataaacttgggtccttaccttatgttgctaatttattttccttcaggttgtacggctttcctttcaaactgttctcttttctttccttttcttttttggagatggagtctcactctcttgccgaggctggagtgcagtggcgcgatttcggctcactgcaacctccgcctcccaggttcaagcaattttcctacctcagcctcccgagtagctgggactacaggtgcataccactacgcctgg

SEQ ID NO: 61631 - DNA, 541 bp, Homo sapiens
cctacagagctcagcttcagcccctcctgtcctcatccactccttttccccctggccccaaagcccttccatccaatctcatgcttgtcttcctcttctccatccacagtcccattaccatccaatcccacccgattccttgtccatccctgtttcattctcatcctcatccctattcctgggaggcagggtttgggttgggctttgtcccaaagcctgagacaaacatctctgtaacccagagcggggaagatttgctttcctttacacggtttatgtgatcatttccacgaattccctctgagtcatcttccatctttctctgggacatttttgtagcctccctcgtttgcacatttttcagtctaatccctccccgacacacacttatgcaatgacctcgctttctgaacccaaggtatcacccaatagctgcctgatcctgccttctagcccacttctcaaagagttggtcataaagccccaggaagggtaggaccaggttagtatctaggcaagtgttgaggctgaagacactttt

SEQ ID NO: 61632 - DNA, 846 bp, Homo sapiens
atccaaccagaggagacaagctcccgcctaccctctctatatcacatttgcccaacacctgtcacttgctttgaattaaacctccttctcacatttgattctggcaaccatgcttagaagtaaacagttcaggcatatttgctcccatagctggaagaggaaaacaaggatcagattggagaagtgatttatctaagatcccacagtggactggcagcagcactgagacctcagcctagtctcctgatccccaagcagggccctgcctaaggaacacactctgcagagtgctgggccaaagcagggttttccaactaatcttagaaggtaaagtccatgaaggtatgtaccagggatttctgtttgttttgttcgtcacttaatctccagtgtctatgtcagtggctggtatgtagtggtgctcatgaagtatttgccgaatcaattaaagaattttcggaaagagtgagtctcttgaactttgctacctactgtgaccttggcccagccccaggccttgattcacagaggcctgcagagtctttcacctgattcttctgagtagctggggctcattctttgcctgtctttttctagggtctccattttgggacattctaatccctgagcccctattattttcatcatgggcttctgcctggctctagcatggacacttctggttggggcatggacccctctgggtgagtacagattggaggagaagcatggttaggagcagaggaacccagcatcctctgggctcccccaaggacaggatccatttgatattcatctgtatctttagtctctagctgacacagtgccctgcacatgagagttgct

SEQ ID NO: 61633 - DNA, 1428 bp, Homo sapiens
catcctcaaagacctggtcttcaagtcatccgtcagctgccaagtgttctgtaagaaggtgagtactgcccccacttcccaccaacccatggccccttcttccttgtcatggtacccatctgtgcctttctcctctgcctttgttcttggcttccctgaactgggcaggggcaagttggtttgaaacctggggttgggtggtgagtggggtggtatcaggatatccctagaccctttaggacagaactggtttgcggatgcctccagaatcctgcctggtttacaaagactctttccctcagttaggggtgctccacataggatttgcttctgggagttcctccaggcaaggttggagggggtaaagaaacccattccttcttacaaaggagcccagcacttggagccttattgggctgggagagggaagggcatgttgggtggagcacaagtgaaactggctcagctctcaagaggaacaggaggagtggtggcaaggcagggctggtgggccaggttggccccaggaacacagctcaaaccctcaggccctcacacgggtcctttcacaccagcctggacctggtggcaggcccctgctcgtttctctgggcctggcaggtgagtcaggggtgctggaatgcagtgggcagaggcccagcccatgtgctgtcagcattcagagggtgacagctcccctcctgtcctctgccctctgcttcttaactatacagccccgctttcctccctcggaagctgcagagggctccccgcagggcagcttccacccgctggtatctctttgagcccattcccatctgctcaggcagctgctgggtctccctgaggctgctctgtgaaatgccctttagccactaggtgcctggcagcctgaccagggaccactggagggagctgtaggacaggctgagcatgaaagctgcttcccaccccacagaccatcagctcccaatcaccaagggatctttcccatggccctggggtctctcacttccacctctctatgccctgggccaactccatctctggcctcagagcctggccccgtggcccatacactccatctccccaggctgtctagggaagggcacaagctagctgtggtcagaagagttctatcagtatggacacccctggggtttagggagactgagctgagatgggtcctgaactccagccctgtgtccccagatctacttcatctgggtgacgcggacccagcgtcagtttgagtggctggctgacatcatccgagaggtggaggagaatgaccaccaggacctggtgtctgtgcacatctacatcacccagctggctgagaagttcgacctcaggaccactatgctggtatgtcagggcccaccaggagggtatgcgggccactgtctgagctaggaattgacccta

SEQ ID NO: 61634 - DNA, 1595 bp, Homo sapiens
tgtctcccgggttcaagcgatttctcctgcctcagcctcccgagtagctgggattacaggcacgcaccaccacgcccggctaattttgtatttttagtagagacggtatttctccatgttggttaggctggtctcgaactcccgacctgaggtgatctgcccgcctcggcctcccaaagtgctgggattacaggcgtgagccaccgcgcccggcaagagagtgcccaattttaagtgatccttcctattgcttccacaaaacgcctgcataccacatatcctcaatttcgagaaaatagccactggtttagaaactctcaagtactgtgattcacagcacactttggaggttgcacgtttaggttctggaagaggccctcagacggccctttggctcagcggtcccccgaaggtgcctgtccagcatgtcgaggggtcctgaccagcctgcccgcggggtggggcgggcctggggcagcctgagagccgctccgcctggcgacccagtgggcctccccgggcccgcccagaggcctgggcgggttccagcggtgggcgccggtcggggtgcggcctaggccgcgggccggtggttaggggctcgcaggccggccacgcccgagggtctgcccgggacaaacccttccgttagggcgcgagggaggcgctgcaggccctcagttcctcggccaaggagacaagcgcggcccccgcggcccgtcccgccagccttcccgcctccgccggcgcgcggcttccgcgtggcaggccgccccgctccccggcctggcgcgctgcctctttgtctctccgcgcctcccctcctcccagacaaatggctgttggcaggaaattggacgcgctcgggggaagccgcgcgccgcggggagggggcgccgcgcggccagcgggcctcgggtgcccccagccggggcgggggcggcggggatgttttgacatctcgtcaaagaaaggaacttgatgcttcgaaagtgcttttcacagccgggctgtgtctgctccagagctgatttatacgcagaatctgcgctcgcttctccgctccctcccccgtcagcccggggacggcgccggaggcgcgggcgcggctgtgcccggcaggatcgggtttatttattgcctctggcccggagccggggcggcctggggactgcacagttccctctgcccgagcccctccccttctctccccaccccccaaagccggctgcttcccaggggcctgtcttccccaaacctcttaccagactctgggcggagccctccgacggtctggggtggaagtcggggacggaggcagagaggtggtaaggcgccccaaggggccgaattctgcactacctcgcacggacccagtggggagagggtggtggtggtggaggtcaccacctctgccctaaggtcggaaaggagccggagctgccagtctgaaactccctaccatcccagtagctctggaacccccttcctccaggggctatcctttctctccagggattcctctttccccagctccagacaaccccttactccaaggccccaggagccctttccctttagaataaattaaggaa

SEQ ID NO: 61635 - DNA, 1545 bp, Homo sapiens
cagctctcactctgccagggagggataaggccaacccgaatcagggcagggccctgaggcatggtggatttcctgttctcctccctatcctggtgcctgcagacccaggaaaagctccagcctccctcagaatggaccagggggagagggaggccaggaggagaggaggaatgggctcagctgcttagccccatgtgggcaacaggtcctgagcactgactatcctcatacctgagaggacgagggaaggagggaggagtgggcctggaccccacgaagcccccttggcaagagctgtaagctgcctgtcttcgcctcctgagaacaacagcctatagggcaaaggccagctcgtgctgtgtccgcaaggagaaacccgtcttcacctcctttctggggcttcagcacctgcaaggatgcttaggctggagaaacaggaggaggaagaggaggaggaagcaaagaggcaacaggagggaagagctttgtgctggctatgcccagggggaagggtcagagatcaaagggcactgagccgctgcttccagaggggcagaaaggccatcaaccagtgggggttgggaggtgcgcctcaattcccgttagcaaaaggctcatggatcaggctagagggggctacgaagtggagagccagcccgggagggggagggtcaccagttctggggccattacaaaggatagggcagaggggcagagtttggggcttccgtctcagattagtcggttgagaatctgaacaaaggtgggtgaaggctcggaaccccggggtcaggggctcgcgtctgccagaagctgagacaccgaggggcccgggccaggccacctttgtccctctcgcagcctccagacccctgaccgccttccctcctggccatcccggcccggcgcggcactcaccctatcgctgctggcggggggtccggagatccgctcatcagcaggcggcgccgggggccccggggtctcgacccgaataaggcggtgtgggggagagccgtggcgcgggggcggcgtgggtccgggggcgacaggggtggcgagggcggcggagccggacgaccccccggagtaggggtcttcgaagtcgcgctcccgctgcagcctgtaggcggccaggatgtccgggggcggcgcggggggcgcggccggagagggcgcaggggggcggtagtcgggctcggggggcgccggcttgctgccccctccgccgccgccccccccgcggaagcccaggtgctcccggagccacttggctactccgccgctgccgccccctcctgggccggctcccgcacccccggcgccccggcgggacccccccgggccgcccccagcgctcccctgcgttcgcggccccgggcgggagccagccggaggagctccgctcagtaacatggggccagccagactgagcgaggggagcgcagcggcgggtggggggcgggggcgggggtggggaggggggcggggctccgccgggcggggagggggcggggcgcttcagtaacaagggagaggcggggc

SEQ ID NO: 61636 - DNA, 3339 bp, Homo sapiens
tgtctcaaaaataaataaataagtaaaaataaaaataaatgactcaataaaaaaatgtacatgaaaagagaaaaaaatcacagggtcataggggagctgttttgctggtgtggaattattcagacaactatatttggtaagaaagggattataacggctgggttgaagctgtatcagagcattacatgagagttactgtaggtggcggtcctcggagtgcctcagttttcaaaggagagaaacgttggttcgtttcaagaaagtgaattacgatttatataaaatgttacaaaaaaggggaaaaaaataccgagccccttgccgtgccattgttcccacaatgccgtgactcggattcgaaccgaggttgctgcggccacaacgcagagtactaaccactatacgatcacggcgagctaccggggacccgtaggggttggcttctgattatcctcttcaacagtcataggccttcccagtttgcgcgtcattaaatggcctacttacggggcgaggttccagcctgtccctgagtctgataatgcgcaggcgcgttgtactccgccagttgcttttcttcttctgttttggcccattagccacgggctgtggtgatgatgagatgggctcccggtgagcgcagtgggagtttaggggagacggcgtgagcatccaggaatggggctgggcggaactcagactacccttgggggatgcccgtttcctatgccccggagacccttgccgcgaaccctccagggttccggtcctacagggggcgctcctcacgggtcctccctcctgctgcatcctccagcggtgacccaatgccgcctctgtggagattgtggacaccctagaaccaggttccacgtagaaaaaaattcagcaaacgcatctccccatgttcccaacacccacttccttccagcctctcatactcccctgacagccctgactcctcctgactcctccttccgcaatgcttccgccgtgccaggtgcccacctaggctgtgtcacggggccgcagcagggactaagtccgattttaattattgtccatcagtgctctcgcccccacggcgcctagaaccgggccgagtacacagcaggcagtggctatttgctaaaactcagaaggtgccattggcatttaacaagtgaattccagagagaacacctgtctctccaatgtcaccctctcccatcaatcctccctatgcagagccgcgggagggatcttgctaaacacgatttgaatattttcacttctaccctcctcaccctcacccctagacggcaggaacttcgtctgccttttccagctcatctcttggccctccttcagtgtcgttccccatgcctcaatttcactcattcaactcaacacgtcctcgagaagcgcctactacctgtcaggccagagcctttgggcgttgttggggtggggacttacaaagaagacagaagacttataaagaggaattaagatctttccttttcggtgaaacctcgtctctactaaaaatacaaaaaaactagatgggcctggtggcgggtgcctgtagtcccagctactcgggaagctgaggcaggagaatcgcttgaacccaggaggcggaggttgcagtgagccaagatcgcgccactgcactccagcctgggtgacagagcgaggctccatctcaaaaaaaaaaaaaaaaaaaaaaaaaaaaaaaaaaaaaaaaagatttttccttttcaagactcccttcaagcctctgtacacgaaatcatcctggctgcctgacaaattctcactgtgcctttaagagctaccttgatcctcacttcctttgctaagccttcttttcctatcattaggaatccgctcccagtgcttctgtggaaatttgtacgtatgtctactacaacactttttaaactggcgagtggtctgtgctttgtcttcaagaacgcgcccaggctcagaggacccggaagcctatatctttccaaagtccaatttagccagagccagcgtaaacgtcgctctcaaatgtcacaagggaatcggggtccattttccacaatgttgtgaactcaggattaaaaacggattggtacaataaaacaaactccccttgccgtgccattgtcctcacaatgccgtgactcggattcgaaccgaggttgctgcggccacaacgcagagtactaaccactatacgatcacggcgagctactagggacacaggacctcggcttgtcgcctgaactcttctctgttgaaagccccgcccccttgcaatgtcattgatttgtcattgtttgttctagcctatctccaccctcgcagccatctgagggcacgcaagagcattaatctctgctttctcgattttggtccacacttgcctgcgcaccagacacggtggccgatttctccaccgtggaggctgctcttggggttccccttacctcgcgcctcaaggaagttgtatggtggtgggtcagaactgattttccttcttgtaaaatttaagagctccagtcccagccaaagtcgttcagatagcatgatagtcagggcatggtgagcgtcagagagactttgggccaccattcgggcgtcctcaggggcttcacatcattgcaggcccggcctcataggaatcctttggttgcaaagcactttcatgtcccttcttttgcggtccgtgcgtacagccaagaggagacttcgggctagggagtccacagcgctcccggctgctcttgcgggtgaacgtgggtgcgggaggaacctggtagataatggacgcttaggaaagctggaatggccgccatctagacgagaagggcaacactgggtcagctgctcgtcgtggcgtcccggtagctcgccgtgatcgtatagtggttagtactctgcgttgtggccgcagcaacctcggttcgaatccgagtcacggcattgtggaaacaatggtacggcaagggcctctttttagacttagaaagccacacattcttctgggaagctaactctaaaagctgttacctggccagggctgaaattataacggacaatgaagtgtgcacaaaaagttcggtgcacactctggggctttcctttctcatctgctagtgaatcagtcacccccaccttccccaatatgtgattattttatttttgtgtagtttctgtgtggtactctttattttacccttgtgaatgaccgaatcatatattggatcctctaaaaaccttcacactagctaaaacatcaatactttgggacaaaggggtgataggaacaatgtgcaaacattaattaagggttagaagaatgca

SEQ ID NO: 61637 - DNA, 1695 bp, Homo sapiens
cttgccagtggggactctgcggagtgcaggggcagtgtaaggcatcgcatggtgagggggctcagtgtgctagctcaggtctcctcttataaagccaccagtccctctccgtgataacccattaactcatgaatggattggtccattccggacggcagagccctcatgacccaatcacctcttcaagaccccattctcaatattgccacactggggaacaggtttcaacatgagtttccgaggaggcattcaaatcacagcagggaacaaaacagtgactgctcgctccaagtctaatgtaaggttagctattactattagctgttactaatagcattactatacttactataataccatagttaatagtattatagattatagtagtaataataccattactatcatttaggaacctgagttcatggctatcgatttgttgagtaatgtatgaaattcagttcacacaaggaagcatgagagaaggggactctatctccctccagggcgggggccaactttttaattcggtttttaaattctcaggttcctacttaaagtaaacctggcctaaactctccctcttagagggcttcgctgtaaatgcgggaagcatgccaatctcaacaccagtgtctgcagaacactgtcaaatgcaggagggaacaggaaaaacaggaactcactgtctcctcgataaacgcgacggggcgagaggcgctcccaggcgagggcggaagtgatgtgagagggtgtagaccgccctggttgggtggaagggccagtcaatcctgggaggcccaaaacggggaccaatcgctcttgggctccgccctggaggcggggaaaacacgcccaccacgcgttgtgggcggtgccacggcgcacgcgcattcctcccacagctagtctatccgggtcctgatccgggactctgagatgaagagctgttggagcagaagagtcctgagagaaaaagacggaaaatcgtggaaaggcgctgtggaaaggagtagtgtggaaaggagaccgcggggatgaggagaggagagaggcaggctgcatcaccgaatgggcagcatgtcttaaagtacactgtttgtcttaaagtacaccgtaaagcctctcttgtgcctgttgtttagagcctgccctttttgcttaatgtgtatggacatctttctaggccagtacttatagagctacctcattcattttatttatttatttgtttgtttgagacagggtctggctctgttgcctaggctggagtgcagtagcacgatctgggctcactgcagcctccacatcccaggttcaagcaatccccctgccttagcctcccgagttgctgggaccacagacatgtgctaatttttttatgttttgtagagacagggtctcgctatgaacgtttgtgtctcctgaagttcatatgttgaaattctactcccccaggaggctgaacaagagggtaaagctcttataggagggattaggttattagggtgaaaccctcatgagtggaattagtgctcttattcaaaaggcctgagagaggtcccttgtcccttctgccatgtgaggttacagtgagatgatggctgtgagatgatgatgaggaactggccctcatcaaacaccagatcttctagtgccttgatcttggacttcctatttccacaactgtgagaa

SEQ ID NO: 61638 - DNA, 3091 bp, Homo sapiens
gcctgaccaacatggagaaaccccatctctacttaaaatacaaaattagctgggcgtggtggcatatgcctgtaataccagctacttgggaggctgaggcaggagaatggcttgaacccaggaggcagaggttgtggtgagcaagatcacatccgtgcactccaccctgggcaacgagaacaaaactccgtctcaaaaaaaaaaaaaaaattagtaggaaccagggaaatagaaataggaacagtgtgaattccctataaacttcgtaatcagatgagtataggatttgtaatggaaaggtggaacaaaaggatgtttcttaagaatacatgttattcttcattgaaagtttttgtttgtttgttttttggtttttggtttttgttctgagacagggtctcgctctgttacccaggctggagtgcagtggtgcaatctcagctcactgcaacctccacatcctgggttcaagcaattctcccacctcagcctccttagtagctgggactacaggcatgtgccaccaagcccagctaacatttttgtatttttagtagagaggggtttcaccatgttggccagactggtctcaaactcctgacctcaggtgacctgcctgcctctgcctcacaaagtgctgggattacaggggtgaaccactgcacccagccgattgaaagttttaagttatgtaccctttaagttaaggaagattgacaatcagaagacaaacaagtaaggaagagataggagttagatgttcggaaggaatacaacaggtttggacttttgctatctcatgataggttttggcttagatttgcaaagctagcattccaaaagttgtttcatttccacctaggtattacttaatctaccactagatgccattctcacagataatggttaactgggtcaaagattggcatgcttttgattttctttttcaaataatattctgctaaagaagctaaacataattaattcctagaattatctctaaattgaattatacacattagaagtgctttcaaagaatatatacttggttataattaattacatcctatacttattctcaaatactataatcattgcttattctactgttatcctgcttacttcattttatctaaaaattattttagatggagtcttgctctgtctcccaggctggagtgcagtggtgcaatcccggctcactgcaacctccacctcccaggttcaagtggttctcttacctcaggctcgcgagtagctgggattacaggtgcatgctaccatgcccagctaatttttgtatttttagtagagatggggttttgccatattggccagactggtttcaaactcctgacctcagatgactcacccgcctaagcctcccaaagtgctgagattacaggcgtgagccactgtgcctggcccattttatccaaatcttaaggagaggaaaattttcaaatttaccaaggactattcatgaatttggtcttctaagggcccaagccagagttctgggatcttcaccagctttgtcaggtatcaaaacctctcatttctttcactgaggctttaacagtgctaggctggtatctgctaagcttgaataagctttagggaaccttctcagtgcacctgattatgtccttgagtctcagagattttttgcttcctgagctgaagaagaaatagaggaacactccttcttgactaccttgatgtttaattttatgtgtcaacttggctaggctaaggtgcatggttgtttggtcaaacaccagtctagatgttgctgtgaaggtatttttaaaataaatcagtagactttgaatgaagcagatcatcctccataatgtgagcagatctcatccaatccactgaaggccttaggagaaaagactgaggtttcctgaagaagaaattctcttaagactgcaacatagaaaccctgccagagttgctgggcacagtggcgcaggcctgtaatcccagcactttgggaggccaaggtgggtggatcacctgaggtcaggagtttgagaccagcctggccaacatggtgaaaccccatctgtattaaaaataaaaaattatccaggcgtggtggcaggcccctgtaatcccagctactcgggagactgaggcaggagaattgcttgaattagggtggtggaggttgcagtgagccaagatcatgccactgcactccagcctgggtgacagagtgagactctgtctcccccacccccaccaaaaaaaaaaaaaaaaaaaaaaaaatgaaaccctgccagagttcctagcctgcccggtctgcccagtctgctctatagactttggactcaagcctgcaagcctcacctcttacctgaattttcagtctgctgacctgctctgcaaattttagacttgccagctcccagaattacatgagccacttcctgaaaatctctctctctctctctctctctctctctctctctctctctctatatatatatatatatatatatatgtatatacacacacacatacatgcaatgtgtaggtagatgcatagatctcctattggttctgttattctggagaactgtgactaatacaacttttctaataagaaagttattcctctatctttactttccgcattttttctatttgggactagcatttgtaatttgcatcaaatacttgtatttatttacaagcattacttcatgagctcatgaagctctgatatatttctattgtgctgcttcttatttttattggagaaccttatcatccatttatcttcataaaaagagaacatttcaaaattacattcaatagaaagtaatgttatagcagaaatacaaagtgaaatctccatactttgttaaaaatttttttcagatggaactcttaaaaacattttaagtccttgagtgtatctactggataatattcatttcctttttttttttttaaatatagttaactatatttagtggattatgggtggagaagaaggatatttgaatatttaagacacaaaagacaagattgataccaagactgacaacacagaacaaatgccaatttacaggag

SEQ ID NO: 61639 - DNA, 725 bp, Homo sapiens
gcatgcacctgtaatcccagctacccaggaggctgaggcaggagaattgctggaacccgggaggcagaggctgcagtgagccgagatcacgccactgcactccagtctgggtgacagagcaagactccatctcaaaaaaaaaaaaaaagtgatacagaggcagtaactgattctgagaatattccatgaaccgtacggaaagtaaacaggatgaagtcattctgttcttttagaaaaggaatttggtcccgagcttaactcataccataaaacgagatgccatgtttcccctgccaaatttgattgggagtggcaaaactaattcattatttatttctgtctttaaacccagaagctattttgatttttaaatttttttctataaaagatcaaatggtaactgatttaataagggacatacatttcattttactgtgaatttgaactgtagatcaggttctttttctagaagaagaaagtgaacttcagtctagtgacttttctggttccactaatgaacagtggtacacctgtaggcaagtttttccccatctaatggaatgatactacagtatgattagggttgttgtgaaaaacaaacaggattgaggatgtaaataaagggtttaacccaggacccagaacaaggtaagcaccaaaaagtgttagccattattattattatcataggatcatttactcttatcatattcatcataaaataa

SEQ ID NO: 61640 - DNA, 466 bp, Homo sapiens
tggaagagacttaggtaggggcaaagatgcagggcttgtgaagaaacagtgagtagtctagcttagctgccttatatggttgtcttataaagtctgctgaaaaccagggtggaatattagaggatagagggacttgaccagaaatgaacacctgctaatctgctgtactaacagatgagtcaataactggaatggggaatcctggaaatgcagacaagagtcagattgtgaaggatcttgaataccatgaagactttatcctaaacaatgcggggggtggtggggtagtgggggtcgcctagcaaagtacaggaggaaaagaagcaggatgagtaacatgatcacatctgagttttaaaaaatcacttggattgcagctgccaggtgatttggtgagaagagtgagtaggagtgaccagttaggagttaactgcaatagtccaggcagcagatgagctcccaacct

SEQ ID NO: 61641 - DNA, 2676 bp, Homo sapiens
ttaagcaactgttttgcagatgggtcagtcctcctctcagaaaaccatagacagctgctctaaaacttcccgccagtctcagctggggacggaacctccttttcccttaagtatcaaaggttaccaatattaggctttttatttatttttttttacaaatgaaaagttgggaacatttgtaaaggaccttatctttcagaataaccagcttcaaatcaaatttttttcatctttgacatacacttcgcattctttggcacttcaattctgagagtgagcaactgccatctgctccattttacagatggtccacagtaccctagccaaggtcaggattagctcaggcgtaaattcaaacaaataagaaggagatctaaaaacttcaaaagccttttaaaaatgcatggcctataaaatctagagcagggagggtccctcaacccctgagcaaacctcaaccccccaaatctctatcctgctctgttaaaagccttaggaagtgggcaggaggagaactcgggtggaggcagaagaaagacggagaatgacagctgttcaggaaccagttgctgggaggaagccagaatgtcggagcgattccagtactagaagcatgggagggtctgctgccagggcagccgagggcggggagcgcagaaactctgcttacaggctgcactcgccccgactcctctccagacgtgggatcccatgttatacttggagtgaatctggtcgctcgctccccgtccccgattcccactttgcttgcctcttctccccatccatctaccccacacgcattttccagaaatctccccaactcgacgcccactcaggctactgaaccccaataacgccacccttttactaagaggagcctccgtcgtcccaaccccttgctccgagcgggaagcttggtgcagcgcaccaaggtccggtagaggggggcggcgccccctgcgccgtgggccagcaggccgcggacgcgcagacagcaagtggaccccaagggctggagccgcaacgcaagttccccctgactgggggacgccgcccagctcctggagcctgcgaaggctcttgaagctgagcttcccagggataccagaagggacactctcgtgcaattccggctagggaaagcgagggaaggtggcggctccgggcagggagcgagcgagtgctccacgccgcccgcaggatcgagtgagtcacgcggccgccagacgaggccggtggcgcacgcacccgagatccgatgtagtgcaccgcctcggcgccgcggctcccgccgcgcagacaccgcacccgcagcatcgccctggcccggctggtccacgcgcggaatgttcctggcctctgggccgcgtcggtccaagccttcccgagagcgcgcccggagcggggtgggcgggcgcgcggggcccgaggccttttgtagccgcgctccgccccggccgccccccgcggccccattggctgccgggaacaggtggtggggccggcgtagcgccccgaattaggaactgtcgggaagcgccgcggccgctggctcgagcctccgatgcttgcccttttttagccagcggggccactgacggcttctgttgcacgtccggacccggacccagacccgagcgtcgcaagaaggcccgttggagtctcgcgcaactgggcaggacgcgacttctgacgaagtgacaatggtctatgcatatattaagtgaatatttgagaatttaaatatgcaaagcgtgagtacagtgttacccttaaattcacatatgcgcactgaaccagtcacctcatttttcggtaaacgaaaccacctaaagattaggtggtttcttggtgcaacatcgggtttgagactgcagaaaactaagtctggaaattgggccatttgttccccggggaggcagtgctttccttccagtaccccgtcggttgttatttggaacacctggcatttcacatggtctttggccatatgcccctggcttgagaaactccgtcatgaaaatcgacaagtgtgggtcagaaataagggaggacgacagtttcgttccttccatttcatgttttaaaatttttgtttcaacttgatcaggattcttttttagaaaagtattttccctcacagtgcagtcttaattgctgtggatttgtacagagctagagaactcaggttaacatttatgctcctagcaggagggggggcaagagatttgagtatttcatttttgtacttatagaattataactattcatttttgatgagctgtcttttcaattttggtatctcaagcttgttttccagagttcatggatggaaagcaccagacgagcagatggcatggtggaaagagcctccgagagggaattaggataactgagttccagtcctgaatcacttatagactactatatgtcttcctgaattgcagtcttcttatctgcaaagtgagaacaatagaatttactgtccctagcacatggggggttgctgagaggccaaaatgagagattgtacatgcagaacttgatgcgtggcattagagctgtatgaggccgggtgcagtggctcacgcctgtaatcccagcaattgggaaggccgaggcaggcggattgcctgaggtcaggagtttgagactatcctggtcaacatgatg

SEQ ID NO: 61642 - DNA, 1674 bp, Homo sapiens
ctctatgagactttgctacatttataatcagaaaaaaaccctaatcgctattatttttagaagcaaaaggccctgtgtctgcttagaaacaactcttgttgtcacagatattttcccttgcagctctgccctaagaaaactgtagatactgctctgggagaaaacctcccacagccacctggctcctctcatgtccatacacgctgtgatctggcagaacagggagattagcgtgggaagacacttctgcctatctctctgttgtgcactttgcccagttctcagtctgtgcttgctatttcgctcctgtctgtctcgcttgttgctggtagggaattttccagaattatcattcccagcaaaaggcacttctctagctgggccctgggaattgaagaagtaacattagccagttttctgcatccctctcgaatattcttacttgtcttgggcaacatcccaggaggaagcactcatctcctccacttatggtcatttaagtgacaaaacgtcctccatagtcacgttctccctgctaaagaaaggtctgttcaaatagaattattcagaatttgcaagcttagaatcaaagtagggtccaatattgaacttttgcttaggaactctaaattactgtttaccatgctattcagaatttaaaagcaaaactgaatacgaagaccatataagactatatattgcaaaggctaaactagaaatattcagctataagatggaaatggaatgacctgtgaggcatgaggtttttatgaaggcttgatttagtaatgacagactatgtcagccaacacactgccttttctggaaagttatgttgttcatgtgacagcaattaaatcatttcaggggacagatttcagacattcccaagagaatgcatctgcaacttgagatacttgtgcttttctggcacaattctgtagcaaccaaatttctgactctgcagccaatttagcactgggaaaatccagtaattcccagatatttacaaacagccaatgaagataaatgtttactagtataggactaatccctcattgactctgattagatcaaacagtactatttcatggtattcctgtttttttttttttatgtccaaaccttctgtaacatctccagaagaatgaagcaacttcttcctgtgtaccacagcacaccttgttaatactttttttagagcacttatacatggctgtaacagcttgtttacatatctctttcgccagacctctggagagcaagggctacagctcctgttgtacttagcacagtgattatcacttaataaatgtttgtggaatcaattgcctagtcaaagttttattttttcccttggaatttgtacctcactttaaaacaatatttacaatgtttgagagaggcatatttacagaattttaaaactaagagggatcttattttatagttgggataacctcatggcccaaggctaaatgattcatccaaattcaccacactctgctgagataaattctcagtgcaattcttttttcaagagttaagtgaacttttggaaaacagactttgattttatactctgggaattcaaatctgaaaaccttaaacttccaagtctagcaaaatggtgctataggtctcaagaagggctttaagtgtgattatattaat

SEQ ID NO: 61643 - DNA, 3394 bp, Homo sapiens
tttaagcagacaagtacagctgagaccaggtaagttactgtcaagtcaagaagtctgtcatgtctgccatgaagtttggacagaatgagatcaggaactggcatgggtcttaagatcccagatctgacagtacttcccattgataagatattactacacagtctgtaattgattatttgcatagatagaaaaaaaaaacttcccagcaacttaagcactctaaaatatcagttttgtcaactcacaaatttgggttgcagtgaaagtggggaaaatagaggtaggaagatgtaagtcaaataaaaacaaggtatatcttcttgtctttgagtatctgtagttcttttttaacggcaattaagagggatagaaaatgtattccagctgataaaaaggaattccctgtgcgaaagggaaaggcagaaagcagctggaaaaaaaaaatagcaggcagttgtcttaataacgtagataggtatcgcctctaatacaggacttagtactgttgtgccccaattagacagtaagcattgatcgcatgaactttagtgattaacttgttgccaaagaatattcaaaagaatatcagaaatcagaacaaatgtactgttggtgtgctacaaatccatcaggtagcctagttttccttctttcctctctacaagggattttaagcgctaccgtgtgcttccctcccactatgctggtactttcccataggaagggttgtgcctggacctcccagattggaaccccgattaccgaaggtcccaaggctgtattctcagttacgccaagtcacctgagacatttgcaccagagcacccaaaattctgtgcccatgcggatagttagagtttcttcacaaaatagcaaagtctctaggttgctattccaacggcggtagtactgatgctccagttcgaaggccaggaaaacagaatgtaaagccggtgacttccaagatatatgtaaccaccaaagtacatgcttaatgacctagtgaagtgagcttaagccgcctcccagacacctgtaacgaagaccatctcgggaaagctctgggttaggcaactcgatttcacgaaagcggacaccaacgctctacccagaggcccgagcgtcgtctaacgtttccattggccctttcggccttcactcagctgctagcaacgcagtctgccctagcgcatgcgcgcaatctgcttccggcctgcgagctcggtgttccgctttttgtgggccgggtgggtttcctaatctggtttcgtctgcctggttcatctgtgtgcgatggctccggactcggatcccttccctgaagggccgctcttaaagctgctacccttagacgctagagaccggggcacccagcgctgccgcctgggcccggccgccctccacgccctgggcgcgcgcttgggctcggcagtgaagatctcgctacccgacggcggctcctgcctctgcactgcctggcctcggcgggacggagcggacggctttgtgcagctggacccgctgtgcgcgagccccggggcggcggtcggggcgtcgagatcccggaggagtctcagcctgaatcgcctcctcctagtgccctgtccgcccctgcggcgcgtcgccgtgtggccggtgttgcgagagcgggcaggcgcgcccggtgcccggaatacagccgcggtgctggaggcggcacaggagctgctgagaaaccgaccgatctccctgggccacgtggtggtcgctccgccaggcgctcctggcctggtggctgccttgcacatcgtcggcgggacgcccagtcccgatcccgctgggctggtcacccctcgtacccgcgtcagccttggcggggagcctccgtcggaagcccagccgcagcccgaggtgcccctgggaggtctttcggaggcggccgactcgctgcgggagctcctccgcctcccgctccgctacccgcgcgccctgaccgcgctgggcttagcggtgcctcgcggggtgctcctggcggggccccccggagtgggcaagacccagctggtgcgggccgtggcgcgcgaggcgggcgcggagctgctggcagtcagcgccccggcgctgcagggttcccggcctggggagaccgaggagaacgtgcggcgggtcttccagcgcgcccgggaactggccagccgcggacccagcctcctcttcctggacgagatggacgccttgtgtccccagcggggcagtcgagcacccgagagccgcgtagtggcccaggtgttgacgctgctggacggcgccagtggggaccgcgaggtcgtggttgtgggagccactaaccggccggacgctctagacccagcgctgcgtaggcccgggagatttgaccgagaggtgaatgggcttggcgggtttgcccactgtcggtggaacctcggccgcttctggcgccatttggctgccccggaggcgtttgcctcttaggtttgagcatcggtgaggttggagttggggctctttgcaatgcagagaacacgttctctgccgatatatgatctgtgagtcaggacctgtatttccccagagtcaaattgtcaggacctgtgagtcaggatctgagagtcaggacctgtttccccagagtctaattgttttgggaagcgaggtgtccattacagattaattttgttgtgcaggtcctataatcagtaatgttaattcttaagagaattttggtcacctacaagcgtgttaaactcattttttggaatgagaatttaaagaaggatagcctcaagaagtaagtgtgttgaaataaaaagggagaaggtggggaagaactaaatggaagcaggcattaactcttctggatttattcattccttgtcataacaccagcatcctattccacaattgaggaggtacccacaactgctccctgagttgtcagggaggttgaatattcagagctgtcctattttaagctttggtcctaaattgacttgaattctaaagaacagtttgaaatttagtgactgatatttctattttgtgataggattcaaaagagaaatgataattacacacttttagctcagttagttcaggacttgagtggatttcttccttgcactatctagtacctgtgtccttaagggcagggacctagctatctatacctggcttctagaactttgtgtgttcttaaaaataacaaaaacttgttaaatgacatagaattttcattgtgcaactttctagccagtgttactcctctggaatattaggattttcgtatattcagaatctaaagtatacgtaaagtgcacggtactagttccaaagtggttcactaaattgtcgtacatgtttgtcaggataaaaaacatattattattttggccgg

SEQ ID NO: 61644 - DNA, 935 bp, Homo sapiens
gcctggactcaagcgattctcctgcctcgccctcctcagtagctgggactgcaggcatgcagcaccacgcccgctaattttttttagtagagacgtggtttcgtcacgttggccaggctggactcgagtgatcctcctgcctcagcctcccaaagtgttgggattacagtcctaagccaccgcgccaggcccggatacccttttagaagggttggctttccctcaggcctcggctatctgcgctcccctcttagggggttccacctcctactccccaaacctccaaactcctcacaagcacctaggggggccaagagcgaccggggtcggcaggtaaggaagaccgcggcgagcggcagggggcgccagcgcccgcgttcgggcgcttcacgtcagccgcagaatgtcctgcagggggcgcccgggagtcgcgtgcccaacggggaaagcgagtcaggtccctcgcgctccccgccccacgcgcgtgaccagagcgcgctggcccggcccacccggggcggttgtggtcgctatatataaggtggggaggccgccggcccgttcggttccgggcgttaccatcgtccgtgcgcaccgcccggcgtccaggtgagtctcccatctgcagagacgcggacgcgccggcccgcagttggcctgcggagcgcggtggacggtttggcgcccaccaggcgatcaatactttggatttttaatttctagatttggcaattcttcgctgaagtcatcatgagctttttccaactcctgatgaaaaggaaggaagtaagttttaaaaacaattgaaaatcttgactaaagttttcatttttaaagatgaaaagatggcacagattttgaacaaagtataaaataaatacagttgttttgctgtgtttcaaatgtttcatattgaagtgtccaaatgtgtcccc

SEQ ID NO: 61645 - DNA, 1871 bp, Homo sapiens
gcagctctggcctagaacaaaaaaagtttcaatgtagaggcttcaaaagccatagctgacagcatgctctgaaaaccagcatgcatatgttgtatgcagtatgttgagaaagggtttttctctggaggccaaagcttaggaaaccaagcacagagtttatgttataagccatggtgtcaggaagcatttgtgttgaagccctctctatccctaaaggaagaacagttggatcagcgggaagcagagcaggaccagatggggtgagattagatcttggaggacttgcagggtacagcacccttctcagcccaccagaccctggcttgaaaaggtttactgggtgggtcagactgtcccccaagaggtgaagtaagagacagagttccagccagaggcacacaactgaaggaaagaaagggctgagagaccatcacaggggcacctggcgccccaatttatggagggagtagagatggaaagggagccagtctggagaaagaactgcgcagaaaatcagaaggaagccgaggcgggacagcacgtgtccagggctggcgggattattattatgagccaggagccctgaaaagcagtgagggcagcttcagaggcaacgcgtgagtgagtgggaacagtcatcgccctatcctgagtggtgagagacatgtggtctatgtgactcttcttgctggtctgagggtcattccaggcctgcctgtgataacctcaccctgtgctgatcctggggaaggttctatctgggtttgtcacctgcagacccgtggctgtggaggagctggcactgaggagggcaaccccacagcgccctccggcccagaaaggggcctgggaggcacttggctccactgccctgagggattgggcaacctgggtgtgtccccgctgttcctggagagttggctcattccctccctcctctccaaaaacaaactcagacgcccatggtgaggtcagtttcagttgaagctgctttgcataaaaaaaaaaaacaaaaacacatctccttcctcttgatgggaatacttacaccaaaaagctttacgagcatatggttttgacggctgcgaggtcaggagatgggggttttcctcttgctctgcaggaccttggggaaatcactcaccagctaacgtgtgtcagtgctcaccgtgcgccagccacctttgaatcctccacagcccttgaggctttttcagtgaatgccgagaggcaggtgctttgcctggctgccatggccctgtaatcagcagagctgggatttgcgcctgggggttcaggatgtagccaagtgttagagcatttccgagatccttcccagtgcccaaacttcccgcttctctagttctaagtcactggccatctgaccgtgggagactatggcttaggctggccacacttgttctaatcttggggtctaggatgtcccagagggctgcatcctgccatgaccatgggtaaacagcttcacttgtccctgaagcttcctttacagggagaacagggcacaaccccacagcagacacagcagacgcgtgggtctcaccaccagcctgtgtttttaagggcatagaccttgtgttctcacttttgtataactgaccccctaccccatgctacagagtacatggcatgtggtaggtcctccttaaatgtttctgattaagcccagtgacaagttcttttgcaaagatacataccacagttgagctctggatacttactcatgagattttcaagtattcatttattcaacgaatatttatatatgtatgtatgtatgtatttcattttttaaattacttttcttgggggaggggggctttccagcaaaaaccagaaagcctgctgga

SEQ ID NO: 61646 - DNA, 2043 bp, Homo sapiens
gtgcttggattacagacatgagccaccacacctggccagtttgaggagtgtttcaaaacaaaatgcagtggtatttataataacaaaaaaaaattttaaaggaaataagacctgatacaggggaacactatattaatatatgaaaaacaataatatataaatacatggattgcagcaggcactgacaggttgtcattgtttttgcgccttcctggtgttcatgaacatcacctccttggatgttcatgtcacttctatgaggaacaggaagctctgggcacccagctggtgagagcaagagtcctgtgtgccccacatgacaccaagctgccaacttccatcttaccgaaccccaggctgtctgctcctgagggggctctggggcatggtgacattccccagtgggcgaggaagctgaggtcactgtctgctttcaacacttgtccctgagtcactgcctgggcctgagtaggggaaatccagcccctgcccattgcagccacacggcctggctcccctggctctgggggatgtcaccattctgagggcgtccagcagtgtgatggtgaagccaggtgccctctcctgacagccacccttgccccacagagcctgcctgctgggatgtagaggaggggggttccagcccctcctgtcccgcgtcaggtctgtagcacacaagctgcctgcccagggtcctcaaatcagctgtcttcactctgacctgcaggtctcggctcctgcatactgcaagctgggtgccttccttctacagaacccatgcccccttgcaaggaaaccatggaatttccccaggagtcttcgacaactccaggccacaggaaggtcacaaatggtcagaaaaggaatgaatttgaaggaggaagaaccagccctgcccacgttgtctggggcccctcccaaggggacaggaaagctccacaaacaggacctggaacatccagggagcgtctgggctgcaggtaggtgtcgccttatacactttacaccaggcccctccccacctccccatttagagcctccaggaccaatcgtatcagaatctccggggcaggacctgggggcatccatgctttttaaagccttccaggtgtttgcagtgtgcagataaggttcagggccactaatttaaaccctaaaagtcttataccagatctttctatagtttggggtgtgctactttcctgtctgtggaaatcctgcttgtcctacagggctcatctcagccgccccttcttaggtgaagccttccttgacttcccagtttcctgaggcaaagttaattgcttccccaccatcattaattctggtggggtccaggccgtgcctgggtgcaaatcctgcctccatgacttcctagttgtaccgtggccacatctctccacttctgcaagcctcaatctttttatctgtaaaatgaggctaacaataaaagtacctattttatggggttaatgttcagttaaatgcaataatctgcttataacagtggtggtcagtaaatgctagccatttcttataactcaaattcttttctgccttttctgcactttcaaaatgcaaactccttgaaagtggaacgagtccaccccagcctcatgctccccgtactctgtctacactgtgctctgcacgtagcagtattcaataactatttgatgaacaaatgaatcagaagggaatccttatgtgacattagaacttgcttcccagtttagctctggcataaatccagagtccatatattgatttgttgagcaatgttttcctttattgagttcttactatatactaggctctgagaatttaaagataaacacacaattgctgtcattgaggagagtctggaggaggacacagattcatgattttgttattttattatgcttgtaacattgtctcagaagtgccaccggggcacaaaggaaaaagaggggaaggggagggaggagggaagtgttagtgcagaagatacaaagagaaggagcttgccgggtggagaggcagggaagggcattggag

SEQ ID NO: 61647 - DNA, 765 bp, Homo sapiens
atcagtctgggcagcaggttgtgggcagcaggcctcagaatccctgtgtggggtcagccccagtgagagcagagcctggccccaggcagcccctcccactcagcagacccgctctttcgcggcctggacctggggacctggtgcgggcccagaacccagcccccggacacctaccctggcaggcctagagcaaggaagtttcatggcgcaatgttcttccccttgaaggtgtgaagccctgtgagggctggaatttccacattgctcagatagtgggcttgctcagtcctccgcagtgaagaaaacaaaagagaacaagtggccacggcctctttctaggcatctctttattcctctgggctgcaaggggcctgcattgggtctgaacagaggtgaaacagaggaaagctttgagggtgcaactcagcctggagccatttctggacagtgagaatgaacagcagtgatgacgtcattcaccacattccacatgcgctcgtctttgcactaggccttggaggcatgagggtggtgactcatagcggtaaaaaccctgtcttggctacctcaggaaatgagtggaatctgtggcttgacgttcctgtattcttgctgatgaaccactcacgatgtccacgtagtggctcctgccaggcgcttgtgaaagttggagaaaagaggtcgccttcccaccatgcccacagtgtgcctcggccccttgttcatggccctcggcagcagatgcctttcctttctctcatgcgc

SEQ ID NO: 61648 - DNA, 1619 bp, Homo sapiens
gtcccttcatactgtaaaattctatgatcttaagttatttacgatcatttactattttaaacgttgcgaaaattaacctggtattttaccagacctttgtaaaaagaggaagttacatgacatacaatgaagataacgtccttaactttacggtagatgacagtggttgaacaactagaagagaaagtcaaagttatctcggggagtttatattgtacttagattgagctgcactttggaaccgtgtggccttttcacatgagatcagtgtcttgataaatacaaacttcctgaaaagatgggttaaacctcaaagcctgtgtaactacagcttgacaaagactctcgaggaaaggtaaacggaaagtgagttggcaacacaactcacctacaagttctccaatcatgaaaagcaagtacagaacggcagcaatggtcaacctggctttcacctttctctgcttcagtatctctctctgtttgctgcagttgtcacaggagtccaccttcaaactcagctgactgttggtcaaaggtaagtcttggtccagtaaggaatcatcgtcggcctggagggtcgggtgcgccccgttaacaggcctttccggggcttcggaaccgtcatcggccaccacaactcgaagtttgttgaaccgagaaagcccctcgtcccccgcctcatccgagaagtcaaaggcgctggtgtcatttaaaaacagcggcgcatcatccttccttagcatagatttgaggcgcttccacgcgccagagccggccatggcagaggctgagcggccgcggtgcggaacggcttgggggaggcggacggccggcggcgcctacttcaccggagcgccagttctcgagggcagtgccgcgcgtccctccccatcctgtggaaaacgaaacacgttataaattaaaggcgcccaaccctgtcctcaagttccgaagccgctggcggcgggtcgcagggccgaccccgacgctccgccggggctccgcgagggggcggcacatctatttaatacctggggcgctgccgcggggccgcaactcatctccccgcccccggccggctcagcgaggcgggctcgcgctgctccacccgcggccgcaggagagtggggtcgtgctcgcgcccgccgcgcccgctgctggaggccggctccccaggtctgacaggttcggggccggacgcccacagccaccgcctctccccgccctgcgcgaggccacgcgcgtgcgccgggcgaggcgcgcgagggaggggtcggcgcgaggacacgcaggcctggcgcgcagggctggggcgcccgcgatgggcgggggcgcgcggcgcgccccgcctctcgccccgaggctggattgggggccactgcgccgcctccgcccaggggtcactcactggccaactgaggggactttgggcggcctcttccaccttcccaggctgggaggcaagtgcggtcggagggtcacgccgggggctgggcgttgctgctaggagttccctccaccgaaagtgtgtctcaggaatctcgggtcgggatctgggttgcgggtgctcggcagaagacaaacccagcacttttcttgctaactgaaaaggcaagcag

SEQ ID NO: 61649 - DNA, 2587 bp, Homo sapiens
taccagttccagcttctggaggtcacccacaatgctggaggctcccttcctctatattcaaagccaacaatgttgtatctctctaatcattcttcatagttacttgtcactcttgactctcttttgcagttttggaggccctatgattacaatcagcccactggaacaatccaggataatgttttttttttaagatggaatctcgccctgtcgcccaggctggagtgcagtggagctgctcagctcactgcaacctctgcctccctggttaaagcgattccaggataatctatttcaacaccaggtaattaacaaccttaattcccatttgctatgcaagctaacatattcacagcttctggtgttcaggctgtggacatctttgaggggctagtattctgcctaccagagttaataagaaggagctaatactaagaggaaaagaggcccaaagaggaaagtgtgtgaatgcactgataaaggcaatggggaaccagtgcaagtttctgagtcttgcaaattcttatttttttgaaataagctttggttgcagctgagaaaactgaacaggcataattggggagcaacattaggaggccaccattacagttgagatgagagggtataagctagagatggcagagctaaatcgttttctttggtccaaagctgcctatgcccttttctaagtgttttccaacagaattcatgagatcattccacaggatctcagcaagtgcagtttctgataacttggccgaatttgttcagtagctgctgcaacggagggcttaaatctttcatctacacttaacaaggggagcccggaaaagtggcaaaaccctagttagcaaggctgaggctcgcagagacctaggcatcgaattttttaatggtccaaatcgcagggaaagcgagcactccctgttctgaaggttttccctaaacacggagacaacactaaaaagctgtgccgcgtgagggctgaaagtcctgttttctccctagcttcagtgaagaaagcctgacggctcccccgcgtccaacaaagacaacgctcttccggtcttcgtgacccaccccgtgagcagcccaaaccgaccaccgtcctcccccagctcccaccaatcggatcgcagggactcgagccccacactgctgagtccgctgacactgcgtccggggccagacgacgatatcagcgcggggtccccacaacgccatggggcagagccaactctcgagcgcgtgatcgaagcccgcagttttttcgcccccgtcacttccgggtgcgacaatctcttctgtccggccagccgctggagtcgttaggtgccgccttgcttctgacgagccacacgtttgcttcttccctgtgttcccagctggagggacatgagtgtccctgggccgtcgtctccggacggggccctgacacggccaccctactgcctggaggccggggagccgacgcctggtacgtactatcgggtgggaagcgcggcccgggctgggtgtgaggggcggggacctgagtgagtagaactccggagaaaccctgggggagtaagcggtttttggcggctgcggcccccgggccctgccccgagtgcagaaatggggaaccgcgccggcccctctgcccagcgcaatgggcggaactgaagtcccgaggggaagctttgtattgggggtgcaattgaaggcggttgatggtgaagccattctgagtttatgtgttgactccggtacgtcattggttatttgtcatacggcagtggtgggggatggatttaccagaaagatgatcagcttataattcagagaggtgacgtatcctataatattgaccactcatgaaatgcttggtcagctcggtgatattacttcatccctattcctgcagcagtcttctcgaccgagttccaggagggatttaagctctaatgccctaaggcatccattgaatggaatgaattaacttgctgtgcacccaaaatggtactatttatgtaccatccttgggagaactgagaaaatggtcactcagagcattttctgtgttctgtggtttagatgaggccttagatgagaaaggctgcagggctccttggatatgctttttcttttacctcctgtttcagaaatataggggttacccccaaatagtgctctcagcactttcctgttcatgcttttcctcaaggatctcttcacactttcattaagtcgcttctataaatatgacttctttgtatgtatttgaaacttgggcccctctcttaactcttgtttacttctccatctgctagctggatactttgacgtggctgttttgcactaatctcacgtaaggcatgtacataaatgaaaacatgtctcatcctgttaatggtggtaggtcactctgacttgaaactttgaaattgctctggactttttcctctctctctccttccacctctaggggattctcctatacaattccatctccttgtaatttcacctttaaaacagctgttgaaaggctggttcacctccagtcttactctttcaacgcatctgtcccgctgctgtcacatcactg

SEQ ID NO: 61650 - DNA, 9190 bp, Homo sapiens
actcaggaggctgagacaccagaattggttgaacccatgaggcagatgttgcagtgagccgagattgctctactcactgcgctccagcctgggcaacacagtgagactctgtttcaaaaaacaacaacaacaactatatatatatatatatatatatatattcaaaattcataaaaccaaataagtgtaaaagaaactcaaactttcaagggtttatttttgtttgtttttttgaaagcttctagcacttgcacttctcaggttatgagacttttgggacaccctgtatttattgtaaaaagggttactgaatctgatatggtggagaaccactcactgagactttacatcaacctggaaagagccgccaactgaaaatgtccagtcatgaatatgggatgggacactgtggaggccagtggctggaagccagcttacccctgcctgcgcgttttgaaggaagggctccagcgcacaccaaagctgaacctcggtcaccttctctgtgaaatgagcgcgggaatacctgtgtttctgggcagctgtgtgaacccggtgagaagcccagggcacataggaggacccagtgggaacagccagagcctctctgcacagcgccccgcctccgcttttgcctgccctgattacaaaacgctgttggcacccaggggcggaagcgtcaggtggcctcggtgtcctccgcctgtgcgccccagcctgcggggccgcccttcagggcgcgcaaggggcgagtctgtccagccggcagcaccccaggccggatggacgcttgttcctggttctgtgccccgtgagcgctcaacgccctggtgtgttcactgaccatggtgcctgggctgcggcgccgggcggggcacggcgggacttttcgggacctttcctggggggagcctcgctttccccgcctccagcctccgcccggatggcaggcgggcggggccccagtccaggccttgagacccagaagggagcgaaggtttttgctgcgccaacgcagtgaccgaaggctccgctcacgcccgggtaagaggcatccgcggccgatctttggccctgggccagcggagggagactgggcggggacagcgaccaccactgaggctgtttgttagcttaactcggtttccgcagctgggactccgcagacccggtgcgccgcgccccaaactttgcttcctcaactccggacacctgcagctcttgctgcccttgtctggaacccgggtcttgggactcttgcttccttctcagagtgtcagagcctcagggccgcggagaggccaacccgcgaggggtgcttaaaaaccgaagtatccgtggtcttggtgtgtggacgtttctggcgccttccacctgttgactgtcactcggcaccgtcctggagcgggagtgggtgctcggcgtccgggggccagggattgacacagtcatccaccgacactgcgcgtgggacagagggggcgctcgaggggtcggctgcagctgaaacctgaaggggagaggatttagggcacctgctgaacaggaattggtggaaagggagaaggggtcttctggtggaatctgggctcatttcctttcctcttcatctgtctcttttatttatcaaaattccaacctggctttttgctcaaagacgctgaacagagcccctggctttgcctgcgctgcccattgctataatgcagggctctgttccatttttgtgctgtgcacccctttggcatttctgggaaggctaaagactctcagaacaatacttttttttgagacagagtcttgctctgtcgcccaagctggagtgcagtggcgcgatctcggctcactgccacctccacctcccgggttcaagcgattctcctgcctcagcctgccgagtaactgggattacaggcgcagcacacctggctaattttagtatttgtagtagaggcgggtttcaccatgttgcccagctggtctcgaactcctggcctcaaatgatccgcacacttcggccttccaaagtgctgggattacacgagtgagccaccgcgctggaccagaacaatgcttttttaaaggtataaaacaaaaggaagagtattataaaggaaaccaattgcaaaacacatgtcaaaacattaaaagaatttatgatatggtaatatatatgtctttaaaaaacgaatgcgttatttaataacaaggttattaaataacaagatctagcagtggattaaatagttaccataattttgaagtagtaaagaacataaacaattatttcaagatataggtaatacttgtaatataagaaaatatctgtaatttctttcttcttttttttttttttttgagacggagtctcactctgtcaccaggctggagtgcagtggcgcgatctcggttcaatgcaacctccgcctgctgggttcaagtgattctcctgcctcagcctcccgagtagatgggactacaggtgtgtgccaccacacccagctaatttttgtatttttagtagagacaggatttcaccatattgtccaggatggtctcgatctcttgaccttgtgatacgcccaccttggactcccaaagttctgggattacaggcatgagccactgcgcacggccaatatctgtgatttctattggtgacaaagtcttagtattgccaatactgctgtggtttgttggctacatacataattgaagtaaatgttaaatttcagttagatactagagaaataaaagatgtaaatattaaatatccgtaaaaataaagatgtaaaatacttttccatctaagtttttgggtccaggttaagatcctctgatagtagaaagggcactgacccaatgacttggcttctgggcttgacacttccattgacatttccaaggcccattgtaaccttggcttttttttttttttgagacatggtcttgctgtgtcgcctaagctggagtacagtgaggtgatctctgctcactgcaacctcctcgcaggttcgagtgattcgcctgcctcagcatccctagtagctgggattacaccagccacccaccaccacacctggctaatttttgtattttttggtagagacagggtttcaccatattggctaggctggtcttgaactgctgacctcaagtgatctgcccttgtctgcttcccaaagcaaccaccacacccagcttaactttggcttttgaatttcttttcgcctcagcttcttcattgtacagtggagataataacaccttcccaagtatttaaggcacccagcactgcacttagtgtagagggctgaagtagataccatttatcagaacttatttgtatccctcccaagcttatggccttatatccccaagcctggggaggtactcattatttattgaatgaataagtgggtcagaaagggttgcttgtgactaagtccaaaaaacaaaattcattaaggagacagctggtggtttgggaaatgactttgtttaaatttggggctttttttctggctggaaaaatatataaacacatttggaacgggggtgtttgaaatgtcagtcagggcccagggtctgtgtgtgcgtgtctgtgtggctggtgttctgccagtgaaaatgaaactgaatgttgaaaggaaaccggattcctttgcagaacagtttctcctccatgttgcctgtgtctagctttgttaatccgatgtgttgtaacacaggaaatgtcttataaagaatggagacggacccatgacaaggcatttctgggcatagatgtacttttttcttctcctttcacgtttccctgctccactatctactatataactcctctttgactctgaagacttggtaaataggagcagtttggatagcttatggaaagctgcccagacctggctggaagccaactagttgcttcttaatcccagccttaaaaatctttgtaatccccagatgtaggtggtaataataataaagaaaagtagatctagccaaccatccctgtgatttacattgagaaagtgctaaattgggacaggaggtagagaactttgtggaaaaaaacaaaacagaacaaaaaaaccctcggaaatttagaacacactgggactatctatgtctgtaactttgggaagggcaaatactggtgttatggactcaccaaattcatatattgaaaccctagcccccaggatcttagaatgtgactgtattaggagatagtgccttagttagaagtggtggtgagcacctgtagccccagctacttgggaggctgaggtgggagaactgcttgagctcagaagttcgaggctagcctgagcaacatagcaagaccttgtctcaataaaagaataattagccaggcacggtggctcacgcctgtaatcccagcactttgggaggccgaggtaagcagatcgcttgaggctgggagtttgaggccagcctggccaacatagaggaaccccgtctctactaaaaattcaaaatattagctgggtggggtagtgtgcacctgtaattccaactactcagggggctgaggcatgagacttgcttgaaccggagaggaggaagttgcattgagccaagattatcatgccactgcattctagcctgcgcaacagagcaagactctgtctcaaaaaaagaaagaaagaaaaaaaaaaaaggaaaattaagttaggtcattaaggtggagccctaatccaatatgaatagtatccttataagaagatgactcgtcaggagcacatgtgcacagagaaaaggccacgcaaaggcacactgagaaggtggccatctgcaaaccagggagagagatcccaggagaaaccagtctcatcagcactgaggtcttggactttcaatctccagaactttgagaaaataaatttctgttctctagacttcatctagtctatagtgttttgttatggcagccctagaaaattaatacaactggttctaccaaatggacaataggtttaaaaaaaatggctacaactaggcaccatctcttttaagtcatgatcccgacatgtccatcacttgctcttaggatctcttacccaacctatgcagaagagtctcccatgtactttccttctacagacaccctgtgtggtccctaggatcttgcctgaagttgttaaagccatattcagcttcatgattttgactgttaggaaaagaaaaacttggcctcttcagcaagtgacctaggttagctgttgtgccatgtacatagtaagtactttgtaaatgtatggtgggtgatgggtgatgatgttatgatcatccttaaataccatggggtgactcccttctgatcataatgaatctccatgttttggccctagcccagccctcagggaactttcatgccacctagctgggaaccagcagctctggccctagctacatgaatggagagaaaatggctatgtctgtatcctggtaccaattcctgacttctgggagggagggctgcttctggaagtggggattgtggtgatttcactctatgataactttcttatatctttggctatttgttctaaggtagcccatgatgtctccataggaaaatgatgtgttttaacaaccaccatgtttggagtatagattgtgagagctcttcaagacagtgctgggtctagtaaatgtggttttgtgtttctgtgagcacataaatgatgcttgagatggatgaggggccatctgagtttggaggaaaatcatgagcctttcaaggtctaggtgatcaaatctaagcttgttttgaatcattgagtaagaaaggtctttaatggcaactagacacctccacttattttacactcagggaaatggactcaaaatggtaaatgactatctcatggtcttacaatctccatttcctcacttataaaatgggaataataattcccacctctctggtttttgtgagtaattacgtaaagtgcatagcacaatgcctgtcacatatcaacacttccacaaatgatttggggacttgcggggagagattgagaggaatggtttccattctaattatgttccagacctgcttattaaagccttgttattctttgccacaaaaattcacatctctgatcaatctaaggagttattagaacaagcgtccccatttgaaagcctgcttgtgaacttccattttccttttctcatttagaggatagcaaagttttagagaagcaggggacctttgatgccacccaatctgatcctttattccattgatgaagaaagcatggcccaaaatgggtcaggaagagctgtacctagcactccctggactgtggtcctgggtctcttgactcttgatatgccctcagacaaagcttcaccaggaacgggtcattgtcatctagctggacacagaagagacgtgagctgtctacacctcattctgtctcaactattaaaggattgagtttagagtctctccaactatgtccaaatagcaaatgtataccttgaaattaaagagtgttttctcattatggtaagacctcacacactggattccaaggaatgatatacttgaatgaaatggccagtcccgtttacagtgaactccttgcatgtgagactctgagtggaaatcccaatgctcctgaggctgatgagtaattttaatgtggtcatttaacaaactcaggaaaacaagttcatccctgttgtgtgactgggagtacactgattccacctcaggcttctttttccagtgagtcatgtcctacagtctgcagatgggcacacacaggcatatacagactagaaaggaaacctgaaaattacctgaccagaggccaactatgagtggtggggttgaaggggagctaagtcgtgcttctttatgtactagaatgtgagaagtcaggctcccactggctacagcaagcagaaaaacaaggtgttctttcattttttttccccctatataattcagtcaaaactcttaactttcatttgaaataatccaattgactgacatattttttctttcctggaatctgaatgcaagcattttccttatgtaaatataatttgtgttttctgcttagcaattgtattggtttggtgaaattgtcagttctcttgttacaatgcattctctgattgtaaaataaggataggtcaggataatttgtaggaaatttctcaggagcaaagggagccactgtttcattgtaaagtcctcattagcaactcttaatcagtaactctgcaaagaaaattcctacagttttgcccctgaagagtgagggaactaaagaaccccagtgcagctcccagtccttgaatcatcagagagctatatagattgttcctatttccccagtgactcagtcctggcccactactggtgtacttgcttcacagcttaatatttaaacaaatgtttggatttataacagctccagagggagagtttcaacatggccctgcagggctaagtgaagattgctccattttctttatttgttaacagtatagtaatccagttcctgaacacacaaggcaagaatagcactgccattactcaagcagaggtgtgccaagaggaagagcacagctgctatcctttctcggaacaacactcattcagttttcaaggggggtgctttccttctccctcacagtgccttggacctttactccactttgagtaattctagtattgctgctcacatcctgtcttcattatattcacctgaacaagtggatataatgtcatcgttcacattcttccttcttctttatcccctatagctgattgtcgcaaaaatgtcaatgtgtgtctcacattcacacccctcatctctgttcccattcagaccccaccctcactgtgcctgaatttctgaaacagccgcttaatggatcttcatattcctggtctttcctgttataacagacagactcttcttacccatcactggctgtgcagtgcctagcacaatccctggcatttagtaaacaatcaaaaatgctgaactcaactgaattgctccagttcatcctctcagcttcccctggggactctttataaatccagttttattaagaccttccaagggctctcactgccattagcagtaaccacaggctgaaatgcacaccagggctgagcaggtaacaaatgaacaacataggctgagtggggctggagtgaactgaaaccttgtgcatggtggagaagaccaatgactgctcagctccagccaagagtttccatgtgagaatgtgggcttagtgttagaggccaagaatctggaatattttttgtcgagatctccaaattttttaatgttgatgactaattcaaaattcaagaaaagcactgtgagccaagcaaaacacagctctggcctgcacttggcctgcaggttgctgctttgtgactcctagatcaaattgccattgtctgggaataagctctcagacctaaactttagtaacacatgcctatccaatctcatttctccctcttcccagagcgctagactgccctcctttatatccaccgttaggagattctcattgcaagtgattctcctttcaaaatcttgaacccaactgtccaaaagtagcccgaacaggtccctgacataacttccctttttctgctcacataattcctttttcttcagctgtctagatgtcaactttgacttttttttttcttccagaagcctttcccacgtcttccgaaattattctctcttcccagcctctatcttatctgaatctttgtttgcatttctaatgctaacacctaattcaggagcttatcgctcacacctggaccactccaatagtctcctaactgatttgtcaaaattagcccatgtgaaactggttttgtttctcctccaacaggagggttaatttgttccaacaccagaagattctcttactcaaagctgcccctttgtgcgatcactttccagaactttgttttcccatgtaaagcctcaatgccctagctaaaagagtgggagggggtcaggcctggagaaattgctgtctctcagcttgcatccttacatacagtgggcgctcaatgaatacttgtggacacattcttttttctttttgagatggagtcttgctctgtcacccaggctggagtgtagtg

SEQ ID NO: 61651 - DNA, 651 bp, Homo sapiens
ggactatggggtgcctagaaatttggtcaaacggtattctgggtgtgcctgtgagggggtttctggatgagagtaacatttgaatgggtagattgagcaaaacagattgtcttccccaatgtgggttggccttacgcaatcagctgaaagcctcagtagaacaaaaaggcgaacactcccgtgaatgagagacaatcagccctgcctgcctgagtgtcttggagctgggatatcggatgttcttctgtgttgagagtcaactgaaacatggcttgtcctgtgtcttgagctggccttgagactgaaactgtaccataggctctcccgggtcttcagcctgctgactacagaattgggacttagcttctataatcttgtgagccagtttccaggaatgtccttcatgtaatagggaaatgatgatgtttgctttggttgcctccctcattcctttcacctcctccagttaaatcttgttttgaccctttattggctgtgggtgcagggagttttcccatgttccaggaggcagccagcttgtaactagcaagcattgctatgtttgtatttctgatacattttctaaaagagatcgcagaacaaagggtcctgactcaccaaggatacaggtatttgttgtgatttactttc

SEQ ID NO: 61652 - DNA, 1857 bp, Homo sapiens
gcgacaagtgacagagcaagactgtctcaaaaacaaaataaaataaaataatttcagccaacaggcatttttcctgaattattagatagtttgaattaagttctgttgcttagtcatgtgaccttaggcaagttctctatctctactcaaaccctcaattttatcatctgtaaaatggggattttatttataaggttatgaggagtctttgagacagcacaagtacaactggtaaacaataaatgttagttattatttcaatgatagttttttgtttttttgtttttttgttttttttttgagacggaatcttgcgccaccgtcaccaggctggagtgcagtggcacgatcttggctcactgcaacctccgccttctgggttcaagcgattctcatgcttcagccttcccagtagctgggataacaggcatgtgccaccatacccagctaatttttgtatttttaggagagacggggtttcaccatattggccaggatggtctccatctcctgacctcgtgatccgcccaccttggcctcgcaaagtgctgggattacaggcgtgagccaccacacccagccagaatagattattttcctaccaaatcctgtcttctggatttgaaataagaaaatatttggttaagaggtgtaaataactgataatagcattagggctgacttaattaattaaatacgcccagaaagcccaagtgggaggatttagttgaggaggaggaggagttttccaacagtccctccacctgggcaccaggtgtaagcctgacctgtgccgtgtacacagtgctcattcgtgccctgagacaggaagctacagagatccagaccaacagctcacagtaagcttgggccaggtctggcgggaagaacagagtaggcaacaagagctggacactgtttaatgattagactgttttcctctttgattttggaagtgttctacaaaggtgatctgttaaaggttggccctgtggttattgaaacccaaagcagagtgggcccagcctggcctaggcttgagaggaaacaattgtaaatcaaagacccactgtgtcctcaaaagcaaaaatagctgaagggttgatgacaatccttggcttggtgaatctttcattaagaatgctctgagtaattcttgcttagccagcagctctgtttgaactctgccaggtgccctggctgctcacaaaccatgtcatgtgacataagattaggaagcttttgacacaggcagtctgtattgcttgtccaggaagggctgtagtggaaaggtatgaagtcccaaagacttgtccagaccaggtctggaactaggggccagtgatggaagtaggggatgcccagtccgctgtcttatctttcaatcaacagggactttacttctccagttagactgcagtcatatcaaagcattcattcccatcctttgaaggagggacacaatcaatttagaatagaggaattttaatctaacttaaaagcataatactatttgattataaaatatattgcatgtgccatttggtaaatgaaagttaaatttaccttatttattgatgtttttctttttcttttttttgagacagagtcttgctctgttgcccaggctggagtgcagtggtgcaatcttggctcactgcaacctccgcctccctggctcaagcaattgattctcctgcctcagcctcctgagtagctgggattacaggcacctgcctccatgcccagctaattttttttgtatttttggtagagacagggtttcaccatgttggccaggctagtctcaaactcctggcctgaggtgatctacctgacttggcctaccaaagtgct

SEQ ID NO: 61653 - DNA, 2425 bp, Homo sapiens
cagctgcacaccggggccagccatgcggccaggaaccattatgaggtgctggtgctgggtgggggcagtggcggaatcaccatggctgcccgcatgaagaggaaagtgggtgcagagaatgtggccattgttgagcccagtgaggtaagcctccccttttgagggcctgggtgtgtgtgtacgtgtgtgtgtgtgtgagtgtgtgtgtgtgtgtgttctggggttggatatgactatcaagcaatgggtcttcatatgttcaggttagggcttctcctgggcacagaaagcagcctatccagaaggactgggaggaagtggagggaaagagagagggagaacagatctcttggcttttagtgttctcctctgtattagtttcttagggctgccataacaaattactgcaaattgggtggcttaaaacaacagacatctattccctcacagttctggaggctagaagcctgaaaccaagctatgggcaaggccatgctccctctgcagcctgggtgagagggatgggcaggtggctttgtctcatgcctctctcccagcttctggtggttaccctgaaatccttgccactctctggcttgtagctgtgccactcctttctctgcctccatcttcacagaatgttctctgtgtgtctctgtgtccctgtgtcttcacatgacccttttataaagccaccattcattggatttatggcacactctattcaagaatgacctcatcttaatttgattacatttgcaaagaccctatttccaaataaggttacattcccaggtactggggttagaacgtcaacatccttctttgagagagatacaattcaacccatgacactctcccagtgccaacctcctgcccagaggaaaatcaatggccactgcacttgcctatctgttcctgtctggagaagggatgatgagttggggagcaggaaggcctctggaaagctgtcagtgggcttagaaatttaaatgcaagggcagattataagggagaaaaggtagctgacactaggagggaagactgagtaaggcgctgtctcacaaaaaacatgttaagattgtccaaaagcttcagaaaaatattcaagatttttggtggtttgcctaatgtttcctgtggaactaggcatgtactggttgggagctgtatccttgggaggaaaaagcaaaatggatcaggtgcctgtttcagggggaggacaggacaaggaagacatactccttttcaagatttgtccccagcagggaatgatgttaaccagggccatgatttgagaggaaactagggggcagtctctatcattttcctttttaaagtgacgtctgttcaattcaggaacctcactttaaatgacagtggtctgagagctgtgtcaggtggctactgtttctggtatatgttgtattttagctaatgcgtgggcgggtctcccagtcaggcttctctttgtaaggagactggctcttctgggacctgggcacaattcaggcggccagaatcaagtttgtcctgccccgtgaggaagtacaggacaggaatttctggaaggagctgccagagccccaggcttggtactttccctgctgagtctgatttagtgatagctggagctgatgttcatagtctaaaaataaaatctgagcttgtatttttgctcctcttactgttcaagatagactggccattgatgagctctcataaatggagacctctgtcttcctccctcttggatcacattattgcttgtagggagattgcaaagtcattcctggtgtcctcttcacctctctgtgggttttggcagtgctggccagctactttgaggcattttggcaatattgagagctcttggtccccagtctactctaagtggattggaattcttagaggccattaaacaaatctgccctttgcccctatgtccagaacttttacaactaacttagatcaagaatggactgttgctgggcacagtggctcagggctgtaatcccagcactttgagaggctgaggaaggcagatcacctgaggtcaggagttcaagaccaacctaggcaacatggtgaaatgccatctctactaaaaatgcaaaaattagccaggcatggtggcacatgcctgtagtcccagctactcaggaggctgaggcagaagaatcgcctgaacctgggaggtggaggttgcagtgagccgagatcgtgccactgcactccagcctgggtgattggggtgattgggcgagactctgtcttaaaaaaaaaaaaaaaaaaaaaaaaggaccatctgaagcaagaaaactccagaagatagtgaaagtttgggtatgcattgcattgtggagtaggatctggtacttattgtctttggtgtaaaatctctgagtctctgagaaagtagaag

SEQ ID NO: 61654 - DNA, 2098 bp, Homo sapiens
agccctttcaacgtcgcagggcttgtcagtgggttctgtgacagaaccgtgcaagtaatggtacgcggagagggcgcgcgaaagcgcctggctcgttcctggagcccgggctgcggacgccccctgcgtgctgcgaaacctgaggggtctcggtccttcctggccttttataggccgtgcctagaaacgcttggcttgaccagttagaagtaacgccacgctgtgaatgtttaccacctgcgcactgtcagcgctgagtaaaggggcccgaacccccggttccaggagcccctgctcgcctctccagccaccttcccaccagcccacaacgcacaaggaccacagcttccagaggcgccgtgcgctctctttccaggcgctttccccctgctggaatgctccaccccttccgctcggcgaactcctattcatccttctggactccttcccagagctaactacagacctgaaagatttcttcttctgcgctctcagggaacaacagtccttaaagtccagctcacgctgctgtgctgcagcgtcgctctcggtcccctccactgcactgggtctccccactgcactgggccccctcttcactgcacccggccactccaccgcacccggtaccccggccctctatggcacccagttctctctcctcggcacccagttccccgcccccacctccgccccaacggcacccagtccctcgcacccagcaccgcccccgtccctcgcacccagcaccgcccccgtcccaccaacagcacccagtccccccgctccgccacggcacccagtcccctcagggcacccggttccccgcctccgccaaggcacccggttccccgcctccgccaaggcaaccggtcccccccccccccgccccccgctacggcacccagtcccccgacggctctcggtctcctccacgccgagcctcggagagcaggggctttgcttttccggctgaggtgttcaataaacatctcttaaacaaaggagtgcgcaagtgagataatataaggtaagtgcttgccactatacgaatgtacagaaaggaagatgttattattttacttcagccccatatttaattataaagcatttgtgagcaaagctgattaacactgatttctaatttctagcgtgagacatgacgcttgggagacaagctgtaaatgagacgtggggcttatgttttcggtaggtgagatttaatgtacacaagggtaagagtaggaaacaaaagtaattcgaagttaaatatggtctttttggttaaattctacgggttctgggaggagggcaataccatttcctgctgaggtgagtttgctcacccattgccataatcacaatcgtaataaaaataacattaataactacaattgatcgagctctttgaggcggacatcgggttaggcattttggatccaatttctcatttaatcctcacgaccatcttgagggagcgcattttacccgtgttttacgggggactgaagcttaaggagcagtaacttgcccaggtcacgtggctaggaagagacaaggtcaggtcagagccacaagagggcgctcttcccctttctattctatgttgtcctgtggttcccgcttttcctcaggggcaccttccacaaatgtaaaaaccccacataaacatcttgtttctctgtcttcctcctccccagtgtctctctctcctctcagtctgtttgtctcctctcagtttctctctccctttccttacttgttttttgtctctctcttcctccttgttttctgtttatttatctatttcaggggatgggcagccttgggaatatgggctgtaggtaggaagagaacatttctggaactgaaaattatgctgcatcttgtctaacgggaagcaaaatttttgaatgtgggaatcttgtaaaatctagacgttggtcatcaatacacatggcatgaaactgtaaaactatgagcagctgtggtgagttgtgactgggaagccacatggggtgtgtatgagcacatgcatttgcaagcttccctggagcttcctccaggttactcctgggttctgcctttccctggttac

SEQ ID NO: 61655 - DNA, 753 bp, Homo sapiens
gaatactaatagtaaaaaaatagggatgtttctcctcctctctccgctcttgaaaagcccagtacagcccgctcccatgcatcagctgggctgggcggccacacctctccctccaaggctgattcagcagtgagtttcgtaaagctgttctgacgcttgagaagtcctcttaacactaagcaggtagtggattatggttgcttacttgctttatttatttatttattcatccttttgatgttttctttctaataagaggtatatgagtcatctgttgtggactttattttgtgaaggaatgcttggcatgataagaactctgtagaagttaacaagttgaagaggaaaaatgactcatcaacaccgacattttatatcactgtgtggaatgaagaaaaatactaccacaaaatggagttgtgggtgatggttaggaaattagacaagagccatataaacagaaaggcacttcttttagttttctttttttaaaagtttttttttacttttgttttttacaataaagaacaggacaaaatgcatttctatccaattgaatgattttagttagtgaatattttaaagagaaagtgagtagggatggtggtagagggttggagaagactcacagggtaataaatcatagcaatttagagagtacagtttgggactatgctaccatggactagataagggtattaactgggagctagacctctgggtactgacaccatgggctaaattaagtgaaga

SEQ ID NO: 61656 - DNA, 649 bp, Homo sapiens
aatggtgatacatcccagtaaacccattttaagttgaaaatcctgtaagtagaaaatgcgtttaacacacctaacatacccaacatcatagcttagcctaacataccttaaatgtgcttataacaattaatgttagcctacagttaggcaacattatttataaaaagcatttttttataataaaatatggaatatcccatgttgtcttttcactttgttgcttgtttcctttgctatgcgtaagctttttagctttatgtgatcccacttgtccatgtttgctttggttgcctgtgcttatcggatattgctcaagacatgtttgctcagaccaatgtcctgatttccccaatgttttcttatagtagtttgagttttcatagtttgaggtcttagatttaagtctgtaatctattttgatttggcttttgtatatggtgagagataggggtctagtttcattcttctgcatatggatatccagttttctcaacaccatttattgaagagactgtcttttcctcagtgtatgtgcttggcacctttgtcaaaaatgagttcactgtaggtacgtggatttgcttctcagttctctattctgttttgttagtctatgtgtctgtttttatgccagtactatgctgttttg

SEQ ID NO: 61657 - DNA, 435 bp, Homo sapiens
attataaacaatgatggcaggaatgcacaattttctgcaattaaaatgcccagtatattcaattcactggattttaccctgtgaccactgtgctgtttctctctatgtgaagaaatatactcaattaagtgttgcataatgtgagctttgtcagtccaaaaaattttttcaagttgcttgtggtgtcattggtatttattctgcaacgtcagcagtgcttgccggccaaatgcagagtgcaggctgtggttgaagcaacttttttttgttgttgttcacattccaacattcttaagaactgcctgaaaagaaatgttggaactgctttctaaaagtacttttcagagccgtgcactattggagaagttaagaaccttacagttccgaaggaaaaacaaaaaaaaagactgtgggaatctcttttattcctacttt

SEQ ID NO: 61658 - DNA, 919 bp, Homo sapiens
gttgctcctgctcaccttggtatacttggctcccagtatgagctttaacactgtccccagtgccagtgatccaagcacacaagctagaaaccacactgtcttttatgactttgcttcagaaattgcactccatctaggcgcctaatagaagcctcataggtgtttttggtttgtttttatttttttaaaatcaatacttatagtttctgccattaattaactctgtgcatttagtcaaatcattcccatttctctgggcctcagggtcctccattttaatatgaggaaattggacaaggatattcttagcgctttccaaatgataaaactcaatgcgagaggttgggcttcatgtcccagtctctccaatgtgaagaattcatattttcttcacagtataagaagagtgagtttgtttttaagagtactgtttacacatgtttgtacaaatcaatcaacattcccatctctactgactcacatggcctggaacgcaagttcacataccaaagagaactgagaagggggatgggggaaataactctccaatttatctaggtaagagcaccactcctattttcactccatgagtgttatgcaaggtcagcctccccctctgcagaatgggagagttctggatgacttctctgaacagcatggggtcaaggatgactgccaagacatcagatgtcatcacacctgcctttctcctggatgtcttttcttatcattacagttgaaatgcaagagaaaccctaaaagaaatgtgaagctgagaaggacacagctctctgaccatgaccacaggaagtggtaagtgcaaacacgttcctctgatggtttcacgtcgttgcctattctgtccagccctgatgggtctgagcaaacacccatttttaagagaataagaggcctgaca

SEQ ID NO: 61659 - DNA, 1734 bp, Homo sapiens
tccccaataatactctaaaactgccccacagcttttttaattttgaaaattcaaaaccattcaattcagctcgcagatttttgtgagaaataaggagatacttgcagctcagaaaaaattattaacaactatctagaaagttactgctttatcccccactgtaaactatactaccacgacccgggatccttgttcgactcctagccaaggggttcccactgcgtttctgttgggttatcccaaacctgtgataggatagtagcgccctccctgcctccggtcgaataaacactacaacgtctgacactcggtgctgaaaggaaatcgggcgcggtgtcttgcccacagcttggggagcggccccgggcgcaataactgtcaccggcgccgagatgcggttccggcgcttagggcgccgctaaactcagagcccgggagtcatggctgcgggcggtgccgccccaggtaaatcagtccaggagcagggcccgggcctggcgtacactctcggaaaaatgggggccagagcaaacaagaagagcgaaagcaagagggctaggcagccagaggcggcagcaagactcaagacgccaacggcgccgtcttcctggggccccagggcctgcgccatccctgggctgccggggcaccgcctctccacgcccctcgtccggcggcggctgcgactgcttccgaggtcatgttcccaggacgggcgcgtcttcagggtggaagcctggcgcacgtccggaggtgccgaggacccaaccagcccaaactctgggggaaatgactcccctctgccctcgccccgcgctctgctaccatttccttacgtctctgcttcgctcagcgatgcaaaacgcgcgaggcgcacggcagagggccgaagccgcggtactctccgggccaggcccgcccctcggccgcgccgcgcagcacgggattccccggccgctgtccagcgctggccgcctgagccaaggctgccgcggagccagtacagtcggggccgctggctggaagggcgagcttcctaaggcggggggaagcccggcgccggggccgggtaggaaaggcgggggaggggctccggccgtctggaaggaatccacgcggcttgaggctgtgggggaagtagggtggcgagcggtccttctgcgcgcggggggcggggggggtggggtggtccattagggtcccctggcgagggggcggctttctagtgtgtgagggcgacgccctagaagctccccttcaaagttggccccacgcgctgaatgtggaaagttgactgggacccagtagtttcccatcccaaacctgctttccgagaagggcttcaaacccaaaatgtgaatcccgcctcccctctcagccagaactgtggactcgtcccggggaggggcggtgggtggggcggggctggcgggaaatttcggttttggcgcgctccctgcggcgacgctcatcgtgcgctctcctcttcccccggtggtctcctcgctcgccttctggctctgccatgccctgctctgaagagacacccgccatttcacccagtaagcgggcccggcctgcggaggtgggcggcatgcagctccgctttgcccggctctccgagcacgccacggcccccacccggggctccgcgcgcgccgcgggctacgacctgtacaggtgagcggggacctgccggcgaggaggctgggaagggccggccgtccgctgcca

SEQ ID NO: 61660 - DNA, 889 bp, Homo sapiens
cccactggagaagcggcggctccgactcccgaggaggcggcggcggctgctcccagtcgtggccgctacagccactgctcggctccgctcgcagctgtcccagctgtggctcctgtccgcttgtggcacccacagtctctgccgcggctcccgcagccccctcctttccccacctcttcaagtatcgtccgcgcagcggtttctcgcgagagaaatactttttttaaaaaaagaaagaaaaagaaaatgacaccccctccttcgtcgccctcatcaccaccccaccccccggccccatccatcctccctttccactcccctttgccagcctccgcctcggtgcggggcctctcgctcgcaggattagcgcagtgggaggaggcagaggtgatcaggtcctgcccggcctgggactttttgtcttgaggtggggaggggagaaatgggaagaggtggagtagcggttttagcccgctctgcggctgcgaggtttagatccgagattaacctctcccgcgataggtgaagccctaccggagcagaaagctgttccacctgcaccaagaatgcgcgctggagacggttgccccggaggccctggcccgagagaaaaccagtccccgctgcccgcgcctcccggtagcgcgctccctgcgcctctcccgccggacactcagcagacgccggaggccgggaggctaagactgggcgcgtcgcaggccgggaccgcggcagaggctgctgtgccgaccgaggagagggctctgccgcccccacttgccctgggtgtcgagagcccactccagacgcggctcttctgaggctcaattcaagccacccaggcctgaatccagggtgctctctctaagtcggtgtccaacccaggggc

SEQ ID NO: 61661 - DNA, 535 bp, Homo sapiens
agtgctgccaacaccaggcagaactcagctgagacccacagagagaacatttagatcacccctaatcagaagggaatcacccatcccagcagttggaacttgaggttcagcaaccctcaccacaggctaaagtgctatgggatcctaggtaaacttgaaaggcaacataggtcatagggactgcaaatcctaggcaactcctagggctgggcttgaagccagtggacttggagattatgcaacctagtgacataccagctggtgcagctaacagagtacttgcatgacctctaccccaaccccaggcagggcagctcacaacaatgaaagtgaccgctcccttctgcctgaggagaagagagggaaaggtgaaaaagactttgtcttgcatcttgaacatcagcttagccacagaaggatagggcaccagtcagagtcgtgaggcccccattccaggccttagttcccaaacaacatttctagacatatcctgggccaaaagggaacccaccaccttgaaaggaaggatccagtt

SEQ ID NO: 61662 - DNA, 750 bp, Homo sapiens
taattcttcctacaacacaaaattattaaaaataattttcactattttcctatatgaagtaatcagtcattctgtttcaaaatttgttttaatgatcaacaggaggcaaaaaaacttcttcaaatatattattagtacacattatactttataaaggtcggcatatatcaggttttcaagtaaagcctaaatgaataaatgaatgagaaaacaaacataaggatttcctctcacatctctgtctcttagattttgtcctccatggaaagtggtgtgttccttgggcttaaatgctgatggcggcgctttctggcttactagagtacaggacaaagtacgctggtttgccaagaacaggttgtactttagcctgccggtggtgaaaaggtggaggtaataatggaactcttctcccatattttcctccccctccagtggaaaatgtaaatagcactggaggaggatatgacagaattgcagcaaaattcaacattccccacccccatagatgaactgatctctgggatacacccaaagatgaaaggacatgccacttgaaggaggtggcaggcaagctggcaggaagtgcagggccttggctctgcaattagacagacctgagtttgacttgccaactgtgtgaaggagatggtgaacaactcccatgggctggtttgaaggtggtccaaccacctctattatacagagaaacccaagattcaaaaaggtgatgtaactactgcctaattc

SEQ ID NO: 61663 - DNA, 1064 bp, Homo sapiens
aaatagggtaaatgtgtatgtgcatgtgtgtaactatatgggattacataaaatatagagtgtgtatgcaatatactcaagtttcttccaaaagaaaatatgtttgggtgtaataaaccacgggagtcctgagtccaggtagaacaaacacactgtcgaaatcatcacctttctttcaaaaaaggctacacaggctgaattccaggcaaatggcagagcatgggagaggcagaggaatgagttaagttgattaactgaaattacccaagaaaacctaaagaaaataagaaataagaagaatactgagaaagggctttgaagtagagaaaaggccttaggcttttgctgcctgatctgtagtataacctaaagcccaataataccttaaggatactaacacaaggtacatcccataagagcaccaatacataactaccttgaagcaaagagactctgaagtctcccattttagcttaaaaatccatgtgaattttgtattctatttcataatgaagctgtgtttgctttaaattttttctactaaatttttgagcaaaatgaagcttctggaaactagtccatgtttattcagcactgcaaacctcctggcacactgctgcgaattccaggccagcttgagaaacctggttctaaagcgccaaagtaacgtggcaaaaacaatgaatgagctcatattaatgacagcatgacagtaatgacagcaagaaggggtggggagacagctaatatttatattctggggaggtcacaatagtgttaacaagggactgggaactagcaaacaaagttaaagaaaaggtaggtataaaaaaattgtaaagaaaaggcagactctgccaataatttgattttatgtaaaaatcaattaaactatggtgtatcctattgacaagttcaggaaaacagatcatactcataaaactttaaagtttaaagttttaataccaaaaatcaaaaaagattgagtagctcaatgtttgccatgattagcttgagtagttcaagtctgatatgggcagacatttttcaagactgagacaagt

SEQ ID NO: 61664 - DNA, 957 bp, Homo sapiens
ttaaataaagaaaattaaagactgaaaagtttatacaagtcaaactcctcataggtcttatagtagagctagccccatctccaaattttttaaattactgttgctaagaaactataatcactaatttggcactaccattaagttatttaattaacttccaaatgtcaaatttagacaaatgtgtaactgactcaacttgaagaagtgcagagtgttaagaaaggtaaggaaaggtttttatatgcagaaagaccaggagatacaaatacaacttttcaagggaactgaaagagtaaacactaaggagatgtcaggccactgctgtgaggttcatttactcaacctaaaaccagttatgtcatatacactgtccacttcctcattccacaaaaaacttaagaacaaagagaggccatcctcatatttgctgttgactccttcaggggaaaatgaattctgggcctccccctgtaactaccctgccgtcccagtgtacgatggaagcaacaatatgaagtcacaacccaaaagtccagttttctctttggtatagcccaggtaagccagaatatccagtatgacctttcccctactaattaaagggaaacaaaaagtaaaacaaaaacacttgctgccacactctagaattacactggctcttcaatatgcacaataattagaagctatttagtgtgccagacagtatgacaagagtaattcagtacagtcactatacgggtttatattttgggatttttgttttttgatactagcatttcatctcagaattctctagtacctataagcacttttttcattctcatatttatatacatactatacaaaaaaaactggcaaatgccacatgactgaacctgatatctaagtaattctgaatataaactaatttatatcagagttgactaaaaactgtaaaatcaaaagaaaaaagttgat

SEQ ID NO: 61665 - DNA, 777 bp, Homo sapiens
cagagttggcaggagaggtttggatgagaagcacagggaaaagattagctttggagatagttgctaaggaagagaagcaaggagaacatgggcagacttagagctgtggaggggtgaagctgaggataacatgttggatcgcctcagtcttcccagtgaagtgagatatgagatcatctgctgaggctacaattgggggattaggagtaaaaatgatctagtgtagcctctgacagttattcattctctggctctgtatttgaggaagacaggactttctctaaactagcatttggaaatcctcaaagtaaatgctctagtgataagggcagaattgcattgctggttccaacaacaataaaacattacataccaaatagcacaacttttcacactgtatggggcagtaagccatttgttccgtggcttgaactttgatccgcatatctgaaacaccacctactggtggctgcttccctggaatttcattgtaatattcatgatcttctctctcctcggcatggctatcaatatgcacctcctcactgtgaaggaaaaaagaatcctcaagaggctgggcgaaaattcaaatactgtaagggatgcaaggggatcagaaccaagcaaatcatcctgaaaaactttgcattcatgttttcagtttatagctgtgcttaagtgatgttaaacatttggatgggagcagtcagatggttgagttgtttagctttctgtagacaaaacggggtaagccaatagaaagtgccaagggtgatg

SEQ ID NO: 61666 - DNA, 1374 bp, Homo sapiens
atgtaaatgcaaataaaaagaattcaaagaatacacaccgcattgctaatagtggaaagatacctcccaggcgaaaagaaatgggaccaagtatttcttcactataactaaaaaaaaaaaaagtacaatatatctgttgtttgtgaatttaactttttaaatgaaaacactaaaaggacaaaatggattagttcttaatatgctgatctgtggttatggatgttgtctggtttggagacgtggatttacaagtcatcagtacatcggtaaattgcccaggggaagaggaagggggggaaggagcattaaatgttacgaaggccatgtaaggttattttccggtttgcagcattacaagcagcagtagggttaagtaacacagaaactgttacgctcttgcatgcagggtccctagatacgaagttcgaatcgatggaaacgtagctcaaaaggcgacgccaacaccccggagaaaacactgagctactccaaccacagtggcgcgccaagtaggaggcggtacctgaggaccacgcctgcgcgcggggttacgcaagcgcgcagcctttgcgcacgcgcacgaacgcacggccgcgcagcatctgtcttgctggaagctttttcctagaggttgagcggtttgcacaatgtcggaaatggctgagttgtccgagctgtatgaagagagcagtgacctgcagatggatgtgatgcctggcgagggtgaccttccgcagatggaggtaggcagcgggagccgggagctatccctgcgtccctcccgcagcggggcccaacagctcgaggaggaaggcccaatggaggaggaggaggcccagccaatggcggcgccagaggggaaacggagccttgctaacgggcccaacgctggggagcagccaggccaggtggcgggcgcagacttcgagagcgaggacgagggcgaggaatttgatgactgggaggacgactacgactatcccgaagaggagcagctcagtggtgccggctacagagtatcagccgctcttgaagaagccgacaagatgtttctgagaacaagagaaccagccctggatggcgggtttcagatgcattatgagaagaccccgtttgatcagttagcttttatcgaagagcttttttcactgatggttgtcaatcgtctgaccgaagaactcggctgtgatgagattattgatagagagtagttagatgctgttaaaagaggaggaaactacttgaggagggacccaactttccgctatcttttgggttcattccaaatagttttgtgccattgaaaaacttgaccttcaaaaaaatttgtttttcagaatagaacacaataggacagtgactgcacagttgtga

SEQ ID NO: 61667 - DNA, 712 bp, Homo sapiens
atacaaaatgctaattgcagacgccagatagcgggtatataggtgtatattgtaccattcttccaactttttagcatgattgcaatttttcatagaaagatttggaggaagaagttttttttgacatatcctctcacagatcccagtctgattatctcagaatgagctctcagaatgagctcccagaggtagcattgccgggccccgggctgcctgtttttcgtctgaaaggcgggcggcggatgagtttcccggatgagctccggctgcgtgagctccccgcgggcaggcgcagcgccccctcggtgcggcggcgggagctgcaggccgccagctccgcggccgccccgggctgtgcccttctcgagaagcccggccgggcggcggggagagcgtctggtccgcgctttcgcacggtctccctgaaaaagaccagcggagcaccaggctgccaggcgcacagcatcaaagctgcgggcgccccgagaagaaaagggccagtgtgcattccgtgaaactccaaagcccttctccaggcacagcgactcggggggaggggagagggggctggaactgcgctttcacagtgtgggcagtcaggccccgggtgccccgccgggacaatagggcctcagtgctggatactaagcggcccgggggcctagtgggagcataaagggaagctgtgtctccgcagcactcaagttcacct

SEQ ID NO: 61668 - DNA, 1752 bp, Homo sapiens
tactgggggggaaactattgttttcgattacttttaacactgttatcatccctgcctgctaccacctactagcatgcataatcaggaatttgatgcaaataaaaataaaacagaacactaataggactactttgcgaatatgaaaacgggttcgaaaataagcttatgctttacacccttaaaatagagctagctttaaaaaaaaacccactaattacaattctttgcaaaataactggataaaaggacaaggggaaatcgtagtatcgtttcttaaaagaaacacctccgtaaaaccactgcaaaaacaatgcttcgctccattgaacacagacctaaaaggcccgtgacttcccttcatctgtagttaccacacattctcttacagtctttctgggtgagaagccttcaaacgcctttccaccttgaaaacacattccagagctgaagggaatgggggaagcggggagactactagaagttataagccctcctcccaggagagcagggacaacttggagccttctgaccccttcaccaagcaggggagaagcggcaacggcgagccctccgcctgggaagtaatcagggttggaaaagcccccaagtcccaggcagcagctggaacaatgaaggagagctgggagctgccaggctcccaggtgagggggtctgcggccgcaggaccggcccccggtccccacgttcggagaactgggcctggcctgtgaggaagcggcgaccccaacccccggctcggcgggcccagcccaaacccgcgtacctgctccgtgggggctcggtccatggtgcctgcagccgcaacgggcccgcgctagtcggtgtaaacagcgcctcgggccgctttctccatggccccccgctcgggtccagactgggttccggacctccgcccctatctggctggccgcgacaccgattcggctacgccactggccgaggaggcggctccagctccgggagatggaggaggcggtggcagcttcggggagggatcatctgggacggaagccgaggagggcccgaatgggctggaggcgtagttagaaatggaggcgcacggaaggaaaaggagtggggaggaggcagagaggggcagtgggcggagtgacagcaaatggcctcagcaagggtaggaggaacccggcctggcctggaggctaaggccaggtggaggcgcccaggagcaggtgccccgaaccacacgccacccctgcgactgttaaacgagaagtgtcagaccacttgggacccaggtctcccgggacttcaaagacctcttcaggatctgaaaccacctcttagtgatgttggaaaagctttcatctgcccaccgtacatctgctccttccttatgttacgcaaataaagggagtcatgactataaaggaatgagaatattctgaaaataatggagtcttgccctagaaaaatgcatatgtaaaacgcatacacagaatgactggaagaggcccgctaggaagctccccacaaatatttattgagagttaattcattatccaggttcatgcccacttctaggctcacatccaggctgacctcgcccatctcagaaatcctaattttatgcaggatctgtataacaccacccaacgggtaattattttatcttcagatccttagctccttaagggcagagactgtcttgaaactgggcactaccgttagcatggcaaatttcttctgggcatctcctcagacacaccctcc

SEQ ID NO: 61669 - DNA, 1967 bp, Homo sapiens
ttaaaatgcaaaaaactgaaaatatatacgaaaaagttatagactaattcaaaacaatgtattaatattttgacaatctctggcacttaaaatgagtcagacgtcccaaaacatctatttcgtaactttatgataatgcagcatcaccataaaagaaccatatgaaacacccccaaaataaagaaacacagcaaaattgacgttaattctggatcaagataattttctgagtttccacacgatgtttttgaatagcaaacgttattcaaacttgcaaatccattaataaatgaagctttgaatctttaaaaatctccattcggtcagaaaaattcgtttatttctatgctgttgctgttttaaactttgtatactgggaaatttctaagggaaaagccatgggttcaattatctttcacccgtcctccaaaaacaccacaagcaaaacctcctccccagcttttctttataaagaactgaaaaagtggttcgactacctttttttcagttatctttgctctgaactctcccctacacacttacctcggaccaaaactggccctggcaagactatttaagctatgtctccaggagactcacaagttgcgtttcgcagtcaggcctgggagcagtaaggacacccccgttttctgacttctcctagcatttcgcacccgctcagttccagtgtgaagaagtgggggcccggaacgctgggcccgaaagggcaaagccagggcctacaccgcagcatggtcaccgaggcggctagcgcggtggggaggcagaagacagagaaccgaacgcctgggaccaggggcatccgtgtaaaccgaagaggcgctcagactcggagggcaaggcccggggcccccttcgctgcctcctttgccctcccttcccccatgctggagaagcagggcccgggcccggtgcgggaacggggaggaggtaaaccagtcctgtcaccgcactgagagaggctgtaaacggcacatgctctacggggagaggccgcgggcgccccggcccggaccccgaaaacaagacacatcaccaccctcagagttccattccctgcgcctcaccaggtcgtagtcctcctcatcatcgcacatgaaatcatcctccatgtcagacatcttggccgggagggggaggagaaattggagacaacctcctcccacaatcctccgcggctcagaggcgtcactctcagcttctttccgccttccagtccctcttagaggagctgtttcctgccggaactaattatctcgacttgtagctgattcgctacgactccaaaagagactgcaccaccccccgtttcctccgaagtggttggtgccttagcaactaaagctggcaactgggacatcgtccggtgctgcaggtctcagccgaagggcgtcggaaactgcgctcgcatcgagcagtttccagcctcctgggtaaaggagcagtctcctcccttgcttgggactctggacgcatctcattccggtgaaagtaagggacagcttaggaccagaagcctttcgcggagaaaaggctgacatgcccgtcctatatgacaggtattatttctgctatcattgtacgtgtgcatttagcccacacattgcggtgggtgttcctaagatacttggagtacttttcagcaacacagtttacacttaatgcttgttatatttgtagttgacaaaacaattctatggatatcctaaattaggtatgcagctatcagttgagttgccttaaatcttactcagttgttcaacgagttgtaaactgacctttacagcccttgggaccaaattaaggtaacaacgactggtttttaaaaaatacattactgtgaacctgagggcatcatgttgtaaggagatgggggctgcggtgactcgcgggatcaggaatttcaagagaaccgagcggaaagggaaatccgcaacatgaagccc

SEQ ID NO: 61670 - DNA, 1318 bp, Homo sapiens
tttagtgttgtttggggagtagctgctgaacaataaagaccaaaaccataactaaaaaacaaacaaacaaacaaaaaaacgcagcccgagacagatcagaaactaggtgtatgtagggcgccaggttatgacactgttctctgacatccacagggcgcaaaaagaaaacctcactagtcagcttcgcacgtgctctgcgcaggggctcctgcgaggccctagtccctccctgggagctaagagcaggacggaggctgtacctgactgctgcttggagggaaccctggctgagtccagggaggaggagccagaggaggggccgattggaagcagccacctcagcgaagctgcaggatttccgcagggcgggagctgtttatctcccggaagaaaacggctcctgtcacagaagtctcgtgattgctctgggagctttgcttagacacttgaaactacaggagaaagaaggatctagcgaaatatggctacagagagccctgctacgcgtcgggtccaggtggcagaacatcctaggtgggggagaggagacgccgggctttgggatctgctgggttggctacgtgtagatcgggtccacagcacttggctcctcccttggggcgctgcttttggtcccggggagcaagtggaacccttgggattctataaggacacgtggctgggcttgcaaaaaagatcacgccgcaaacacattctaccttgactactacgaagggttgtatgtttttttcttcatccatgcagattcttcttttccttttcttgttgtaattagtgtactctttctactgggcttcagcagaaatgcccatatccacactgaactcctctctttgtctcgcatgccagttgatactgctttttaaaagtcttctttctaaatattaattgaaaacaaacacaaaaaccttcttggtgtctgcatcctctttaaaacaaaacaaaacaaaaacacgagaatctctgaactgtcacttagggaattaatttgctggcagtccctagctacacagtaactaatagtttagtgatgtctcggggaggatcttttcagttacaggtactttgtagaaatacttcgttctgactaatggggctgaggtctcataaaatgaagtctgtcacctgctacattagcgaagggctttcctgactctctgcttttgctgtttttcttttcttttctttcttccttcctttcttttttctttttctttttctttttttttttttttttgagacggagttttgctcttgttgcccaggctggagtgcagtggcgccatcttggctcacc

SEQ ID NO: 61671 - DNA, 1260 bp, Homo sapiens
acaaatgcagcaatcactatgtgaggtaaaaacacatctatacttttaaaaaattctgtcagtcacaggtttgaaagcacaagatatttgatagcattgatagtgatgctagtcctgtatacaatttaaatagaatccatcaggaaaagcaagagatcaaaactttttgcttttgaagtacttcatcccttatccttgaaagcttagtgtgttcagcagttcacgctcataggccttcttagaatgaatcatgtaacatttttcagcttttctcccttttctttattcctgtctgttattgttttgctaggtggcagtgcttatctcaattcaattttaagtttctatagtttacagcgttaattattaatttttcatatttctcatttattgtacatgtcactcaactagctattcatctgtccaacttttatgatattgctctataatgaaaaaagaaaaatgttactttcttgctaataaatcttcctaattatctccattcactgtttcaaaaataatattggaatttttattccctttcagaagataaatatttaccatgccttaatgttattaaggttaaatcacaggtgatattttattgtcttctaaatacttcattttcaaattttctacattaatatatatgatctttataatcagaataacaatagcaaatgtggtttaaaaaattatcttcacattcagtttttatggagctggaagagtgggatgttggtgcagcattgatgtattaaatagcatggtcttctacataaatgatcaaacctggcacccacattgctcatctcattcaattaactaaacttactgaaactccataatttcataataatgtagtcattgttaccatattttagtggtgactgtgtcctgaatcttcttcttgaatctgttcctttatccagtaatcaccaagattgctcaactcttcttacctaatgtccctcagtctcatctcttcctcactactttcatgacctcattaaattgtacctaaagtttagcaatagcatcctatttgtttttctgttccaagtcctcgtctcaattcctgtttagttacctaatattcctaaaatgtcatttaaactatgtcaattaccaattgtagaacccatgttgtctctctagggctcactgaatttgggtaaaattctttaaactagaaatcaaaaccatcaacaaattggttccatccatctggtccaatctcctcactgttcacaaacttca

SEQ ID NO: 61672 - DNA, 2104 bp, Homo sapiens
aacctaaatcattcttcaaggccttacccaagtccgaaaaagaagcctttattgaccactccattctcagctttcttgaaattcctgtaatttattaaattccattttttatctcagtagtaagaatattgcattttctgtacttgaatttaacatgctttacttgatatcgtgagcacttctagggcattgtaatgtcctttatctaccacttgataaattcagagtagtcaataaaacattgctcaacatttgaccattgtgttttaaaatcttagttgttagagtgcacttccgtttgcgcattgtttggggagaggcacggacaaatgttctaataacttatccacatattatacttcaaagtggaaaaacacaaagtactcttaactctatatgcgtgtttttatgcaaactaaatcattaagatacaaatgatttttctaatagctttcattaccacacagcacacgaaataatgatattgatatagccacgaaagactaatgtaaccaagttctcacaatcaaaatatctttgaggtgggcaaaatgcaaacttttctctgggatcaacatttcttcacaactcactgcaactacgccttgacagtatgtttcgagaaccgcttcccaattttgttgtcccagcaagaatcgggaggaaactgggtgaaaggctgcgaggcttgaggcgggtcccggacgaacgcggccctgcccctcgccggagcctctcgggagaagtgcgacaccgccgctgattgagaggctgaggcggaacttcccgtctaaccccccccccgctgtcgtcccagcctgttgcttaagccgcgcggtgtgcggtgtgcgcggcccctgccttagcaacgacgctagtaactgcctggctcctccctctggtgtctcccggaaagcgctccgtctggtccgtgcgcgatcacggcccggcgcgtggctcgggctcgggcggagctggagacgtgtggagctgttcgaggactcgcgggtgtgcaggtctgagtaccactccgatccctggtggaggtccccgcgcctctctggagaccagtggtctggccccagaggtgcggccgcgggaagtggacattctttgtcaggaccctagcggaggtcgcgctgggtgtcgcctgtgagggggatcctcggtttctgcgcggtctcttgctttttttaggatcttgcgggccctttgggaaaaaggtttccaaatttttcctcaaaaaaaaaattatttttcctaccaatgattttcggtgcattccgccccaacgaaaagtatgtcctggcaaagtcagttccctaggaaccccatactttattttattttatttttagtatttggagtggtttgtgggggtttggttatcacggaaggggaagcgtagtacagacgtagaattagtgatgccatgcagtgtatttaaaatattgaggttgtggttacataataagcaaaagagcctgtttcttacgtctaaattatttattgggaatgtaggacaaataaggaagtatattaacattttcagtcgccaggcccacaaagttggatggtaaaatcaatactgtagatcgcagcatgtaaggactaacccagtgcaccatgaaaacgaaggcaagacagtttgttaccatatggcgggtggtgtgggagaggccattgatcctatatgaaaaagggtactactaccttggattatgaaaaatgaatgttggacctgtaggtcctatgtgaccaagttcttaaaaacactctaaagaaaattggaagtggtttttttctaatactgaattggtccacaatataggacaggggagtctgtatagtgttccattgggaggtgagtcagcttacaataatggaagaggtagaagctttttgttattattttggagaaaaaaaaattgccagcctgccacttgtgctaggctgcagacggcccataaaggtagtttgtcagatacttcagtagtgagatgcttactggatgtgttttgcagaatggttttgatttagttaacaagtgtttgttgagttcctgctgttgcataagaatcaggaataggtgagatcagggaag

SEQ ID NO: 61673 - DNA, 513 bp, Homo sapiens
ctgcagtttattaaaaattttaacttgcccttataaaccttatgggaatctgaattgagatagccagagatatctggccaactaatcattattatttcttgaaatctggatgtttatgtatgcagctccaagctgatttgtattctgcaccagttacaggaatagatctgccaggaagttttgaaattcaaggacagatagggttaagtcatagccccaaactacagattagcccagcaaggtcctccaaatcttttgcaatacacatttggtaatacgtgggtcatttagttctggcttccaggcagttcagctaaaggcttaggctagagaattgcaaaagcttatgatttctcaccaaggaatgaaatgtgacgcagtagagcaaactgcagacatttaataccagatgttaatgtaaaaattggaaaattgtgaccccccccccccacacggttatctgacccatggcctgcagaattccatcacaaagtctgtaagtcatcattattc

SEQ ID NO: 61674 - DNA, 566 bp, Homo sapiens
cttgcaacccagggatgaaggactgccctcctaacttattataccctccttgcccaggatctctaagtaaaaatatttgaacttatttcttatcatggtggtgtattgaatttacatcttccatctgaagaagcaggggctgccccagactgggttgttcctggaacactgggaagaacacaaggcctagctcccagcaccgggacaatggtcagccaggcataaactgaacactggtcagacaagagccacaggagtgtctgccaatataaacaagtttcccatgtgaaggactccttggcaaatgatcagacaactaagcattaggtcacctgccaggtaaaagaaatatcccctgaaaggcacactgtaaacatctatgtccagctctccttcatttctatcacggtagggttgttgctagctgctctggcgctggagccccagtttgagctgggggctctcaaaacccttgcacactgaaaattagaaaacattgatgaggccgggtgcggtggctcatgcttgtaatcccagcattttgagaagccaaggtaggcggatca

SEQ ID NO: 61675 - DNA, 687 bp, Homo sapiens
ttatattgacttatttgtacaaatggagaatgactttcaataatttaagtgtttgtatttggttataagacacatagagtagaattattattgaacttgttttcaaactacctaaccaaaaactgaaatttttatagcaaggggagaagcttcttgaaatctctcacagatgatcactttctccaatatgttaaatttcacccatctttttctgcttttcatctcaacttttaacaattttaccaactcctctttttaccaattcccaaagagagattgtttgaacatctgccttgcaccagacactgtgccaggtactttccatttattacatcatttaatcctcggaaaagttcattgagttagattcctactaggattgtttttgtataatcccagaaggtttgtattccacataaatagtacccccagtacacaacacagaatactacattatgacgggtgaccaggagtcaggaaatgttgcagacctgggtatcatgtcccaattttataaatgaagaatctaacaggtcatgcaactgggccaagatcacatactgttaaaatttgaaactaggtctcttggactccaagccctattcccttgtgcccatacctccaaagccacccacataagagagacatagtgacagtggacataaatctcttaggtggttttcaaat

SEQ ID NO: 61676 - DNA, 3013 bp, Homo sapiens
taaaaaaatggtaactgtgtggtgattggatatgttaattagcttgattatggtaactatttcacaatgtatatgtatatcaaatcatcacattgtataccttaaatatagataatttttattcataaattatacctcagtaaaactaaggaaaaataaattaatatgtaagaatgatagactgtcagtgagagggaaatggaaaaaaagaaaaatagactgtcaaaagtaaaaataaataaaaattaaaagttggagtttagcagaagaaataaaacataatgtaaaaataactatggcaagtaaactatgcaatgatcagcgctcttataaaggtggaaagaaagttgcaatgggaaagaaaggcaagtgagaagagggtcaagatcagagcagactttggggaagagaaagctcttgagctagtccttgaaaattggtgtgattcctgtatacaacaataaggagtgaaagccattcaagtagaaagaacagcaggaacaaagacagagaagtcagaaaacagagtatctgcaaagaacatcaaatactgtacttcagtctatctggcaagtggagtgcataggagataacgggaaatcaggggaaaaaacatatgttagggttagattatgacccttacaattatcctagtacatgacaataatagcctaaggcagtgtcaacaagaatggagaacaaagtatagattcaagaaatattccaaatatagaactgacaacatttggcaacagaaggggaaggaagaggtaaaatgtcaaagatgatgtcacattctttgccctaatggctaggggaatgttggtggcattgacaaaaataaggagagtgaacgtggaacaaattctggtccatctgtttgagttctgcataccaatgctcagctagctcatcacaaagcagaagtagagaacatttcaagctcaacagtcactctgtgactcatcagatgtgagggtgaagttatttttactctcacagcagtaaaacaaaacctgaacattgttaaaaagattcttcaggttttctgaatgttcaagtgggttgtctagaacaacaagccttaacttagagcctcaaaatctaatcttagaggaaaatttaaatggttttatgtccccagtcctttagtccttagctggttgaaatctaaaagctatcttttctccttttgagatatgagtgtgacacatcattcatctctaaactttctcagttttctcttcattaaatatttagtgtgacaaattcagcttgtaggttgataaggaggtactctacatttcattatctggattttccctccaacaatattctgaatagtttttccatattgctctcaatctttaaccactccaccatcacttgacggtgtcacacttcagagaacctttcattttaaccccatttccatgaatcattatcattgcggcttgcgggaattgcttgagctatacccagagcatctgacctgtcatatctgcccgagatcactttatgtgaccttttatgtgcacatatggccacgcccctagacattctgtaaatctaaactaagtatggggaacaaactcattaaaaatccaagcacaagaattccaaatgagactttacctggtggcacaataagcaaatgctttccgctaaacaaggaattggagtctactttctggacatattttcaccagtcataataactgaaacctgacatacataaaactgtaactaaatacctatgccgttgaagcagagtaccataaagagaaatgtcctaggctcctcttatatccaatggggaaactttctatccaattaagggaacacacatgtagcttcaaagggcctacagaagaatgctaaattctcactggtaaactcatatctccccaaaattaaactgaacggtcctctgacgtttaataattctttcatgtacatttcaatgaaaggtgaagctgttttatttaatccaaccttgagcgtggatactttcctcttccgaactattgatataaccatgacatttaaatgcacacgagtagcagcaattccatttggatcccctgattgagtcgattactgtgatgttaagcatgcccattccatcccagagtttaagtaaacaagaccacccctctctgctcttagcccaggatttatgagggccgtgtgtctggcactcagggagatgttggctttctctcaccagtgattccatatacaacactgtcatataatttttagatttttcaaagacttcaaagttcacagccttctgtgaagttgctatctgggcatgtttatcatggcaaggactaaaggcaggagggctatgcagaaacttcaaactgtgggcacttcacaaatgcattgtgtgcatctataaaatgtcaaaacatccaggagaaaaattaaaaagccagtcagttcaccactcatacagggataaagccaggctggggcaaatgtggcttaaatgttgggttgtaaagactgtttgatttttccatgatcaagatattgtatcctaattgtttcctttgctaaatgagcagtgcttaattgctaagtagaaattagttcacttcctcccttctctctttttgaaagtgaacagatgtcccatttggggggtttaccctttgtgatgtggtactgagaacacaggacaaactttgtgtgtcttaagaggccacactgcttgatggtgagcgtggggctctggagtcagactggcctttgtgtgaagcccagctctgccacgcagcagctgaacaccaccagacaagttaccctgtgtgtctcagttaccccgtctgtaagatggggttgatagtaatggtactacctcattaagctgtgaggatccaataaaataatgtgctgagtacatgaaaagtattccatacatatgattttattattataattgaaacactggacaaaagaaatgaaagttcttttcttcagttcagggatgaatccctgaaac

SEQ ID NO: 61677 - DNA, 2425 bp, Homo sapiens
cacttcatcatgaaagaataacctaatatgagatgacatcatttgcaattacccttgtttttttttttacatctttcttcctatccacagggcctacctttccctaactatcaactcatatctatgatttccttcagcacctttttcaaagttcacttactcctggaagccgtcacggactactctcagctgatcagatcactcctgccctctacacttatggaagcagttgcttccatatcatattacactactgaatatcgtagaaaatatttcgttcttaaagcctagctgagccatgaaaagcagtgactgatattaaatagaactttttgcaagatctattgagttaaccaggggtatggtattacctctacaatcccagctatatgtaccacatcctaatctgagttaaaatgaaccttgatatttagtttactttttggctttgactactttttacttgttttaaaaatcaggataaaacaaaattgaacaaaaaataaagaggtaaagtgcattcaataaagagattttaattaacactgggcataaaaatacattttactgaatcttaagggttttttaacatttgctgtttatagtatcttgtctgatttgagaggctatcaaatcacagatcagtcatacattgattcaggatcagtctctttcttttttcagtatattacattactgagggataaactggatttagagttaattttaaaagttaaattggtattacctgaaaaatgaatccatttaaaatatttctgcattgggtgggagtctgtcctaaacacactccacagctcatcattccatgtaggtgcgtcaccctatcccagaacacaaaggaaacttattcttggagtgttactgccatctagtggaaattttactaaatgtgaataaattcttaaggctaattaggccccctactctcttcaccgccactctcaccatgtctttttttctttttccttcctttctttctttctttcttactatcacaggtgcactcaggtacaccaagaagagaaaatgcttgctcagtcattgggaacttttttgaaaattggtgctttgtgcccagcaagacaatatttctatttggccaaagctactttgtcagaagatatatgaatatgtcctaatttttgcaaaaaaagaaatgcagaaaggattaaccagaaactaatgggattgattacctaaagcaaaaggatgaaaatgaatgagaaagatggaaaaagatagaactcttctgattatatttttatatagtttttactcttgaaccacataaatgtttacttttttttttttttttgagacggagtctcactctgttgcccaggctggagtgcaggagcgcgatctcgggtcactgcaacctctgccctctgagttcaagtggttcacctacctcagcatcccgagtagctgggattacaggcgtctgccaccgtgcccagctaattttttgtgtttttagtagagacggggtttcaccatcttggccaggctggtcttgaactctgacctcgtgattcacctgccttggcctcccaaagtgccgggattacaggcatgagccaccacgcccggcctacattttcaaatataaaatttagtcaccaggctgggaggactgttaagttgaacagaaacagaaacaaatcaacctaagcatgtatcatataaaaaatgtaattattcagaacaagaaaaataattattccaagtaacttgtgaatgtgaaattctaactggccaccctcagggaatattctaaggataataattaagaaagccttgaactttacctggtaaggtaagtttgtctttggtagtggtattgatgtagtaattctgaaactactttgcgtgtgttttagaatttcaaatagataaacatattgatcttgctggtgttgcaggacttttccttagttcagctaaagacagggtccttttccgtcccatggtcaccaacatttaggctcatagatggtttgaagcgtgagtaaagcagggttgtattgggtaaaagggaaaaaaggggaaacagggatcctcctaaggccagagtccctgctagagaacttcccacccacaagttccacacaggaagaggaggagccttgaatcccaggttccacacaggaagaggaacccttctgcaaatgttgtgaacttctgtgtctccaccccagtgtgcactcttcccagtgcacaagccagttggagtttttccagggatcctcttcccacttggctgtctcactgggaaccagttttcccattatgggagggttgttttttgttttttaaaagagatatggagtaaaggaagaagacgcaaactctttggtgttgggttacgaagttagaggtatcagtacaaattcgaggtctt

SEQ ID NO: 61678 - DNA, 4740 bp, Homo sapiens
tcctctgtgtattttcaaattgcctgccttcaagctaactaattctttattctgcttgatcaagtctgctgttaagagactctgatgtattcttcagtatgtcaattgcatttttcagattcaaaatttctgcttctttttaatcatttcaatctctttgttaaaatttatctgataggattctgaattccttccctgtgttatcttgaattccattaaggtttctcaaaacagttattttgtcttttctgtctgaaaggtcacatatctccatctctccagggtcggtcactagtgccttattaagttcatttgatgtggtcatttttctggatgtttcagatgcttgtggagtttgtcagtgactaggcattgaagagttaggtatttattgtagtcttcatggcctggatttgtttgtacctgtccttcttgggaaggctttccaagtattccaaggcacttgggtattgtgatctaagtctttggtaactgcagctatatctgcattgggggcaccccaagcccagtaacgttgtgactcttgcagactcatacagatactgccttggtggtcttggtaagatttaggagatcccctagattaccaggcagatacacttgttctatttctttacttttccccaaacaaatggagtttgtctcactcagctgagttgcctgtagctgagtgaaaggtgacacaagcaccccagtggccaccaccacagagactgaactgggttggtcccaaagccagcacagcactgggtgtcacccaaggcctatggtgacaactgcctggctattgcttatgtttactgaaggctgaagggctctacaatcagcagatggtgaatccagccttgcttgtatctttcctttcagggctacaagatccccctagccctcagtgggtcaagatgctgttcaggaaccaggacctaaagtcaggaaccttagaaatctacttggtactctattctaccatggttgagctggcacccaagctgcaagacaaagtccttccccttcttccttccccttttcttaagcagaagagtctctccccatggccaccactgtctcaggctcatggaaagtactgcctggctacttccagtgttctctcaaggtccaagggctcctcagtcagcttgtggtgaatgctgccaggcctgagtctctcttctgggcagtgggctcccctgtggcccagggcaggtccaagaatgttgttcaggagccaatgcctggagtcagggaccccaggagcctgcttggcgctctatccccactgtggctgagctggtactcaagctacaagacaaagctccctttactcatcacattttttccctcaaacagaatgagtctctctctgtagccaccacaggggaatgtgttgggttacacctgaagccaacatatttctgagtctcacccaaggcccacagcaaataccgtctggctaccactgctgtttattcagggacctagggctctttagtctcaggtgatgaatcctgccaagatgagatttttcccttcaaggtatcaattctcttctggcccagagcatgtctagaagtgtcatctgggagctagggcctagaatggggacctcaggtccctgcctgtgtcttatttcactgtggctgagctggtaagatgaagtcttctttactctcccctcttctctcctcaaacaatctctctactgtactgcctggggttgagggagggatgaagcaagtactcccttggctgctccagctggtgtctcaccaggtcatgtgtacccaaagtccactggctctaagcccaggacagtaccaggacttgtccaggaattgcagtccctgtggtctagatgacctttcaagtttatttaggactctacatcactttagcccatggtgacgggcttccagaactcagactctgaccattgagatgggagattcacctctggctatggctggtcttaacactctcttcatgggcagcagctgaattctgtcaaatgttgctttccattgtgaaaggacagtcctgagttccaatgcaaagtcctacaatcactgtgctctcctcccaagcacatagactctttctccatgccataaggcttctgccagggtatttgggaagggttgtgtaggcaattcaagagtttcaagagtgtctttcctaccctcttcaatacctctttcctttttttttctttttttttggggagatggagtctcgctctgttacccatgctgaagtccagcggaacgatcttggcttactgaaacctctgtctcccaggttcaagcaattctcctgcctcagcctctcaagtagctgggattacaggtacccaccaccacagcccccagctaatttttgtatttttagtagagatggggttttaccctgttggctaggctggtctcgaactcttgacctccagtgatctgcccgcctcagcctcccaaagtgctgggattataggcatgagccaccacgaccagcccctcttccgttaatatgatgttaaaacacagtgaggtactgtgttcactcacctggtttttttgtttttcttatgaacatgtttcttttgtgtggatagctgctcaatttggtgttcctggtgggggatggtgggggcaatcactggaggcttctctttggtcatcttgctctatctcctccccctaaataaaaaagtttttaaaggatctagttgaaaaagtcaacaacatgtgtgagaagatgaggaaacatcaacagagatgaaatggtaaaaataaaaaggggggtcatatggaaattctggaagtaaagaagcacaatatcataaatgaagaattacttagagttagttatcaaagctgaggtggaaatctcagtcaattgaatgtaggtttaaaattatcaaaattgaaacacagaaagaaaaaagcaaataaaaaatgttcatgtaaaaactgttgagcaatatcaaatgactcaacacaaactggagtcaaagagagagaagagagataacagaacagataaaaaatttgaaaagataatgaccccaaatttttccaaagatataaaagatatcaaaccatagatctgaaagctcagagaatcccagagaacacacacacacacacacacacacacacacacacacacctcatctaactgctgaaaattagataaagggaaaatcttgaaaacaatcaggaataaagaacaaatataagaattacagcagtctgaaactctgtaagtcacaagacaatagagtgatatcttgaaagtaccaaagaataaaacctatcatagaattctatactcagtgaaaatactattcaaaaatgaaagataaagactttatcagaaaacaaagatgaaaaaattaattgccagcagatctccagtacaagaaatgttaggggaaattcctccagcaggaggaaaatgtcatcagacaaaaatttgaatctccataaattcttcaagatataatcttgccacacaagtaagcactaaattacatcataattcattagcaatagaaagtagctattcatgactgctgtatgtagtcatcagagagaataatatcttaacaaagcaggaaataagctcctgtagagggaaactgccaaccctctactggtgagtgccttatttatagtgacgatgttttgaataaggaaacccaactaccttccctatttccacttccatccacctccaggaatgcacacagctgactggaccaggaccatgcatcttacttgagtacaatagtctaatggctggacagaaacctcagcattctacacaatcatgtatgtgggtgattgtctgggctaccagatttgttatctcaagaatatgacctagaaaactgggaacacagttgagtctacagggagccaaagcagaaagatttgcagggagaaggaggtaatcacatgccataagccaatagaacacctgattacgcagaatccatgcatggggggttgggggttggaatgtttcatagtactgagggtgaaatttgtggcaggatcaacaaaacagcaatagaaaaaagctgaattaccacaacagtaagtgatccgttaatttgagattctgggtcaacaagctgaccctgaactccatggaaatgtttaattcccagatcacaattttactcaccatgaggccaattacatgaggattctcactgtttcagtgaaatagttacagcctactttaggtccttgtacttttttctattttgtcaactactggactttttttcaccattgtgcatcctagttttgaagtcaaaatcccaatttatttgaaacacaatgtggtttagcatattagtttcctagggctactgtaacaaatcaccataaacttgatgtcttaaaacaacagaaatttattgtctcacagttctggaggacaaaagtccaaagtcaaggtgtcagcagagttgattccttctgaacactctgagggagaatccattccaggcctctctcataccttttagtgcctgctagcaacttttgacattccttggcttgtagaaatagcacttcaatctctgcctccatcttctcattgccttctcttctctgtctcttttctcttctaaggacatctgtcattgaatttagggcccagcctaacccagaatgatcctgtctcaagatccttagcttaatgatatctgcaaaa

SEQ ID NO: 61679 - DNA, 889 bp, Homo sapiens
aaaggacctaagtagtaaagaattaaccaacacattcgggaatgaagagtacattgtgactgggagctcccaacagagcagcatgcgaaggctcgcattgcgaattttagctccagagcgactgcaagaacaaaccaacaatcccaagaggacccacagaccctctgaaggaagtagactgctcctgcaggaccacagagacaccacaaatactgtgagtgccccaactgcagaagtgggaaaggtagaccctcctctctcaaacacacacccccactgcagaagctgaaggtctgtttgtggaagaggtttccgaggttacttgaagctgagtcaatttggagagccgagtgaaatacaggggtagagaaagcagcagaaaggccctgggagctcgctgggccctcaagcagcccattcctgcctgacaccaaagagatccatcaggagggtgaacagaggagcagggggtaaaagtccacagggagaaggaattctctagttaaactttgtgacaatttgaatggagtgaaaagcctcctggccagaactcaagaggagggcacgaaacaggcatgtagacttcacaggtcagggaaggactaaagcccttttctcttgcagctggtaggtggaaagcctcaggcaacttttcaagcccctctcgccctcctcctggaaacagacttggggccgttggtggggtatggtgggagtgagaccagcccttcaggtggcctgggagctgggtaaggcctgtgactgctggctttccccgacttccctgacaacctgcatgactcagcagaggcagccataatcctcttaggtacacagcttcagtgacctgggaatctcacccccatcctcaacagcagccacagcaaga

SEQ ID NO: 61680 - DNA, 2976 bp, Homo sapiens
acctaagcttccctttcttgtctgtaaatgagcatgaaagtgccacctgtataaaataactcaggctcccaaaatgtaacatagggaagctcctagcagcgtgtctgggaggaataagcattatctgtatttatcgtatcaaattaagatagaggaacacaggaggacagtagaggatgaaaataaaacactacttagatcctgaccctcctcagtggcaagtagtgagcattcacttcgtacagaagtagcactaaggcaaattaaaagaaaggttcacatttcctctaaaagaaatggtttttgagtcatgccaataccacttactcaatgtcctctgtactatactattctctgacagagccacttattaaatgtgtgaactgtgctgacaacacttgacaactttcaacatgagggaacagcaggatcacttaacagaacaaaatcgtaaaataatgtcaaagcttgatttcaggtggtgcggtgtagcactgctcttcacgaaatcaggactcccccgaccaggcagggccgactaggttagagtgtcctgccctcactcacctggcagggcttgggatgagctggacgtgactgccacaggcatttctgttcaaccttgaagccttcgctacaggagaccgcctggcagtcgggctgggaagcaaatctgagaaacaaagagagaccaggcggaaagcccttgggaccaggaaggagagatgagattctggtttggcagtggcacctggtacccgctattaataaataataggactgtctgacatttataaggcactttatcggtaataacagtgtcatctccataagccattctattagtggtaacaaataatagccccacgcctgcaatatctcctttaatattcccaacgtccgctaagcgcgtctcatcaccatttaaagaaaccgtggctcctagaggtaaagtacttcggtcacaacgcgaggaggtccagacttgaccccagacctccagactcgagctgggaagtggccgaggctcctggtgagccgcagggcagcctgcccagccccgggaggaccgcgtgggagggccgggagagcaggtggctgccccccacaagggggcgggctcagccggccagtcctgcccggaacccccggcaacgcgcatacgactacacctgctccggagcccgcggcggtacctgcagcggaggagctctgtcttccccttcatctcacgcgagcccggcgtcccgccgcgtgcgccccggcgcagcccgccagtccgcccggagcccgcccagtcgccgcgctgcacgcccggggtgaaccctctgccctcgctgggacagagggccccgcagccgtcatgctttccgccatctacacagtcctggcgggactgctgttcctgccgctcctggtgaacctctgctgcccatacttcttccaggacataggctacttcttgaaggtggccgccgtgggccggagggtgcgcagctacgggaagcggcggccggcgcgcaccatcctgcgggcgttcctggagaaagcgcgccagacgccacacaagccttttctgctcttccgcgacgagactctcacctacgcgcaggtggaccggcgcagcaatcaagtggcccgggcgctgcacgaccacctcggcctgcgccagggagactgcgtggcgctccttatgggtaacgagccggcctacgtgtggctgtggctggggctggtgaagctgggctgtgccatggcgtgcctcaattacaacatccgcgcgaagtccctgctgcactgcttccagtgctgcggggcgaaggtgctgctggtgtcgccaggtgagccccgaggatcgccctgccctggcaccagggcttctcggcgccttgactgacgagccacagcgtggcataaggggttcgcagagggaggttcagatcggaactgtaggtatagaaaaaggttggcagtgtttccttgaatcgcaaataatgatcttttaggaccacctgttgtggaagctgataatgtgctaggttctgtgttaagcactctacaggcagtgtggtttttaatcctcacaatgggtaggctttgttataggacttttatagatgagaccactgaggtcctgagaggtgaagcctcatgcccagccatctatctccaaattccaagctcttaatcaatacttataacatctgcattaaaatgcagaggatcttgagtgcgaactctagtggatccagaggggctcttctcacctctgctgcttgactggctgtgtgatcatgggaaagtcacttctcctctctgtcccttggtttgctcctctctaatgaggcaggcttcaatgttgcttccagctctcaactgctgttagcatcctgtcccctccctgcagaacaaaggtgaccccacctgatccccagggagaagatactggggatctgctacaggaccgttgtgagcccccactgcatctatcacaatagtgaccctttcagttctgtggttagctcctgccacatttcagccagacttgaaacagtaacttaagtgatgacaaggtcaggaagtgacagagaacctgttactcacagggctgatggctttcccctcccagagagcttgtctctgcacttgaataaggaccaagggttccttctctcagtcagtaagaagaggcctacacaggagtgggctgaaagacctgggtgacagggtaggggtcgagggagccgaggagcctcagctttctagaatgcatttctgtgctaagccctatagtagatgcttttattaccccgggagataacatatcactatccccaccaccaccaccaccattatacagttgagaaaactgaggcttaaaattccaacctagctctatccaacttcgaagccatgctctttcctacatcttttttttttttttttttgacagtctcgttctgttgcccaggctgg

SEQ ID NO: 61681 - DNA, 843 bp, Homo sapiens
cctcgtcaagttagagagccaaaccgagcaaaatacaaaggtagaggaagctgcagaaaggccctgggagctcactggctcccctagcagcccattcccgcctggcaccacagggatccatcaggagggtggccagaggagcagggggcaaaactccacagggagaaggaattctctagctaaactttgggataatttgaacggggcaagaagactcctggccagaactccagggagggtgtgaatctggcttgcagactccacaggcggagaagaactaaagccctttctttaacagctgggaggcagaaagccttgggcaagttttcaagcctgactcgccctccacctggaaacagactcggggccgttgagggggcacggtgggagtgagaccagcccttcaggttgcctggaagctgggtgaggcctgtgactgccaactttcccccacttccctgacaacctgcatgactcagcagagacagccataatcctcttaggtacacaactccagtgacctgggaatctcgcccccatcccccacagcagccacagcaagacctgaccaaggagagtctgagctcagacaggcctagccctggccccacctgatggtccttccctatccaccttggtatcagaggacaaagaacatataatcttaggaattctagggccctgcccactgctggtgcctgtccacactattacagctgatgctttctggaaagtaccacctcctggcaggaggccaacagcacaaaacagggaattaaaccaccaaagttaaggatcccatggagtcattgcatcctctgccacttccactggaacaggtgc

SEQ ID NO: 61682 - DNA, 569 bp, Homo sapiens
aagttttctctgtctctctctgggtggcagttttaagggtatatgcaaatgcaaaatttcttcaacctgtacgcctaagatatactttgtgttataccacaattaaaaagggaaaaattataaaagatttatactcaaaattattttaatcttgctagaaaatcataacttatgacctgattaaatatgatgtggagaaagatgaacctgtccgtgatgaaaatggatattgcgtcagagttcccaaaggtacagtggacttttgttcaatcaacctgtgccccttcttatcttgatcaagtgacttttaaggactaacatattattgccacatggtaaaatttatcagagtggggaaaaggggggtttatttaagtaccctccaatatacaggaattccaaaggtgctaatttaccgctgcatgtaacataattctagttttaaacatagcttaacaacttcttgcttatgaggtaatgttttgtgggaagggatatgtaattgtggttgcaaaactatagttttaggtggcctttacctttaagctttaacaactgtgcgtttgtgt

SEQ ID NO: 61683 - DNA, 652 bp, Homo sapiens
ctacagccagcttgttgccagcaggttgtatggcattagttttaagagaaggttgatgtataaatttgacctctagcacataaaataagtttactttcttctgtcttaggtgaagttggacttctggtttgcaaaatcacacaacttacaccatttaatggctatgctggagcaaaggctcagacagagaagaaaaaactgagagatgtctttaagaaaggagacctctatttcaacagtggagatctcttaatggttgaccatgaaaatttcatctatttccacgacagagttggagatacattccggttggtttttctgaatcattgagccaaaaacaaacacacgcacagtttggcttactcctagtggaatcgcattccactttggttatggtgcatttccttctctatctttggcacatcaggtcaaactcctgtgttcccagagaatgaggaatgaagtgcatgaagtgtcactctgcagtgcacggttaacttggctgagcaacaccagatgagaataaggcaggaaacctgtatctgatttctggagacaaaagtacatttaactcctcttgtttctcctgcattattactggtcactcttaggacagccaaggattttcacctttccaatcatggaggtgttt

SEQ ID NO: 61684 - DNA, 780 bp, Homo sapiens
ctggtaatgtgtgctaattctcccccagtttagtccccataaagccccaggcaaacacttctaggacttctcaatgatacatgatgagaggtgttgccacccccagccccaacagagtactagaaatattttttttaactctctccactcttttgggtgactttaagaagaatcatgaccaaaatccttgcccccactcattatacctaacaataaacatttcctgagtgcttaatatacactgaggacttgaggagggtctaaagaaaactctagataggctgcacctttgtgaattttgccagtaattagaatgattattgtttgtgggtcagcacttgcgaatttttgcaaaattctctctgcctttgagttacaggagaatgtgaacctaagtagtgggagataggacagcctttgagtatcacattgtgcaattgtgttacctggaatcttgtcaaaggagaaggttgtcagcaggggtcatgttagagcagtggctgcattctgtgtcacaaggggtatctttttgggtaagaggtcagcatttacactgttggccagaatattcgtgttatattaaccagaacctggttgccctgatctcatttgacccatgttttagaccttccagtcagaaactcagagacccaggtcctcgcatccacaccctgcccagctctgcctcccagcctgatggtttcctcagtcttccacttccccacacctccctgaatctggccaggtaacacagctccattgagataaatagagacaccc

SEQ ID NO: 61685 - DNA, 824 bp, Homo sapiens
attttggtttgtgtttgtttaaccaagaaggaattccctagaggaaaggtggaaggacaaagacacacataggcagaaaggacagtgtcttcagcttcccccactacttttatcaatggctttgtcttgcatgtggactcttgtagaagtgggagaacaatgccagtggccagagttcttagttaagtcccgcttcttccatgaagaacatgggagagaggctgcacctgtctcatttacctctgtgtccctttcttagcacaataccttgtaattgttgaattgaatagaaataaattaagcaaaataggccttcaataaatgcctgttgatgcagggaggtttgttccagacttggtaggtctacctgtccaagccaggggagctttatttcaggcataatcataatagtgctaaaatattcagccagctgtgaccattgaggtaattccaaagcagataggatcctaccctggccacacacacttccccttgatttactttctctttctctttcctgcaaaccagactctggggccaaccctccccagtgctcagtgacagcaaggggaacggtgagacactcagcagaggacaggcatcaggcagccctcagggcatgttgtgctcagcgctcctctggttaacaaagagaatcaagtcccaggagctgaggaacaggcccagacacctgaaccacacaccgcaagtctcctaggcagatctgcaaagtagaaaccagccttcctcgccatgagaaaacagaggaacacaggctcagcccccacagcagcatgctacatacatgtctgacatgtgcttga

SEQ ID NO: 61686 - DNA, 854 bp, Homo sapiens
caacataagggaaatacatttttactctaaatgaatctttattccttgaatagcagaaaataaagttctatttttattcctcccaaaatgtaaagtatggtagttagagcacagacactagagccctgcagacctaggtttcgcctccagctgtgccacttactagctgtgtgaccttgggtagtgccacctcactggctcatcagtccgggacataaagaaccaattgcacctcccgggcaagtggtgtgaggacaaagaacgccaagagcctcagaagaagttgtcagtaggtgttggctatttagattattttaaaatgtgagctacaaatcacagtagcatttctgtctagagccaagatgacccctatttaaccttacactgccttgttcattttcctgtgagattcctgtgatctgagagccatcactccagctgtcagatttcaaatgagcacccaaatttctgccgctgttagatgaaaattgactctttgctcctggtggccaaattcaacagagcttaaagttcaaggttgcagtcaccatacatctgaaaatttccaaatcaatttcagactgatttctcagatctgaaaatagagcagaggatttggaaaacatttacagttattctaatgagtcacgtggtttcctaatgacatctccctcaaacgtcagaaagtttctaccacaatttctgttgactaaaaataaatgtttgtcccactgcgtatttatctgcccatacacaagattatcaaatcctcacaaatgtcctcaccttcacccttcaccccagtttcctgagccaggcacagttgggatgttacccctttgttgatggacaat

SEQ ID NO: 61687 - DNA, 3835 bp, Homo sapiens
gcgattctcctgcctcagcctcccgagtagctgggattacaagcgcgcaccaccacgcccagctaattttttgtatttttagtagaaatggggtttcaccgcgttagccaggctggtctcaaactcttgacctcaggtgatcggcccgcctccacctccccaagtgctgggactgcaggcgtgagccactgtgcctggccaaaccaagtgaacttaaccaagatccaatctattttcgtttgaacagcaaacattaaaagtacacctggtattttctaacaattacacgaagaatgaccagatgcttcctgttgatggaacagtagagaactatagactgacagattcagactacagttcacagaaacaactggaaacaaacttagcttcctttcaaagccattaaaatacggccttaaatttttatgcattaatcaattaagtataattgtctcccaataagtataattgtctcccaacctagaaaacccagaatgattcagagagacaaagaactctaaggatatgtctctgcaaactgttcgtttcaccaaaggattcactgcagaattaattttctgtaaaatctgtacctcctataattttcaacatgttctatctttaaagataacatttacacaagtgttgatagcatatgtggaattcacgtgttacttgtgtaaatcattataaatatgtaatagaattaaatgttttaatcacttaagaatatcttcgaatgttcctgagtctccgagatcataggcagattatgcagtcttcatctgtgattttgtttagtcacctaaattccaacttttaaaaaagttagagcccagtaaaaaaagtatgggaatcaatcttattcagtcttgttaaaatgtgtcttgcataacagcttgatttgacttgtatggtgaaagcacggtaagaatgacacatttctgttttttggttttttttttaaaaaagtatgagtgtacagtggagtgttccagaggttacatggtgtgctaaccacaacagtctgacgtagatctgagaatcttctattaaaccaggcattaaaaagatttgcaaaaatgcaagatgtcactcttatcatctatgttaacatgtaatggatttattttttgtttttggaaaaaaaaaaccaagagaaaagaaaataaagtcatctttagtttccttaaattcaaagtctgagcctgaaaatggaagtatcaaagctgatggttatacgtcagtgagaaaaaaatttaaaccaagctgggtgggtctttacatgagataaactatctacaggaaagaatgaccactaacttctgcataataaatgagagtggatcttttaattctgagatggcaatgtactttacaaggaccatttacagactacatcaaacctttttctagataaaaaacgtacttcagtaacttgcctgaattgagagagcaaaacagtccggagagaaaacttaaaatgtttccacattatcaagcccccttcagaagtactgtggtctcggcccctcctttgaacagatgtccgctcgccacagtccaatcaggtttaaagcaagagtatttgtactgaaaacaagcttaaagtgggaagacacacacaaagcaggcctgtatcattcctttggtttcagttttcacgatgcacccttgaggctaggcacgctgattcaacacacttggagagcttcaccgaaacacactaaacacacagtgatgaactgtgccctggcagagatgacctggcaaaattctcaacttcttccctgaggcagtgcacccgcagttctcggcggcgaagtctttggggcagaagtcccgagccttcagaacggcaggcttctccccctcaggactccagtccccgcggccaaggctgtcgctgcgggggccccgcgcgggactggccaggctcttccattaaccctgtctggtccggccgatcccgccgcgacccgagcgcctctcggccccgcagcacagggcgcccaggacccgccaccctcgccgcccgttcccctctccggagagcccggcggggccgtcaggctgccgagacaaagggtaccgcggcgccagaggccgaggcccagccgcgcctgccttcctctttctcccgcccactgccaacctccagtcgcccgcagaacctccgctgcctcggcgcgaccccatcgccaccccggggctgccgctcgggaccggcaagccgggtagccgcgaggcggccgcggcatgctagggccgaggagggggcggcggccgccaccatgtctgcccgcccctcccagaagcagtgtgcccagcggacaaagcgcagcggcggcgcgggcgcccaggccgaccccgccgacccccgcggaataagcggggccaggagccccggaaacccggcgccttaatgcaataaacaggaaatcgcggggatgatctgggttccgggggaagtggaattattttttaccagcgaagagatcaacttccacatccggtggtaacagggccctacacagacccgcactgacctggaaaagcttcgggagcggcgacgggaaggcagcaggaggtggtgcggggacccgaggcgcctcgtacccggccgggctgacgcggccccgctacacacaaagcgcttcagctgcacagggcgctattttccgaaaatgccgcgtctggtcggcgcccaaaatccccaccgaaaagtcccccgtgctgcgcgcggagggacacatggtgtgcgagtgagtcaagctcccagcatccctcccggacccggccctcttcagctcatcgcccgaggattttccgcctctgccctcgtcggcagatcctgctcctacccactccctagctgtgttcccgcggggagagaggggaaagagggtctgattttttaacgaagggaaagaaaatatgccatttctagcgcttcagccacacaaagaaagcggcggaatgatccgctctcggcgaccgcaagtcccggctcgcccggcgcctgcgcggcagcgggggtgggagctgcggacggccatgtgcgcggcggagaggccgggtggccaccgaaccttcccgcctgttctgcggtgggtaggagtttggaaactaatgttcctgtgctaaccttcgtgtctctgtgacatgactgttgaaagacggagagtgcggaatctttggagttttaagcttgccaactgtgcggcctagcagaatcctgggagacggaaggacagccaagaggctaggatttacctttaagtgtccctagattcaactaggcagactgggacgggagacgctgtgaaggtaccagggaaggaacgagtgaggttccttttccactttttcataaactcaacagtcaggttcatgacgaagatatagatatttctgtagattttttccccaacattctaattatgcctcatgtttcgtagatcctagtaactgcttggattactgccacctcagaggtagagatctgtttttccgtggctggaatgccaaaaattttgttgtattttattaagaaagtagcaaaagtttggagatttgcaaagttaaaaaaaaaaaaagcattatgaacttaatctagatgtgatttgctaaggaacttaatatattgatatgtttttcacaggggcgtctgggcatggctttcccaacctagtaactgcaacttttagcatcctacatgtaggacttgggaatatgtgagacagcgccaagaatttaatccaggagaattgacaagcttaaatgaaatccatattgcccactgattttgtgcagcttcagataagtaatcttt

SEQ ID NO: 61688 - DNA, 1512 bp, Homo sapiens
aaagatcagctcgcgagaaagttcagacgtctcatttcgtttctattacacggggccttcgcccaaccagacggagtcttgctctgctgcccaggctggagtgcagtagcgcgatctcggctcattgcaaccttcgctccccgggtttaagcaattctcctgcctcagccactggagtagctaggattacaggcgcacgccaccacgccaagctaattttttgtattcttaatagagacgggggtttcaccatgttggccaggctggtctcgaactcctgacctcatcatttgcccgcctcggcctcccaaagcgctgggattacaggcgtgagccaccgtgcccagcctcgccggggccttttaagtgacgttaaaaattgtacataaaatatgttttaggataatacttgtttttctttgaccaaaggcttggcttcagagaatgtttagccagaaatagaggggcgttaaatccccttttttctaatttccaatctgaggaggaaaataacgtagtaaagggacgcaagagcaaccttgcttcttccacaacaaggcccaggcgccgccttgcaacccggaaatgcagggtgcagtgcggggggtaagggaccggccaactatgttgacccgactcagagaaaccccgcccttgccgccaccgcccacccataacgtcctcctcgaccctccctcgaccatccctcgccccgcggccctcaccgaaaaggggagggcggtggaagagagaggagtcaagggagcgcacgcgaagccccgcccctgccgtgacgtctggagacgcgacgcgtcgcctcgcaatgcaaatcgggaaaagggggtgagctgggctggcttccgtcctggtagccaaggctaattctccctcgagttcttgggagatgggcatttggcgagaaggctggcgttagtgaagcgcgcccggcgtcacggtgagtgcgggtcttgggccctagcacctgttctctgggaagtcgtccgctgtgaacgatgaacgcctttccttccaccagctgctggttaccccggagacaagctctgtccgcggagaggagtgggacaactcctaaaggtagaatcagcttgtggagaggaaaggcccaaccttgagtcttttacgccatctacctaggattgccaagcgagtttcgtgtgtttttttggttttaaaaggtggctttgaccaatcttccgttctcttggacacttatacccgactttgacctctttcctcttgcttccggtttttttttttttctgcaatctgcctacaatcccaggccttactgtagctcctaaaactgtttcccagtttctcttcttccccagtcacacttgattttagtgaagtttgagtttaaagaccctataagcttgtcagagttaaaactatgacttcctcaaatagaagattttttttttttcccctaaaaagtgccttccatcctagagttgtgggacaagttaatttcaccgccactccaccttg

SEQ ID NO: 61689 - DNA, 2283 bp, Homo sapiens
gtgaaagacacattatttattcaaagtattactacatttgtgttataagtaaaactcttattttagttttgtatggcacttgaattagcgtccagtgaaaagcaaacttgccagactccagcagagggagagttgtttgcataaagcctatcaaattcaagtactgaccaaaaatacctactttgctcttcatgtccctgatgtaaatgactttcttaagaaatcttcaaaattggttcctgatatccaaaaataaaaagctctatcggaagctgcaatgcaccgcctccctctctccattccgcacctttcggtttaaaacacgatcaactgttctctggggcaagggatgcggtagttcgacttaaatcctgactgacagtacattgtcttggtccccacagaagcctccccccacccaccaaaatccttaattcttgctaaagaaaaaagatctaccatcaatattgtcaaatccctcccttttggttccaaaaaggaaatgtacctgtagagtatccgctgcacagcaaacaaggcactgctccaaacccgtgtcctctaccccctttttgcacccttctagccctccctcccttttttccatgtaaaacttgagcagagcatttggttcccttatctgccagcaactggcgccaggaggaccgtgctcccaggagatgcggagcttgtaggctgagccctgcgtcgggcgcgctgaggccgctcagctgagcccagccaggtagtcccgggctcgcgcctctgccgcctggagaggccctcgctgggagccgagtctcggctcaggggattcccgcgaagaggtgtcgcctctaacttgctacctgctcccgcccctcaccccagaacgaactgcacacccgtcccgagaggacaaatccggaagcctcaaggcaattcgagggtccttcgccgcatggaacgcggctccccacacacttgcctgccaagtctctcctttaccgcccgcaaccccagaaccattccccgcccgggcctgcgtgggtccagtaccattctcctcacggggcggactccggaagggcagcaactccacctcctcctcctccgcggcctgtagccatctatcgggaagcgtctccggaggcggcagcagaggccgccggacaaggaacgcccagggaaaccttctcagaactaactcagctccggcgctagcagcagaagccgagtctttcataattgtgcgaccaactcctccgggtgactggccacagggacgcgcccgcgcccgcctccgccggcgacggggctggggacggaccacgtgagcggcgcggcgcggcgcgtgcgtcgccgcccgcgggtcgggtcacgtgaagggcgcgcgctccctcgattccaggccgcctccctgcgcgccgcgcgcacgcgctgggcaggttcgcgccgccacgccgaccgcctctgggttcccagaaagtggtggggtgttcacgccgtatctccgttgggtacctaggcgggacttagacaaacttcagcctcagctacgagagtggaacttggggaatcggaggttgagggttaaggttcaaggcttgcggatccagtctggagttgctgtgtgggctcattccgctaactaggcctggcctgtgccgactcgctccagcaaactcgagtgtcgcaacacactctgtgtgcttcagagcgagtagaggctttaaatgttactctctcctcgtccaaaatgcagaatcatctttttaccccaatcatgttctttctctagcctctcctgttgctgccggtaaatattcttctttgtttaactatgggactgtctttttccctccagagatactcacccacatacacgcatacaccacaccttctgcaccaaaaactgggttgttcccttgatgtaatatgtacctatccacctttccatttattttgctgtcacacatgccaaggtttggctattagcaatggtttactaaatgttattccttatctactgggaagaccacaatcagtttaattttcttaaaactgctttaacatctttctgctcctgaagtcttcgagagttcctcaatctgaccctcagggatctgactgtcttatctcttttttaaaaacgactttattttaaaataattgacatgacaaactgcacgtatttaaatgtccaatttgataagttttgacatacctgtgcacccatgaaatcaccataatcaaatgaacgtattcacctctaagtttcctccccccccttcataatccctt

SEQ ID NO: 61690 - DNA, 680 bp, Homo sapiens
tatatatatatacaaataaaaataaataaaaagaaatgatttagggccaggcacagggaacacgcctgtaatcccagcacatgggagactgagacgggaagattactggagcccaggagtttgaggctgcattgaaccatgatcatgccactccagcctgggcactccagcctgggcaacaaagcaaggccctgactctaagaaaaaattttaaaaagaaaggacgtagaatgttgacaacattaaaacaattaaaattgtttaaagcatgaaaacaaagatagagtcaatatatgagatctccattttatgtaactttctctgtcatttaaactcagacactcatagatgcctggcaaatgactacagaagcctttgtttatataagcagaaggtgattaaaccagttccaacaaattttgctgtactttggatagaggattaatggattttctttcttagggactctttcaaaagaattaccctcatttgctagtggaaagcttataaaatgccaactaaaaatacctggaatgtttcaaacactaatctctaaccccagtaccttagtacagtggctggcatatcataagtattcaataagtatttcttgaataattgagaggatgaaaatcaggcttctttcaattgtattatatgtgatatgctaatcacttaca

SEQ ID NO: 61691 - DNA, 1037 bp, Homo sapiens
gtgctgggattacaggcatgagccaccgcgaccggctagactgtaactttcaagaggtcatgagaataggcctctttccaacttgatcatcttgtatcaccaataccaaaaatagtatcctctcatagaatcactcataaacatttgctaaatgaagaaatataaaaccattaaaaaatgatgtagagtactttttgagatgtgatttttagatgttattagcatagtgtatatcataggatacactttatttttaaaaatctataaaaaacctatgtgagtgtcatcttcaatagaaaagttaaaagttaccttactagtttagtcaagggcattaggatcataaactaattctatgtataacagtataagttgagacaacagctttgtgatgtaggcaagacaggtattattagcttaaccaaatctcaaagaaatgttaagatttcctcaaaagaattctaaaccagtgttttttcaaatcatagtagtctgtaacttaatgtgttaaccacctctcattaagtaacactataaatgacatgaaagaccaagcacaagatggacatggactttgaactgtttatctactatcagagtttcagccacccatccaaagtgtctctctttttgttcacgtgtcaactgacacagaagcatgagggtggatggaggagagtggtagttgtaataggggaaagcagagctaactgcctcacaaagtgccttcatgaaggggtcagtgccatggccctgacctcaataggctagggtttcccaactcttcttaatttcaatgcaaacagactttactggaataccaagaacatttagggggaaaaaaaagaaaaggctttaactttaatgaagaaaccactcaagcaaaagagaccttggtatcaagattttctttgtttagaaattttaaagaaagctcaaccttgattcacttaaatctcaaatgaatgccctatctagtttggttaggcccatttagatgctgaagaggacactttttttttgagatggagtttcac

SEQ ID NO: 61692 - DNA, 2081 bp, Homo sapiens
ggcacttactttttggcttagattttggtttttcaataaatattaaagacacttttgtattcactaatactaaccccttaaactggagagtcagcaaaacagtctttcaaagaaatcacacattctaatagaacgaaacaagcttacacgacaccaattctgtaataaataacatgcgtaagtttccaacctgaaactccctaagtaaaagtcactagaaacaaaaactgaaacaccgggttcctgacaccccactcccacactgaagctcgaattacttgaggctgaattttaaaacactattacttctctgtgactatgaaaacaaatctatgaacacatatttcttacttacatttaaccgacgctccccacccatccctttaaattaggcagaaaactgaaaaccactaaaagcattacattttggtgtcttcttttaaaagttattttaaattactgctattaaaaccccccctccaaaaaaaaaaaaccctcataacagaatcaaatgagccctaaggcgaagcaggagctacagtgggggaagggaattttaaaaagacatccgtgttagtgcaattaaagtgcagtcctcgaaccgctaaacatactggcgccttgtataatttttttttcttcccaagggtaaaaagcggtaagaaaggcttagacaataaaacccagaggtcaattttaaatatgctgggacagtgagcaactatcgagaagcatcaaggtcaacgcaacctaaggggctcctctgatctttttgcggtaggtatttcgccagacttcaatgggcgggaaccgagtggggggcgggaaagttgggggaaagagggtggaaaagaggagggtggaaggaaagagatgagtaatggaaagaggaggggaggaaagaggagtgcgagagcaggccgcggaggtgcgggcagaggggaggccgggcgaggagtaggggaagggagccccggccttggccccggccccgcccagcccctgggaggcctgcgcgccttcccgcccccttaccagctggagcaggaagccccagagtagggcggccccggcaggggacagccgccgctgcggccccatcggactggtgggtgccgggtgggacggcacggtgcggcgcagctcactcggcggggtaggctcggagtcccgccgctgcgctgcctccgtggccggaccggaccggacaggcgcgggcggccgggctacgactggaccgccgctgctacagcggccgccacagcagcgcgacttcctcttccggccccgcccgtaagatgcggaaacccccgcgccgggctcggagagtcccagcgctctcccggtatccaggcgtcccggcgtcccggcgctacgaggccaccggctgcgggtctgagcctgtcgctttccggctgcccgactttaactcacaccgaagcctggcgggagaacggatttctcaaggctcggaagtgtctgagcgtctgctcggttccccagtaactacccgagtgttgcatgcagccagaaatctaagggtcaccctaattcatctgcctgtcatttgttcctggccactctgactcaccacataacccagatccatccactttctccagaactgctgccaccactctatccaggccaccaacttccctctcctccaaacgggtctcagtttcccctccggacagcccagtagccacataacagtcccagagccatctttcaaaacatataagtcagatcatgtctctctctatcacacttggaataaaataaaaacttggccgggtgtgatggctcacacctgtaataccagcatttggatggccgaggtgggcggatcacaaggtcaagaaatcgagaccatcctggccaacatggtggaaccaagtctgtactaaaaatacaaaaaattagctgggcgtggtggcacgcacctgtcgtcccagctactcgggaggcggaggcagtagaatcgcttgaaccgggtaggcggaggttgcagtgagccgagattgtgccactgcactccaacctgggcgacagagcgagactcggtctccaaaaaaaaa

SEQ ID NO: 61693 - DNA, 966 bp, Homo sapiens
ttgttgactgctataccctttacatctacagtatttggcatatagtaggtcctcagatatttgttggatgaatatttaatatcaaatgctgaataggacagtgtgcctgccaccccacagctcatagtttaacgagggacacagatgtgtgagcaaacacagttcagggtgagtagtgactcttgtttgcacaagatgttatggaagtatcaaaaggagttataaaaggggtgccaggaaaaataccagcctgagctgagtctgggtgagttaattttagccaggcaaagggtagaagaaggggggcacttccaggaagagtgagccattagtgtcaaagccaaaggtggcattgaaggaactgcaaaacttgggcttggctgaagttatgagtggtgaaagatgacatgtgagaagaggccagaggcaaaatcataaatacattgggactgtttgtgactttgggctttgtcctgccaggggtagagaacaaatgaataataaatagggcaatgacatacactttctgttttagaaagctctctatggtggctggcagggcagcagacgtgttgaaacaggtcaagaagtggaagccaggacacctgttagacatctgtagtaacaaaatccagggacactgagggcttgaactgtggcagaagaaatagggaggaggagatggatctaaaagacttgtagcagaatttggtaactttgaagacatggagataaagggagaggtatgattcccgggttcttgccctcggctatttattgagttgggtgccaaaggcgaagtaggtgggggttgatgggataaatgggtcggggggaatacttttggaagtgggtttgaaatgcttttaggatatccaagtgcaaatatctgctgtcaatggctatgtgggttggtctgaagcttaggggcacagtgaggtaagaactgcctcatctgctgcctat

SEQ ID NO: 61694 - DNA, 625 bp, Homo sapiens
accaaccttggcctcccagagtgctgggattacaggcgtgagccacggagcctggactttaagtcagtatttaaatattaataccaagtatccaatttggcaggaatgttacattcataacaatgtgtagcctgacccccatgagttttttgctgaaaatacaaactatataattatattttctctttaagaagtcttgacattattagacacctcccctggtttttcttgtttttcattaacttatacttggcattctgtgtcaggtgtacatgccagagatcacgatgatagggccatgtgatattgctggcctagtctaggcattagtgtgcaaccccatcagcaagtacagccggtcatttgcagtcacctggatcagctgagatgggaacatcagtttaaatgaaagtgtatttagagaggtgacccgctgtcacgagataaagaccgaaggccatgagtttaaaattcagtaacaaaagggtggagctctggaaactgggaggagtgagagaagtattttacaacttatgaacataaatgggcactatatatccttttaaaaaaaatataattaattttcttgaggcatggtctgactctgttgcccaaactggaatgc

SEQ ID NO: 61695 - DNA, 1370 bp, Homo sapiens
ttaacattttgcagatgaagagactggagctataaattaagaataatataaactgtgatgatgcagcttataaaagcagagttgggatttgaggcttctgacttcagctctctttctctttccactattccacaatgccaggaagatgaaggagttgaactccgggagaattcaagtcacctttcacaaggctatgttttccataggttcaaaaaaccaaaaaatccagacttatgctctagtttatcatgattaatttttcttgtggtaagaaaataatttaaccattaggtttgtttgtcgtagcaacaagaaatgaattactttccaaactgggaatatccctctgtagccaatgaaagaatgagtacaagtgtggaggagtaaatctgcataaagataaatataactttagaaaattcttgagacattgacagagttttggacctaatttctaaatgggcagaaagctctcttttagaacagcttctctgcaatcctgtgtagaagtgggaagatgaacatggagactattcaaggcagggatggtggacttagtgggtcattttcacttttttgagtttcaaaatcttacaaattatattatttttggctctttctgtgtctttgagaactgctctttctaccttaaatcacctccagaatcaccagggcaaacaagaagcttatttgaacttcaggtctctagaaaacagactgctgtgtcattgcacttggaaagcaatcatttaaagatagttttcaggcaggtgaaagaccagcacaacaaactgataaaactgcctctgtcatttgatctcctgcagccattctggagagaagacattcctgttaggaacctgagcaagaagctctggtcaggagacttctattttattaggatcctgccccaagttagaggtcaagttacaactcccctcaaaattactctgtaataggctgcattacatagaaaattccaacaaagcaccggaatgtctgagttaagagagctctttgtacattaagaagaaaaataaagttcagcagcataatcctatttctaagccaaatctggataatactaaaggacttccaaataacaccatttaactatttgcgagaattatgagtttgcactctgagcgatgtcctgtcccctgccccccaaacctcaatagaagcaaagaagctagcaacactctacctcataagcttactatttaaactgtgcaaaggtgaataaaaaaagtgagaataaagaaggtgatgtgggaagatggcaaggaaatgtcccattcttaagcaccttttaaaaaaagaattgtaatcccagcactttgggaggccaaggcaggcggaccacgagt

SEQ ID NO: 61696 - DNA, 843 bp, Homo sapiens
tgaaacagtttcaaaaatttttaaattaacttcctggaggaaggcaagcttatctttccctctttttgatgattctagatgccagctaaagtacgattgccattcattttctttgatttgggagcctaatttgtctaatctagcatgcaggaaagccaatttaggaatatcaaagttccctattttggaaaccttaaacctaggtcatctttagtaagatctttccatttacataaataattgcaagtaaaggcaccacaattattaaacataaactcagttggagtgcccacagggggccactctccttgcctttcctcttttttggaggatttatttcctatcttttttgtttttttttttttttagggaactgacctgcggactaaggtttttgtgtggtggatcgatatgtgctgcctgtcagtagcactccacagtgtgtcaccactgagttatttctacactcttacatgtctcaatttctctcttcagaggtctatcacctctgagagggctcaagacgctgggtgatcagcccttatgtgcatttcctggatgagcctttttaaattaatatttgttggagagtttcctatagggccgctgcacattacaggggatcaaccccccccgccccccgccctccgcagacactcccacgaggcccccggtcacccagaggtgcctttcagctgggaggagcaaaatgccctttcacttcagagctgaggaactcagtctctcacttacttatgaaaaacaacagttcagttcctcacgcaaagtgtgcacagacaagccaattgagattaattttgagagaaaaggcaatggagaaag

SEQ ID NO: 61697 - DNA, 2108 bp, Homo sapiens
ccatacaaccattttgttttactttcagtacagtattcaataaattgcatgagatattcaacgccttaatataaaataactctaggctaacataagtgatctgagacttttaaggtaggctagtctatgatgttcagtaggctaggtgtattaaatacattttccgcttatgatattttcaacttatgatgagttttttgggatgtaaccctactgtaaatcaaggagcatcatctgtatgtaacaccttgctcttagcagtatagaaggactactgatgcaattaattctgtcatatgatctacgtagtttttgaagttttgattctcgttagtatattagtacagggctgggcgcggtggagtatagcctcaggcttcaacagtactatcacttctttggaatgttatttagtttctttttaacttgattcatttttgatcccttggtcagttcccataatgctctggatcagggcctgcttgaatattaaattcccattgtttccttctgggaaggtctctgcttatccaatctggagcctatctttcttccttgtcctggatctggtagactattgagaaaagtccttacaaagatttcctgggaactggatttttaaaatgagtgcatgtgggaaaatactctccaagtgcaaaggggactctgtttttacctctacttatatttccagctcctcggggaaaataaaagtattacaggtcaaatctctttacaagtagctcaacttgactgtctaaatatgtggtatggagtagagttttatttcatggattactgcttgcactaggttagacataaactgggctgtggagaacttttggttaaatagagattttcattgcaaaggtatttgttgtagaggaatttacccagtaaacagatatcttccagctaatgtttttaccaggctgattcagaccgggtagcaggagcgggaaaacactgtggacacagtctgctggctagcggtcaaggcagaggcaagtctggcacaggcaaaagtctgtgtgaaatgtggacctgagtcatgaaaggaggggaagaaactagtatgtgtcattctgaaaaagctcttcttagggctctttgggctgtaaccactgcctctctccatagagagtcacagggcctcacttggctcttcctgctgcattttcagacttaaaaggaagccaccggccgggcgtggtggctcatgcctgtaatcccagcactttgggaggccgaagcgggcggatcacgaggtcaggagatcgagaccatcctggccaacacagtgaaaccgcatctctactaaaaatacaaaaattagccgggcatggtggcgcatgcttgtaatcccagctacttgggaggtggaggcaggagaatcccttgaaccagggagttggaggttgcagtgagccgagattgcgccacagcactctagcctggcgacagagtgagactccgtctcaaaaaaaaaaaaaaaaaaaggaatccaccttcaggcaaattccctccgcctctcaagaaagataataaaacaaaatggagagtcctcgtctctaaaaaacctgggtcaggttttgaatgaacgcagtaccgtgacccagcattaggggctaggaacgtccacagtcacgactgaggcttgctgctctggcgcccccttgggcatgagagtggaactgtatacaaagttgcctaaatccccactgctgcagtccccagaacaccacccagtgtctctttttctaggcctttctcagcctggagagtttcctaactttttgccattcccaaggtttttctctgaccaccaccaaacccttctcaatctactaatttttctaaacaaattattttatctttctaattctgcatgcatctctagtcactaagccccagaaagatcctgtagcaagctgtcaatcaataataaattagcatttctgaaattcatgagactttttcttagttttattgaaatatattttatgtaccataagacttcacccattataagtgtacagtgaataatttttagtaaattgatagctttgtgcaaccactgtcacaatccagttttagaacatttctaa

SEQ ID NO: 61698 - DNA, 2754 bp, Homo sapiens
tcccatataggtattaaaacaacttcaggatttcaaaaaaactcatttattaggtgacaaggaggttacagagattagagcaggtataaccgaagatagcttgtaagtgtagctgtagctggtgggccggttgaggttctggacttcgcggtgcaaaataattttgaagtccaaagtaaaagcaagcaaaagagtttattgcaaagcgaaagtacaccctcacagctgatcagagcgggctgctcaaaggtgagacagcatgcactgacactggggaaactccctttgtaggagtctcacaggatcattcatgaagcggggagaacgggtgctgctattaagcacgttctctggttttctgtcgccatgtgcgctgtggttgtatatgctagtacatacactgcatgtcttattagtatcttaaatcttcacccaggagtggtgttttttttttttttttttttttactattataatgagtataattcagcccaacgacactgatcatgggtttctgcgcttgtgagagtttggggattttcccttctgctctcgtacctctttgctgcaaaattttctaaccaggagcctcggatgtggtttgtacactatgggctggtttgttctatttatttagcaagtttgttccccttgaagggaggctatcaccacctacctaacctacctcctagaaacacactaggagtactgagagcaaattgcattaatctctgaaaacgcacgtatttatgccctaaacctactaccttagaaaattctagaaaacacaaggatactccaggatacattttaccagctagtcaatcgtcatctagccgcttgaaaactctgtacatttccaacagaatgagggtaaaaacggcaaataacacgtaagaaacgttatcaatgttgttttgactttgtgaattccctagaagggtctcagcgaccctgaggtcaccagaccacatttcgagagccattgtaccagactctgttctagataaaagacggagcaatcggaatgaataaaatactctctctatggggagctgtttacgtagtggcaactgcgacctgttctaaagtggaacagaaccgagcgctgtgagagggtgggacttggagacctatccttgcccgccgggccaggggagtgggctctagaaggatgacctttcaactgcgacctgctgaggaggagtcggcaagggtggccgccgaccagttctctttcccgcccacctccccaaatcccaggagaagaggggcggacgggaagcgacagtggccgcgagtccccggcacgcgacgggctctcaacctggcacgccgaatcctcaggacagccccgctatcacgcaactactcgggtgtcccaagagtcgccagggccggagccgcgcgcggcgccggggacccgcgtgaaaccgcctgtgggaagcgggcgggtggcgcgcgctccggggacagtgagaggcggcggacggcgcggggacgtcccgaaaaaggcgcagccaggaagacgcaactcctgacgcggtctcgggctacgcggaggcggctagtgggaaagggggactctgggagacagtgcctaacagggccaggcccccgacggcttcctcaggaggactcacggttctgggggattccggaaccgctaccccgtcgcgagaaaggaggtctacttacgcgcgcaatctcgagcgagcggccttttccacccccgcggtctcttgcgccctctggtggcctctcgcgagaacgacgctgaacttgttcaggtgggacgccaataaagatttcttattcaaaaaacaggaagtgcctacggaggccgggccggcagcggcggccgggcatgaagccgggcggctacgggatcgcgggcggcggcggcatcgcgggcggcggcggcgatgagcgacatagtggagaagacgctgacggcgctgccgggactctttctgcagaaccagcccggtggtgggcccgcggccgccaaggcgtccttctcctcgaggctgggcagccttgtccgcggcatcacagccctcacctccaagcacgtaggtgcccgccggcccgggagctcagggacatcggagtgaggcccccgcgccaggaggccctggccgggcggcgagacttcagggcctctggggttagccctccggcggggctcaggggctgctgtgtcggttcgtcctttcgtctgcctggaagcttcactttcctgctgggactgacagcagggaagccgagtttccacagttagttctgacactgactctttgatcgggggcacatctctgtaacctctgagcctccgtgtgttttctcaacgttgtggtggaaaagtactgatacataattcataggttttttgtttgttttgaggattgggtgagatgtcaagcgtgtgaaaatacctagtgcgatggaagtgtcagacattatttaccttccacaaagttttttttccctactcagtttccttctctcccccggtgccttcaactgaacaacagttcagatgtcgcatacctgaagagatcctgtgagcctcttgttgaatatctttggggagcttgaggttcttgggttacaacaacgtgttgggcaaagaaaaagcacagttctctcaaaatgtaaaatttgctaagtctctgcctcaagtgggctttgaaaatgagcagttataaaaattcttaaacttttaaaatttttaaatttttattgacggag

SEQ ID NO: 61699 - DNA, 2063 bp, Homo sapiens
tttcctggatggtcttgatgcttgtggatgttcatcagtgtttagacattgaagagttaggtatttattatagtcttcactgtctgagcttgtttgtacccatccttcttgggaaggctttctaagtattcaaaaggaatcgagtattataatctaaatatttggtcactggtgtttaaatccctcagattctgtttgtctgggaaagtctttattatctgtgttatggggcaccccaggcctgataacattgtgattcttgcacacttatagaggtaccatcttggtggtcttgggaaagatctgggagaattctctggattactaggcagagacactttttctcttcctttattttcccccaaacagagtatctctctctgtccatgctgggctacgtggagctggttgaggggtgacacaaacacccctgtggccaccaccactggccctgcactgtgtcagagccaaagccagcatagcattgagtcttgcctgacctgcagagaccactgcctggctactgctgatgttcactgaaggcccaagggctctttagtcagcaggtggtaaatccagccaggcttgtatcctgttcatggcagcgagctcccacctctggcccagggcaggttcataaatgccatctgggagccagagcttggagttcagaaccttaggattctacttggtactctattctactgtagttatgctggcatccaagctgcaagataaagtcctttccactcttccttctccttttcttatgcaggagtgtcttctcatggccaccattgccccagggccactgcgagtactgcctggttagtgccagtgttcactcaaggctcacatgctcttcagtcagcttgtggtgaatgctgccaggtctgggtctctcccttcagggcagtgggctcacctctggctgagggtggatccagaaatgccatccagaagccaaggcctggaattgggaaccccaggagcctgcttagtgctgtatgctactgcggctgagctgatgcctaagctctatgacaacgtcccctttactctttcctgtcctttcctcaagcagaaggagcctctccctgtggccaccaaagttgggaatatgctgggtcacatctgaagccagcaaagccctgggtctcatccaagtactgctgatgtttattcaaggctcagcagctctttagtcatcaggtgacgaatcctgctaggactgggtcctttacttcaaggcaacaacagtttctcttctggcctagcgtatgtctagaaatgtcatctgggagttagggcctggaatggaggcctcacgactgcctggtgacctcttctactgtggattagctggtatccaagttgcaagacagtcctctttagtctcctctctcctttcctcaagcaaaaggaagaagtctctcctgggcctgtaagctacattgtcttggaatgggaaaagggtgatttaagcatttctttggctgccccatctagtgtctcactgagttgtgtgtaccccaagtccacttgttctgagcccagaacagtaccaggacttgcccaggaattgcaatccttgtggcctagactgactttcatgtttatttaggaccccggagtgctttagcctgtggtgggggggctagctggaactcaggttccaaccactggaatggatgattcccctctgtctaaggctggcctaaatgttccttcataggtgctggccaaattctgtcctaggtttctttccactgtgacagggcagtgctgagttccaatgcaaagtcccacaatcactgcagtccctctccccaaagcacacatattctctctccatgccacgtggccagtgctggggggagggagaggggtgatgtcagcaattcaagactgtctgtcctatcttcttcagtgcttctttcctttttttttttcttttttttaaattattatcattatactttaagttttagggtacatgtgcacattgtgcaggttagttacatatgtatacatgtgccatgctggtgcgctgcacccaccaa

SEQ ID NO: 61700 - DNA, 3319 bp, Homo sapiens
accacagaggcagagattagagtgatgcagccacaagccaaggaagccaaagatggcctacagccaccagaagctcaaagaggcaaggaaggattctcccaccaaattcctctccaagggagcgtggccatgccgacaccttgatttcaggcttctggctttcagaattataagagaatacatttctgctgtttgaagccacccagtttgtggtaatttgttgcagcagttttaggaaacaaatataaggaggaaggactatatctcatccacacaagactttgtcgtgataaaaggagggtggctgcctccgcttcaccagctcagaataaaagggtgacctcagcctgagcaattcaggatggtgagtgcagatggtaagagaaaggggaagtggataacaggaggctcaggagggaatgagggaaatatgcaagatggatccgcagaggtagaagaaagagaaggacaaaaagcaaacacaccccaggtttgctggggtggcattcaacaacaggggcaagatggcaagcttggggctgggagacaggctggggtttccccagagcacagtcctcagagctggtcctgagacaggctgaggggaactgcagaaggaaagaactactaagaggattcattatgcaaggagccgcaaaagacctgcgagaagtagaaatacaggctgttgagagaggttagaatgagactcaagaaggagaaccaggaacaattgcattaaaataggatgaaatgtgcttttttgattcatttggaaatgagttagtcttgtaaataggcatagtgttacttatcctggcaaccaatgggcatcaaatgtgattattaaacacaaaataccatatatttgtgatccttatgagtatcagctgattattaagctaagagagattcttctgaaagatgtctcctttgagactatgtgttcccgaaagccagctttttggcttaacttagaaaatgtgtaaatcctcaccagttggttgtagagaagggcacaaacccatggacttgtggaatcttcagttgcaggagtcctaaagttcatctcctccaatttcgcaatgagcaggaatatctacccccaactgctagtacccctgaccaagatatatctggcttcccccacctggccatgtttttcttgcttaagcgtgtagattgatcattcactgtctttcagtggcacttagtagactgcaaaggccgcattttagaatgtgtacatgtggtgcctattcttaggaatttaatagtactaacttctcttactggtttaaagattcactctctcattcaacagaaatgtactgagagcatgctgtgtgccagacatggagatgagtaaaacgtggatgactagagaacacatatggatcattttactttggttgcttaatatagctgaatcaatagaattggtttgactcacccctagctgttggttggaaagacagggcaaagtctcaagtcactgttcttggacttattcccatggtggagtggctggtgtgagttatgataggagccagaattccctagtttcctcaatacctcaattcctccaatattaatacctaaattgttgaccaattaaaccctacacacatttattgttatactatatttgatttccaaaaggaccaaagcacacttttagtgtagcatacaggaaagattatcatagactttggaataagccaagaagttaaaattcctagctgagtgagtgtaggcaagttactctgggaatcagttttatcagctgcaaaatgggaaataatccatactttgcataattgttgtgaggtttaaataagataacatggtctatggtctgactgatttataataattctttccccttcacacttgccccaggatcacacgcaaagatgtgtcaaccattcctgcatcatcatgggcaggtatttctctgaagcaagagttcatttctccttgcctgttttttggttgtttttggagccacatgagtagtaaaagcagctgctgcattatgagaaggtgtaagcatgccagaggcattggtgcccagagaaagtggtcatttcagcagggaagggaggtattattgagctcttagtgcttcagttggtttgagtataaaaccaatgccacttagaaaaaaattatttgcttcagcaaacccgttggcttgctcaaaagttgcaataggaataaagtaattatttgtgaatgaaatgtgttccatcaacatctccatccccctgcagcagcaagttagggatacatgcaggcatactagtgtttgggggcttgcagtcagccagttggtgcacactggatgcccaaatcatcctttcaatggccaaattgcatgcttgacctgagagtgccgtatacactcaatttgctattagggcttagatacaaagtggaaaagatgctattatgtttatgaagcaaaatagtaacttaacataatgaaggcattggaaatgactgtagagctcctctggtgtaatccatatttacagagatagctagtgatattcaaattggtgaaagggcattgaaatcatcatgagaatgtgcacagctatgaagggaagtcagccaggtgaaatcaaacagccctggacttggagctgggatccccagaggagtcctggatctgtcgcttagtgagtggctttggacaaaccacctgggctctctgggctttagttttcacttcagtgaaatgggacttctctgcctttctcactaggtgaagacagggtgcaagcaaaatgttggatatgaacaggaatgatgttaaagaccttaaaccatgggcccaatccagctcacagatgagtttggtttggctggcactgtgtttggtttggctgggactggcattcaggaacacggaacctgaatgcctttaggtgaggcatgttccttgtctcccacaggctctacttatagctggtctgattgtccaatttatgttgcctgcctggctcctataggcattctgatttgggaacccttgcaacctaaacaccacattatagtggaccagcttcatgtgtgggtgaagtaggtagtatcattttagggctatctggaaagtaccatctcctttccctcctcctctcctcccacaagcccagcttgcagatgcctatcaagcttttgtgcaattccctagaaaaccaaaagcttctactgtaagggaggatgacattttgaaacttagctatgctttataacttaggtagacacatttagcaatttatttatttatttatttatttatttattttta

SEQ ID NO: 61701 - DNA, 723 bp, Homo sapiens
ggccactagtgttccacagctgctacttgagtcacagcttctccaccatcccacaccctttgggggttcctgaaacctggagtcttgcacctcaggtttcaccaccgcgttcctgctttatctaagggagtttcctcatttcagataagcagtctggtaagtgctccatcctctcaccctttggcatgctcctgtggcccactacagagaaactctcctctcagcctcctcctttgttcttgtccccactcactctcccatccttgctttttcctaaaaatcagagtccagatctgaccttctggccccacaagcctgctccttgttaaacgcagactgttctcaggcatgacagctgtgatctgggctctgccttgctcctctggtgagacacccttcccccatatcctactgtccattacagaattgcatgggggatggctgtgccctttgccctcccagccggccccacccatagcgactaaaccaacaccgatgagacagccctgccgtctcccagcctaacttgccaagcttcattatgagcaaaagatctgcaatgtggcagtgacctccccgcaacataactgcattctgacctccttcttgcagtgccaagagaaatgatggtgaactaagtgcggggtgtggggtcgttctcaaatgcggtcattgctacagaactagggtttttggttagttacattctttgtggaaggacag

SEQ ID NO: 61702 - DNA, 1076 bp, Homo sapiens
aatgttttaactgcagtcaaagggaaaatggaatttgacacagctttagaaatttgaagtgttttagactgccctaggaaatgtacaaaattgtcattaactgattcaataccacttgactatcacccaaaactaaaacttaagagaacgtggagataccattttaaaaacctatccaaatggcatagattgcttaaaatgttaatatcaaatgtgggcaatggggttgagatttggcatcatcaaacttcttttttattttatattttttataattttttgttttcaatttttgttggtacgtagtacgtgtatacaaacttctgggaatgtaaatgagcacatttctgaagggcattttggtaatacttatcaagactgaagaattttcatgccttttgattcagtaattccactgctggaaaactagcatgaggaaataatcaggaatgcaaatatttacatgccaaggtacaaggttattcattagagtgataattcaaatagaaaaaatacctcagcaaaatctatttcaaaaacaaaggattgggcagatgaaatatagtttagacacagaatctcagatagctatttatagttatgttttcaaagaacattcataggttaaagggtaagtgccatgggtaagaataacagtgtatcaagcctagtgttctaggttctataatactaagacgtatattatgggactctttccaagatgttggtttcaaaagaaatatagtccactgaaataagctctggactgggattcgcactcccaactcttctaataaatagtcctgtatcctgggcaggtcacttttaattctatagtttcaattttttaatctgtaatacgaaggctgatataaatccttatgtctcaaatcaggtgtagcagtatgcctgaagtacacaaatccactgttatcaatatggcagatcttcctgaatcatcaactttacttgctggcaaataactagaacataatgcttacattaaagtaaatataaaaacacatcgcagagcaaagtttacataatttttcaaagaaaagacatcaagatattca

SEQ ID NO: 61703 - DNA, 951 bp, Homo sapiens
ttagactttctctccaaagttcatctcagtaaaccctaaagtataaaagctccatctaaaaatactaagccactgaagactgtaactgtgttcccagggttcaaaccaggcttaagaaatatcaagatagaaatcaggcatgcattttccaacacaattccacatgccttaaagagctagttaaataaacatgaacaacaaaggcagaattacatgcactaaggcaatggctaaacttaaatgcatcaagactcaaatgaatccacaacgcagcctgcctccaacatccaccatccatccccaacatcatcaggcctgagggagaaaggaaaccaacccaaagttgttttaccaaaggtaaaaaagtcaaataaaatagaaaatgaatgaatttatatagaatattgggcaaataccactatatgatcttgaaaatagactacaacacagaattaaattgttgggaaaattcccatgtccaactctaatgagtaaaaccacacatttcttcctattgcaacacttcttgctgtatgctattcctgttttgcaactttgtgaattttatgacctaagggtcagagagttgggacatatttctttttcttccaaactacttatgattaaatattcaaaacaacctaacaacccaattctcaaaagaaaagctccattaaaagcaagataaacataaaacttatgaaatggtatttttccgcactgtttccacacccttaagcagtgtggttacgacctacaaaatagagatatccaatagccagggctgacatgtgatgacatctgaatcagtgacccatgccctgaagggatccatataaggctgctaatgaaagagggaaatgaagataaagaccagacaggaagacattaattctactaaaacttccaatgttaccaaaatcctgccataaccactatataaaacatctt

SEQ ID NO: 61704 - DNA, 1993 bp, Homo sapiens
atctttttgttggaattaagatcctgcattatcaggagatacagagtcaggcttaaagccacagactccagcagctcctcgctgccctagcacagcgggcagggggagccaaggcgcagcatcgcctccacgctccgagaccaacaccaagtctcttcacctccacgctccgagaccaacaccaagtctcttcgcctccacgccgagagcagctgcgaaacggacgctctggggtttcagccgcaccaccactttcctccaccgcagaccgaagggccgccctaggaggagccttctagtccagtcacctcaggcccgtttgcttggggtggagagtgcggtggattcctaagcctttcccctaacgggtgatttcctacaccagacgcaggacccacggtcccacgggtcccagggggaactaaaccccaaggctgcaaaggggccacgggtggggcccaccaacatctcacagcctcctgaggaggcgtgcgccctggacaggaggtccctgcccccgcgtctggcccctggtatcttcccctagggctcccggccgccgctcaccgtgaaggggacatccccgacgctgcccacggagtagcagttgtctccagggttgacagctccggtgaggacctgatgcagatgcatctccggagcccgggctggacagaatgcgcgggaggtgcgacaagctccgcgcctgaccctcctcgggctgcgagagccgtttccctctgtgcctccctcggaaacccgccccgcggaggctctggcttaactcctcgcccccctttcgccttccctccgcctcgtccctgccatgggagctcctcgaccgccgccgccgcccgggtcgccgctcagctgcggaaatgcccggatgttcccactgcctgctgcaccggcgcacaaatgcgggagggcaagggtgcttgtgaggcgggggagggcaccggggggaacgcgcgagccgggagcgtgcagcaagggagcgggccagcgcgcgcgcccaccgcgggggagcgaggtagagccctccccccgcggcaaagctctcagctcagtctttcttccccccatcacccgcgtttgcgcgtgcgcgcgccgtggtttccagggcaattgcgcgcgccacgccgacccgccgtcccgtgattgcgcgcgcagacgtgcgggagttcccttggagcctcccgggctgtagccgctgcggactggggcggaggtgggggcgggggcgagtggggtgcaggtcgctcggggccacgcagcagtcggacgccggggacgcgccacgagccggttttgctgtgttgaacgtattccagaatacagtgtgcaatggtcagtgccgttgacctcagaaggacacccgtcaccgggaatttccacctggagatatcttagatatcttcagtcttttcgaaagtgcagtacataagatattttattttacataaacaatgtaggcatcttgcaactatttagagaagccatactcccctgaaagctaattattttgctcccaccttttgtcacggttattctagacagcaaaaagccgccttagagacgggtgactcctttcgactttttttcatgagtaatttcatgaattagcagaatcgcctgattttccaaactatctgctaaactttgaatggttgataacaaggatcatcagctccctgccacaggccaattcatggcaaatgttctaacccatactatgcttaaatcacagggtaaggaagtaggggacaccaagacataactatctgtaaaaccaggcagaacgccaaaggtggtgtgattgagatataaaagtctttatgcaccacagaagaggaagaagaatgttgactaagggcgtggataaggcattatggagacataacctgacataaacgctgagtttaattttgacaggctgagatagacaagaaatgctgcaaatacagtacagaaaatagagggggtgttgaag

SEQ ID NO: 61705 - DNA, 601 bp, Homo sapiens
atctctggtctagttcaggtttgaaagggttaataacttggacactttgcccgtagcaggttcaggtatacctattgctatttcgcctttaggacccctagatcttgcccccaagcatccagctgctctatctctcttagtgcataggcttccaatgacactaagccctcccctggctccagagtgagcatatgactcattcctgccctggggagcatcacaggcttttgtgatagatcacagacccatgacagaatcattcagacatgcaaagagactcctgcaggacggtagtcgaggggagagttctctactgctttctgctggaaggagataggctggagatgctggcagtcatcctggcaccttgtggaatctgatactggagtcaccttagaggtgagcatttgaacttctggatcacagcctgaagacagaacatgctcagttccaagatccactaaactccacttggagtttgttttttgtttaggccaatttgagttaggttttctgtcacttgtagctgaaagagctcttgctgatacagtgccctttgaaatgcttatcagaaggggactacgactgctaatagtcattg

SEQ ID NO: 61706 - DNA, 981 bp, Homo sapiens
ggcctcacaactctgtaaatttacttaaagtcatcgaatcgtacacttaagatgggtgaattttgtggtgtacaacctcaataaaggtgtttaaaaaaataatgagaatctacaaacaccccgaatgactaaaggctactttgccatacctctcacttttggtggctctatttatagttatcttctctttaactagcaagggtcagcaatctccaccagcagcaggggttaaagttatgaacactaaagatttacatgcacctgagtttctaaatcacaatgtttattcccccaaaaatgacaatcatttcaccttttctcagcaaggtaactttcgttagcggaaatgttaagcaacaacttggcttagcagctaattggcagaggaagagaaaatcctgggaataaaactggctaggaagtaactgagggtactgcggggtgaggtggcctctggagagggaaaaagacaggcaagctgcctggaggaagcaaagagaaaaaagaaaaagtttatgcaaatcataggtccacctggctgcctcctttccactttcagtttctatatggctctctggaggtttctccagggtttctgcacaaaaattcacggtggcagcctagagctggtcaatttcctccagaggcttgactctaactgagaggagccaggatcactgaaaaagcaatagctaaatctagaatacagggttagggaaggaatcttaatgtctcagtggagataaacacacccaggggaatgccaggccaagcaagtttacgtctgaggtttgaactatatttaacggttactcaacccaccccaagtagtttcagtttcccagacccacttcctcaaatgcctcttcctctggtagagctgctcaagcctaaacttatatgtcattccatgtaaagacccactgctggtggaggggaggagatgaacactgagcaccagcaagggcagcagtcttttac

SEQ ID NO: 61707 - DNA, 1763 bp, Homo sapiens
tagctcacagttaattataagtaattttaatgaaacaatttgttccctcaggtttccatgttcttcccagaggtgtaatgctatacacccaagacacacacacttataaatttgtaataaacgcagccctccagctcaccacagttcttggctgctgcttagcgacaggtgtcacattcgcggttgccagtgagcccagagggtgtaatttcacttctacataaagaagcataatcgatagaaccagaaccacccagtaggaacaactgcaccattcctgactcatcacggagcttgttttcacagacaacaaaattcacctcagttgggctttgcgtaaatatagagtagtgtgatggggcctgcaaattgggtgaaggtggttcacggggatgccaaagccctagtcctcttcggcctccctcacgcgacagatctagtctgagcctgggcggggcaccgggaactcgatgcagctacctagggagggagccctggcggtccgcccctcccgctgcaggaccagctttggcgaccactgcggtggccagcagcgcgcgctgagcgagccctgggagccgagccgcccggggacgcacggccgtccctgcgactccccatcccccaaacccccacccgcagtcccacccccacccccaccgcaccccgagccgcaccgcctcctgcgcggtagctgccagcccgggccgcggcggcgcgccctgctcaccgtgacaccgtacttgagcgcgatgccctgcagcgtgtcgcccgcgcggacccggtgctccacatggcgctcgatgacgccggcgcccagcggcgcccgcacgctggcggtgctgccgtacgagcgggtcttggtgcgggccaggctcagcgacagctcggcctcctcggactcggagccggagcgcgagcgcggcggcggcgagggggccgagggccgcggcgcgcgggggccgccttcccgcagggacagtgcgggcgaggaatccgccatgggtcctgccgaggccgccgggtcggggagcttgccaagggggcggcgcctcctcctcctccgccgccgccgccgcctcttcctcttcacaggggctgcagcaggccgttccgcgggggcggcggacgggaagccgaggcggggagccgcaggccgggcatggcgggcgcctcctcctctgcgtcctgcctgccccgggcgcccgcggcacacgcacctgcaaggttaagagcgaaagcagctcccgccgcggcctgccggtaccgggaagaccctgcagagcgagggagccggggagcgctgaagcccgcggccgttggggctaagagagggctatctgcaggcgtcctaggccccaggtggacccctgctccattggcgatagagccctggcagaaccctgccctggccacggcgaaaaaaaaaaaaagcgttgctctgcctcctttattgattccccagcaggagccagcttgcacagaccttccagctctgccaatgccaagggtacttccctccccccaccccagtgacctcaaagtccacgtcacagtaaaacttaagatcatcaaacacacacagacagcttctccaggtccatctcaacagcctcagagtccagtcctttcaacattgcactaggagggatagtgcttctaaggcctaatgggtggcctcaaaataacccccctagttgttcgggtttcacactttgtacactagtgccaatttaagtcctggctgcctcgaaaggctggcc

SEQ ID NO: 61708 - DNA, 570 bp, Homo sapiens
cctgttctcccggccccgctccaccggggctgacggactgacggccagcacagccggctccgggatgagcgcacggacgggtgagcgccccggggggcgggtggggcctgttctggacagccggtgtctgcagcccccgggcccgcagcgcggtggccgccgtgccctccctgcccgcgggaggatgctccgcgacatgggcggtcggccgggcgggcgtgcagagccgggccgcctctcgcctctcgcctcccggcccggtcggctgcgccgggagaccaggcgctgcgcccgggcgggaggcgcccgccggggtgtgagtcccgcgccccgcactgcggtgccgcagcctctgcagcccgctgggccgcagcggggagggcgcggtctcctgtcctcccgggctgcggggctgtgttcttccactccgggctttgttcccccacttttccccttcctgtgcatgtttggtgagctcctggagcggtatgcatctccctgcctcgttcagcaggcgatggggaggggtggactggccggcgtctttcctgagatcgctggagctgtcac

SEQ ID NO: 61709 - DNA, 580 bp, Homo sapiens
tgcaagtagccataacagagagaaataacttgttatcaaacaaaaatgaacacatttggctaaatagttaaaaatttgttagaatgaatgggaacaggagtacagaaagcccaaacaggttgactattttaccctgaattttttacactaattttggatttacattattattctctttaaagctcttctgataatttgtaatactgaacactaaaaatgatgaagttatgttgtaaaggtttgaccctggaaaaacaggaaaaactgttcttcctgcccttctgctgaactctgtcccaactctttgacccttggatttcagtttagactgataaggttcaactgagaaacataaagggccagtgtctaatttctatatttgctgtttcacaccttctcttggacaagaaagtatagtaattattttgtttaaaagattctccctttcagcctattggattataatgaatagagtggttacaagtgtgcaccctggggtcacacctgcctggttcagatctcacttccattagttacacgaatttgtgcaaattaccaagccccagcttcatctgtaaag

SEQ ID NO: 61710 - DNA, 1520 bp, Homo sapiens
ggccccaatgtcatgtcctcgcattaacaaccaaggctacaatgcaagccctgccatgtgcgcttctttacaaaaggtcaaagtaaaaaggaaatctataccaaagagcctctagatactatttccagcttcggggaagtccatagtaggtacttccacgggtagagaacattatcttagactgggataagggttggtattcgcagtccccttcctacgttctgcccattgtaaagaccagggtcagcgttgagcctcgcccttcttgctagaactacaactcccaggatgccccgcggcacgggagtgcgcacgcgcgtcggaggcgaaggaggaacccaccgcacctacagggcggtcgagtgagggagctgctggcgggtgggtctggcaactctttgggaggccgacgcgggcggaccggcgggtgctgggaaccgagcctcggcttgcggccggcagtttccgtgggtctgtgaagaggtcggcggcccctgcgggcgccagtcaggtaagcccagcccggtgctttccaggaagtccgtctgcgggcgcgggtagggagtcgcaccggccatggtggctgaggagggagaggttgctgcccgccggccgcccgactccaggctccttcccgacgggtccgtctcggggagcaggggtgcgcgggggctgcttctgcgcgaacggcccgggcgggggacgtggggcgcgctgggcgtcgcccgccggtctaggcgcgcgaacctggcgttcccagtgaatcacccgcggcccgggcgcccgggttcgggaccggccccctcccctcccgctgagccgcggccgagctggctccctgcaccctacccagcgtcgccgggacgcgatcacaccgagatggcaccgagcctccttcaaaggcttcggcttgttgaaagtggggcggcggagtgggggagccaaaacttagggcacaccctttttgtgattgaaatgtggctgcccttgcattcaccggtttgatctgtctgctcttagaattaagttcctagctcccaggcagcacagctggatccggctgggaagtttgtgtgttagtttgttttgaggacgtgactgtgtcgttatatttttgcttgcgggggatggtgtgtttcctccgcaagcctgcattctgattacaaacagaaatgggaaacagccacagtttctttttttctttttaatgtttagttaagaatcgcatttccaacttgcccttggcctctgttaaaaccaaaagtcatctggcaatgaacactgcagtaaaacttaccccaggaggccatacttcaacaggaaataagcctgtggagatttaagttagttatgtgcagcctcccttggtttgtaacattttcatgcagctcatgtctcctctccttttctgagaaaccttcagattaatttttttggcagattaaattgattaattggcccgtcaaaaatatattaggcttggaaaaatagctttgccaagtctcatttactcttgctag

SEQ ID NO: 61711 - DNA, 1146 bp, Homo sapiens
ttaatcatgataataaagcttgatgtatctccaggcccctgacgttgattagagtaataccagtggtatctctaagtcagaagtgtgctgtgtctctgaaggtgcatataaatgccttcaccatgtaagagtgaggcatggtccattgaggagcattcattcttaccagctggggcaccgtactcatgactcagtggtgagcaatggggctagatggtatgccatacctggagcactgctgatcttgagaggaggaaaaagagtagtcagagttggaagagctagaaaggctttggagaggacagacttcagctagtctttgaattgtgcagcgtgtggataagatagagaggtgaaattcgggcctggggtaaaaaggattgtttaagaagagtgacatcattgtgggaaacaaatgaggcggccagctgaagatgaactttggatatctgtgaggccctgaggaatctagcctgattaaagcagaggattcctagtgattcttagagcaagtaggaaggggagttttatcaaaatcacccgagaaactgtcaaactacaaacacctaacaagaaacatttctaagtaaaggagtaaaatgttaaaagcagtgttttaggtgactgtaggcaagatacagatgttagagcaggaaaacaggagcttagagtcagtttgcttgtctagagcctggtctgacagagggcttagtaaagcagtattttttacttcctctttttatgaggttccagaagtttctctaggtcttagaacctttcctgggaaggggcagggctcagagacatagggctttgaagagcctgcataggactttagaaagttgtttctcttgatgtttccttagggaaaaggttttgagaaaacataccccaaaactgccctcaatcccagtttcaggatttcaattaaatagggcctttggtccaaagctgtggaacttgggagaatatataattacatatttcttaaaatgagctttgctattggtttcgcagattgctagttttttttttttaatagcattctgaaattctaatatgactgtatgatggccgatggttcttattttgttttttctaccaaagcacttcttgctgttacctgagtgtggcatgcataattct

SEQ ID NO: 61712 - DNA, 960 bp, Homo sapiens
tagaatcctctctgaagaaaatgttctattagaaaacgtatgctgggcgcggtggctcacacctgtaatcccaacactttgggcagccgaggagggcagatcatctgaagtcaggaattctagactagtctggccaacatggcaaaaccccatctctacccaaaacgcaaaaattagctgggcgtggtggcaggcgcctgtaatcccagctacttgggagtctgaggcatgataatcacttgaacccaggaggcagaggttgcagtgagctgagatcatgccactgcactccagctttggggatagaaggagactgtctccaaaaagaaaagaaactgtactaatgtatgtgcctattttaataataatgtaagtgaattctacctaataaaaaagaagtttaatgtttggagcaattgtacattgctgtcctaaaatcctgcaatgaagtgtttagtgcctgtatcacattccagtctgtaattcttttttatatgggtaatcttcggaagcatatagcattagcattcttattggtcatattggctgattcattctctctggcagaatgcccttctgcctgcagggttccggcagaagaaccagacatcaaagtccaccacagggccatttgatagagagcatctcctttcatatctggagaaagaagcattggagcataaagacagggaagactatgtgccctacactggagaaaaaaaaggtaagccccagaattttaaagtcattatgtggtaacacttgatttttctttttataggtgggtgtggagaaaatcatatttttagaggtacatcattggtagccttaaatatatgatactgttgacttagacatttattggtttagatactttatttacatttttcatcaacttggtcaataagtttcttcttaatgatgttagtgaggttttattacacaatgattttgaataac

SEQ ID NO: 61713 - DNA, 1438 bp, Homo sapiens
aagagttattatatgtaaatccattaataatttcacctcatgatttgtgaaatgattatatgttttacagaattgaaagcatatgtcaatatatgaaaagaagaaagtaatcctaattaagtgaagctcaaggccttatgtcttacatgcatttaggggagtattttgtcctatactggtgaatattttactttttacctcttcctccttaaaattttgcagaatgtataactgagacataggccagcacaggagtgaaagagagtattcatccagcttgttctcgtttggagaatggtgaaaattctcagtgctgattattagttcccatcatatttttacatagcatgcatattctgtctcaaagatagataaggcatagaaccttgtcatgaatttatcacttgaagaaatactgtgtcccagtcttcagtattttttactacctgtcattttgttttgttttgctggggactcctcctctctattgctggtatcatgctccgcccttacctagactaagaattttttttccctgtgttatttcacggatggaccagagccatggctgcaccttatatcctatacagagatgtgcattctgattctgtttgagctgctgactcacccggtatgggctcctccctgccttgcaccgcactccttttcttcctgctgggccttggggtacagccatttatgctttttggttgttttctcttttcctatcctgagaatggaatgcccttttgttctttcccaagaattccacatgcccctccctgcttttttaaaggtaaatttaacccagttgccttaaactaaggacttcccatatgctgtccaagttatttattcacagttatgttagctttccagaaaacctcctctttctcacctttctgagtatgtgatttctttggaggaaagacagacctgatcccttagtaaaccagaaagatcatgattataaacctgcctacatcaagaggattacataaccaccactgggcaattggtttccgctaagtccaaaggtaaaaactggctcttatttttgtaatcatattgtatgaaccctaaatgtcccttgtagacctctgaaaagtggtcttcccaggcactgaagctgatatttgaaatgggctatttacattagtcatgcagatgctggcatctccttttcagaccggtcatgcaatatcatttgaatgattcactgttaactcccttggggtgaggagttagccagatggacggcttgttactcatgttaaccggtttcatggggaacatttcctggataactacacccactctggatagttcctttcctccagcatttctccatatgatttacataccgtaaagtactgcctttttttttttttttttttcctgagacagagtcttgctctgtcgcccaggctggagtgca

SEQ ID NO: 61714 - DNA, 1044 bp, Homo sapiens
ctgaggcaggagaattgcttgaacctgggtggtagaggttgcggtgagccgagatcgcgccattgcactccagcctgggcaacaagagcgaaactccgtctcaaaaaaaaaaaaaaaaagaattatctgaagtttgcctttcagacatttctatatttttcagagatctatatacatgatttgatatttgagggctcaagtctccatttaattttttttcttaatacttcagtgaacacatgaaacttgtctttgttagcatggattaaaattagagtcggttgcttgctttgacagcacatacactaaaattggaatgatacagagaagatgagcatggccccttgcaaggatgacacagacattcatgaagcaatccctatttttattgagttctggcaaaaaataaataaaataaacttaagagtcaggcgaacttaattagatagttataaaaatgttcgtgggaacctgatactttagtccttctggttttattttcaagcaagcacccagcctatggctgaacaagattttatatacgtcatctgaacgtatggtcttatctattaaaggccgacaaacagaagtcagcagtcagaagagcacaagagcagagtgtctatggcctggccaggacaccaggtgtacctgttggcttctagttcctctgtcaaacagccaatttaggccaaagtacacactacagaagtgacagagccatgattcactctatttgtcatcaactctggaacctgtggtttttgtcctctctaggagccggccacaatgctgatagccctgaattggtggccctcagtgaatgctctctagtggctgataggtgagagcgcaggtagcaagatctgaagttgaagaccttgttctgctactagagaacacccctgagtagtttgacatcaccagtccaggaagaggctggtagtctcagatacatacatgtaccgttctttgctgtaaaagctgagctagttgactggccacttaggcagccaaagtttatggtagccggaagtgaccaca

SEQ ID NO: 61715 - DNA, 1768 bp, Homo sapiens
aggccaacctgagcaacacagtgagaccctgtctctaaaaaagtaaactttaaaaaaacacccacaatcctgtgccagaaataacttccaagcagcatgcacatacactaattcattcatttcatcaacaaatccttcattcctcctctctgtacacagaccccatgcactccccaatctaacatcacagactccggaaattctggagtttctgcacaagctcttagagaacacattctctcctatgtgaaacatctatctgtaaccccatcccattatccgtcccagactcgtcatccagacatctcaagctccctatcacaccatgctctggtttcattcaagacggcattctgaggccctctgtaaattcgcccaccccatcccatattcctgcattcatttccattcattcaaaaacagcccttactctacgctggcctgtgcaaggcaaggcggaacaggactccaacgttcctacccgcgctgcgcaggctcgcctgcacttccacccatgccccgcgcccctttcgctccacaagctcccaggaaccgtctgctccaccgacacccagagcctcgaggcgcagactgtctgactctccatcctgcccgccggaggaggatggcacctccgggagtgcagggggcgctgaggcaggagtggaggaaacgccacctcttgcccgcggcgctggagcctccacggttgtccggctcccacagcggaaggcctgccacgcacccatcctccgaagaccagcgaacccacctttacgctcagcttcgctgtcggcgtcgctcccgaagagatcctccatatccgccattatcgctcacgtccgctgctgcctcggttaggggcagctcccggcctctctttacggcacggaaccactgaaacacgacagtgtcgcaaagattcgccgaagacactcctttccttacgtgacctagttttcgctcgcccagtgaacctgttctcgcctgggtatgcatggtatataagcccggccatttcgtcaatatctgttatttgccaggattcttaccagggggcgggggggtcctgcgttcggttgcgggtgtggatggggtgggcggtgactggcgctctctggggaagggcctctggctggattaaacctatcgcgagtcaggattgaagccctttgtttcttactgagcagctgttctccagttatttcatcccaaacccctttaccctcttaaaaattgttgagacggagtctcgctcagtcgcccaggctggagtgcagtggcgcgatctcggctcacagcaacctccactgtccgggttcaagcaattctaattcctcagcctcccgagtagctgggacgacaggcgcccgccaccacacccggctaattttttgtattttagtagacacggggtttcaccgtgttgcccaggctggtcgcaaactcaggagctcaggcaatccgcccgcctcggcctcccaaagtgctgggattacaggtacgggtattgatatttactgtattcttactaatacggtaataaatttttaagttactaattcatttaaaaataatatacatgttaacaaacagcttttttaagctttaaatgaccatttttttggccgggcgcggtcgctcacgcctgtaatcccagcactttgggaggccgaggcgggtggatcacgaggtcaggagatcgagaccatcctggctaacacggtgaaaccccgtctctactaaaataaaaaaaattagccgggcg

SEQ ID NO: 61716 - DNA, 1593 bp, Homo sapiens
aggccagcggaacatgaggtcaggagatcaagaccatcctggctaacacggtgaaaccccgtctctactaaaaatacaaaaaattagccgcgtgtggtggcgggcgcctgtagtcccagctactccggaggctgaggcaggagaatggcatgaatgggaggccgaagcttgcagtgagccgagatcgtgccactgcagtccagcctgggtgacagagcgagactccgtctcaaaaaaaaaaaagaaaaagaaaaaaaagaaaattcagacttatgtgaagaaaaaaagaacagaataaaggtaatgagtcagaaattatttcttaggacagaagcaaagtttgtccttttggaaccttttaaatatagggttgggtttaggaacccgcttcctggaatagatagactttagactccttcctgaagcttgagggttaccagagagctatgtcctaaaaagacctttgcagcaggcaggatgaggtcagcgtactcaacaccagagcaggaacaactactggaggaaagaatcagaaggaacaaagaaaggaggatggggtacggagggtgctgtgggtgttagtggaggaagctgaataagaaaaacgatatgcagaaaagatatcaaagaaactgaaaatgagaagtataaggaaggaaagaaaggacggaaaaaaatagattaagaatacaaagggaaaggagtgacagaaggggatggaaaaataattttttaaggcacataataaaatagtactgaggtggggaaatattgaaacaaaaatgtgaaaacatcccaacagcacaaacacagagacagagagaaacatcaggaaatgtagacttccctgccaaccaaaattttacaaatagaaaggaaccactaaaacagatccggctcaaacacaaagcaaaactgaaaatttcactttacagcaaaactgctctgattagatctttcactggatttccttatccaactggctgatttagaatcgtgtgagaacacagcataactgcagagatactatctcgtcggcgggtggggactgctggcacgcaggctgcatctggccctcagtatatttcatctcacccacagaggactaccaagaggagataatgctgaatttcatgcttgcaatggcaaaaaagcattgcagtattaacatccttaacagtaatatggcaaaaggccacaagatggtgatggtataccctaaagagatctcaatcatatgtaaaatgaggtacacacacatacacactcacacatacactatacacttactaatttttctttagaaagaaaatgtcctgtgttggtggtggtgaaggaggtcttagataagaggagacttgaagaatactgcctttagatagcaatcaaaacacttcttatgataaaatgaggcagtgttttttcgtgtttttcccaagtaaaaaaaaataaaaaaggtatttttcagactagaaaacactaagaaaatatttttcaactataggcactctgatttgtatgcatctgctgataaagtaatcatttatataaagtaactgttaccttttaaggaaatttttaaattttttcttg

SEQ ID NO: 61717 - DNA, 4221 bp, Homo sapiens
taggattacaggcgtgaaccaccacgcctggccctttgtgatctttttgaagtggtctttgcctctttcttgaagatgcccataataatgactagaagggctattctatgtctggttctcagcaagatggtgatgaagtcattgaaaaaatatgctgacctgcgtctctaatttcataaatacttaaatttcacataaacactgaaaaggctccttggactcaataagccatgataagtaatgtaagtttgcttttagccaagtgggcccaagaaggcacccatccacctttctacgtttcatagtgcatcccttcccaaattcaaattgtcctatcccagttcctgcaacaagccaggtactctggcctcccagtctttgctcacagaaacaccctccccacctcctggttatatccgctcctccgggatccagctgaaaggccaccttggcgaccactcctgaaagccttcctccatactctggcagaatgaatgaccttagtattggcctctaacgcgtctgtcttgtgctcgggctgtcgccttccagccaatccatcttaaggtccacccttcctggagactgaggcctcttcctctcggattgcccagtgccttgcacgtagtaggtgcttagtaaacgctggcactgggtttggtcactttgttcccttaatgccagggcaggtagtagagcaaacggccccagctgtcttcctccctgcccgcccgcaggcaaagcccccaggagacgccggacgagccgcgtgcctttcccaccgcctccgcggcgcgcgcagcccagtcacgggcgctggaaattccggcgcgtgcgggtgcgctgggcagggcgggggcgggagaacccgtggagtgagcctgtgacgtgagggggcgtggcaccgcgaagccccgccccctcttcctcgccctctctcgcgggtcggggttacatggcggcgactgcggcaaagcgagagcctcggagacgccgctgccgccagcacagccggagacctgagccgacactgggggcagtccgcgagccccgcactctctcgatgagtcggagaagtcccgtgagtgtgtgtgtgtacgtgtgcggggtgcgccggcggggcggctcgggagggcgccgcggcgggcccggcggcggcggcggcggcggcgacggcggagccggctccctcctccattgtgtgtgaccctccggcggctgccgctcaacaaaggcgtttttgttcggtctgccgcccgccccctgctcgcccgcctgcccgcccgctcgggcctggccggcgcgtccccgcgcgggcgggcgggcggcgggctggggtccccgcgtggggccggccaggcggccagcgcgcccctcccacccggcacgcccctcgccggtcgccctgccaggccgcgcccgctccctggccccgcacgcctgctgccgtcccgccgcctgcgcctggctccgcgggttcgaaacccagccggaccggaccggagggcgggcgagcgaggggcggcggcccggggaacatgaggtggcgtggagtctcgccttactggcacgctgcctttcgaaatgctcccgcgtctcctcccccatcccacccggtgactcggcctcagctgactccggccgggcaaagtctccagtggcgtagcgcgcagcgctcacccggctcgtctcagagccctgaagtccgcccaagttttgagtcttgccatgaatgaggtactgaaaactcggagacgaaattcctaatttcctccctcggccctacagtctttccttagcttctttcgggaccttaagtggtggtctgtaaaagtgcccaaatgaaagcttgttttgtcggttcaccaaaaagggccttgtcactttgctgtgcattttagtccgccttgtgagttgtgtcgaaaagtaaaggtgttttggcatccttttgtttcttggcgagtgtaggacccaaccggtttaggtgttagggggatctctgtgcagcgggagcttcttgattcctttcctgttttattttttcttttgcttgttcattggaaaaggtccagtgaaagggactggtgagttggaattagaagcctacttgtattaacggcagaattcgtgttcattgctaaagatgcagtctcagtaatgacttttttttttttaacggatacagatgatttgtcaaggggaaaaattaacacgccatacaatgaagagcaagcagcttcagagtaattttctgatggctgattcttctagcctgtctcttacagttccaattgcacatgtcctccctctttaacgctggaaaactgagatggaaagaatgatctgaccagaagaatgtagggtccaaacagggcctggccctgaaatcaggaatttcttcatagaaatatcagattttaatgtttaaaaaataattttgaattgggtgaaaggaactttgtctttagatagtagttgttcaaacatgtttatgaagtgtttgctatgtgccagggattgtaaagtcatttcacatatgttacatcatttattaagaattgccttaagcttgtaaaattattcattgatgtcctgaattcagtaattgcagttaatctagaaaatatgccagatttgagcagaacatatttgatcacctaggtattactgttgagaagaaaacactggaaaatggagactattttagaaaaaacttcgtatatgaggatattctggaattcatttatttgcaaaagaggattagaagtagtcgttggctactttctgttattaaaaaatccagagaagagtgatttgaagtcagttaattttgtaataaaaaaatgcacacattctaaagactaatgttagcactaaaagtgttgcagtgctttacataaattcatttaaagcatcgtgagaatcataactgacaaaatagtaaggtttgctgactcagggtactttgctgaaggggatgggggtcgggtaggaggaagcttacaagtgctgctgcaagttttgagttggatgatgactcatgctgcccacggactgctacgtggctttttttttttttttttttaaatacactgtatttttttctaaatgataggctaaaatgttcctgtccacattgaaattctctctcattttttctgaagaggaacagcagtttctctaaaaaagtaatggcttcttaaattgcattttaaaaggatatcatataccctacaggtggaattgtgtaacatttgctgagaggaaaggtaaaaccaatttctggtcaggtgctgaaattaaatgtttgatactagcagttttttggctactgctgagagagatttgttacaggttgtttataaaggacagatagtacttttatggtgtcggtagaaattgaccttatgtttttattggttatgtgaaagttatctttatatttaatatttaatcagatatggctctgaatatgaaagtttcactcagaattattaaaacataattatatattgtgctttgtgatttatgtgaattttctgttttaataaagacaatttgaaataggtattagtcactatttttcatggtttttttttaaagataagctgaatgtacagttctaagttgaaacttggtaataagataaatcttttgactgattttaaaacagccaacgtttagcaaggtggcttaaaataagattgagagggggaaaaagattgagaatggcagtttaagagtggggctgggtgcgttggctcacacctgtaatcccggcactttgggagcctgaggtggaaggatcgcttgaggccaggagttcaagaccagtctgggcaacataacgagaccctgtctcaatttttaaaataaaagaaaaaaaatttcccaccccatcctctggtttttctgtgtatactgtttatttttccaaagggatttgaggagtttgtggacagtaaagtgtttgttgtttttgtgagacagggtcttgctctgtcaccctggctggagtgtagtggtgcgatcactgttcactgcaacctctacttcccgggctcaggtgatcttcctgcctcagcctccggaggagctgggactacagctgtgtgcgaccatgcctggctagtttttcgtattttttgtagagatgaatgttcacagtgttgcccaggctgttcttgaactcctgggctcaagcaatctgcctgcctcagc

SEQ ID NO: 61718 - DNA, 963 bp, Homo sapiens
atttacagagttgtgtaaccattaccacaatctaattttggaacactgtcttggctcctgaaagatcctgcaaaccattagcagtcacttctcatttcctctttcccccagcccctggcatccactaatctactttatgtctctatggatttgcctactctggttgtttcagataacatttggactttgtgacaggcttctttcatgtagcaatattttggaggtttacccatgttgtggcatatgttagtacttttttcctttttacgggcaaatagtattctgctatatggatataccacatgctgtttatccattcctcagttgatggacatttgggtttccacttcttggttatgaattatgctgttgtaaatatttgcgtacaagtttttgtgtgaaaatatgttttcagttctcttgggtatatatacctaggagtggaattgctgagctgtgtggtaactgtttaactttttgaagaacagtttcccagcgcagctgtaccattttacattcccaccaccaatgcatgagagttaaattttgtctttttgagtatagccatcctatcgggtatgaagtagtatctcattgtggttttttttttttttttttttgagacagagtcttgctttgtcatccaggctggaatgcagtggtgtgatcttggctcactgcaaccactgccacccaggttcaaacagttctcctgctctcagcctcccgagtagctgggattacaaaggcttgtgccaccacgcccagctaatttttgtgtttttagtagagacggggtttcaccatgttggccaggctggtctcgaactcctaacctgaagtgatctgcccgccttggcctcccaaagtgcaaggattacaggtgggagccattgcacccggcctcattgtggttttgatttgcatttccctaataactaatggatgattgaatgtctgtcc

SEQ ID NO: 61719 - DNA, 2343 bp, Homo sapiens
caagtctatgaagatgccatgtccctgtccaaaagtgattgtactgactcacattcctgccagcaatgcacaagagttcttattcatccacatgcctccaagcaagaaaccaagtttcttccattgaattaatcctaccagctttgcaatgttcagtttacagtaggaatcaggatttctaattccaaacaactgcatggctggaaatcatgactacaccttagggatccttaagtagccacttcaatgtgagattgccttgtttctcatttcctattgctccagccactgcagcttgggaacagaggctttaaatcttaaaggctgagccaattatgtcattacactggggtccatacctaaggagaagtagatcatgaatcaaatcgggttttcaaataaaatccaagcaaacatcacctttgcttctcagttaagacacctgcatagtattggttatgaaattatttgcaagcactgttttccatttgatactttggtgtgttttatatagagcacatttagttagtgatctagtcagcaagtggaccgttgtctgaaccgctgacctgctcccagccttttcagtacctgtttactattgaattaaaaatcaatagaagctctaccctaagtaggttcatcatgtatggcatattaatcaattgcagttttacctgatgcctctccatgtgagcattgtttatcattcagatcctagtaccttctgagtagagaagaaagaagattgaaccggaaatcaggagatctgagttctggacccagttttaccactgactctctgtcatttgggtgtcacgatcttggtgagcctaagttccttattcaactagaaatgcgtattactcgatactgacctggaacaacttctgaaccagacactgtcttactcaattctaacccattataatagcacagcgattagctcttgccaggatgtgcttgcttatagatcttatttctataatatctttattgaactggctgcattaaatgtgccttttaagcagattgagaatgaaattttgtgttcagtgcacgtttaccagttgacaggtagaggaaaaggcaaaagtattagaactccagggttgtttgcctttgaaagagcagtgtaaactcactaagctctttcctgtaggatctagggcagtctccttaattaagccaggtgaagagaaggatctttgtgagctctttcaacatagattccaacatctatgtaacaaatatcttacagaagggaagggtgtttgatcatccacgttagagcactgtttcagttataatgcagagctctaacaaagaaactccactggattcgcatgtttatcttagtataatacagtggtagtgttacaaacctagctaagcagaatactgactttccattacaattgtcagcctctgcatcatcttgcttaattaggtcttagtgctgttgtagctgggtgagtgggaacgccggtgccagatttgagatgctgctcccagtctcctggttcaaagtccagtccaagcctgtttcttcatgcccaatgtaaaccacaaacttggatccacgtctgtacatttagactctgcttccacccggacttaccaatcccacaccctcctgacttgaacctctgaggcaacctcagctgccagctgggacattgaaccttgcatgcagcattgcatagtgtttaggcacacatgcttcggagtcagatcaaatcaaagcttaaaactgttcttctgcttacaagccttgtggccttgtagaggttattcaaccttttgattttcctcatttgtcaagtagagctaatgatacctaattcgtagagttgtaagaatttaatgagatactgtacacaaagcctttttagcatgatgcctggtacttaataaatcaccattgcccttgtcctgtttgaattactgcccatgccacccaaattgtactgaacactggattctgaccttgacgctgccttcagtattgcattctcctatcaatctaaacttctggccttgacctacagatggcttcttgctctagccatagtgcccaccagctctatccaacttttggctccagcttctggtcctttctcaccagtcaaaccattgcccaaacaaattaagtgtagcagctctcagactccaaaagactagactgagcccatgagtctgcaattgcttcccccaccccaccccccagaacaagcatcttcatttagaagccaaaagccttggagtcatcttagactcctttctctgaaaactcacatccaatccatcagtgaatcccatggccatatccagaatctgacc

SEQ ID NO: 61720 - DNA, 3342 bp, Homo sapiens
gcctcccaaagtgctgggattacaggctgaaccaccgcacccggcctcataatgattctaaagaaccctctctaaatatgtcacacaggttgcaaaagtccatgataaatattttttcttgtgtctttcacaaagttttttttgtttgtttcaatgtagctcaatctgttaatattgtcttttatatagccatacttgggatggccttccccataccaaaattattgaactagtcttctatatttaatgttgtagatttatatctgtaatccacttcagattatttatttttgagacagaggctggctctgtcacccaggctggagtacagtgccacgatctcagctcatggcaacctctgcctcccgggttcaagtgattcttctgcctcagccttccaagtagctgggattacaggcatgtgccaccatacctggttaatttttgtattcgtggtagagatgcggtttcaccatgttggccagcctagtctcaaactcctggcctcaagtgatccacccaccttggcctcccaaagtgctaggattacaggcatgagccactgtgcctggcccacctcaaatgtatttagcagcttaattttgatataatgcatataccatacaatttgcccttaaagtatacagtgacatgctttttactatattaacaagattgtgcaaccatcaccacactctgatctcagaaaactttcatatcccctaaaagaaaccctgtccccactagcagtcactcctcaatctatcccctggatccagtggtcctgggtccctgactctggtgtctctctggactttggagtccgcttgccctgccacgcctgcccatcttccctgcccctccctgctttcgtgttcttctcagaccttggacttggctttttaatgtatattacagtgtccacccctcccctctacccttgggaacagcgagtcctggatgctgctttctttcagatccagggcaccaactatactaatcagcaacttgtcagcctctaatacatgtttctgcttatccctgaacaactcatcctgactcatcccacaactgctcacgattcagtctgaacatgtctcactcagccatgacacccaggagacagggccttcaagcttgattctgtattccccttcccctgatacgatcacatgtaatagatgcatgtgaagctatgggaagaaatgaggtggttgagaacaagagtgaatggtgagaaggaaccaggactgacccctgtaggacactaacagtcagaggccagagacaggaggcacagtcagcaagggaagccaagaagaagtgatgaaagaagtagacagaaaatcaggagaacaggactcagaagtcaagagacaaaagtgcttcagcctggagggggaggccagcaggatcaaatgctgctgagagaattcacatatgaagctgactaaaagatacacaatggacttggcaacagaaagatcattggtgactttagcaaacttccgtgtccatgatcaggtaactccactatttaacatcctttaagactccccagtgcctttcagatagagtatccttcgttctggcatcatcttttttttttctttttttttttgagacagagtcttgctctgtcacccaggctggagtgcagtggcgccgtctcagctcactgccagctccgcctcccgggttcacgccattctcctgcctcagactcctgagtagctgggactataggcacctgccatcacgcccggctaattttttccatttttagtagagacagggtttcaccatgttagccaggatggtctccatctcctgaccttgtgatccacccacctcggcctcccaaagtgctgagattacaggtgtgagccaccgcgcctgacccggcatcatctcttatcacttccacacactcaccccaggctccagacatactgagctacttgcatggatagatggcccattctctcttgctaccgtagtgtcccctctgcatggaaccctttcctctctgaaaactctcaaatgtccttcctgattagctcaagtgccatgtcctccaggaagccctccctgacctctcagattgggttgggtggttctcttctctctccccatagcaccttgtgttggtacaaggtacattttcccttgggggtatgtcttatccagctttgtttcgcagtcctctggccagggcctgtcccccggttttcccaggcacgcagtgaagcaagccttgttagtggaggtgggggatgcatccagcttccctcagaccagaaaacttgcaagccaaactggctgtgagccacggactcctctttgggttcacataggtcaggtttgctaagagacctgggccaggagtgcaattcctggcaatttagtccttggggtcattaggttgcaaaatccccagtgtcatcaggttgattgcttttcccagcactatctatgtctccccacacaaccggccttggcatctctccacctctatctgctctcctgccccaggtcccttccctctgcatgcactcatcttccaagcatctgaggacctctcaccgactcacatttgcttctgcatgtattggtctccctggggtcttcccttgccccacaggtctttgcaccgtacatgggtaaccctgagtctggtctctctggttggatgtgaactccctgcaaggacgaggagaacactcttcctccttgcatttacggagtgcaaacctcctatactctaccggctgagttcagggaacatcgacttgtatgttatcagtgaccaaagaggcaggcattagagggccaaaagctttcaaaccactttgagtgtggttcttaggcgcactggtggagctacacccaagatgtacccatggcacactcctcccctaaaaccccactcccaaaatcagagctcagtctcctccttgccctaaagccaggcgcccccttgtggaagaacgccttctcctcagagaggtcaagtgccgctccttgcctgcaaaccacacgttgcccctgacagaaaactcttcctaagattagagagtagattcgctctgcttttaaaaacacgtaataatgcatgtgctttattactgataataaaactgtgcctattcatgtcataaaatttagcaagtgaggcaaattataaaaaagatcccattaaaaaaaattaccacaaccctaccttccacagacagccactgttgacattttggtgttttatctagtcccttttctatgaaaatatatgaaatatgtaaaaaatctacgtatgggtatacataacatagaagttaaaatata

SEQ ID NO: 61721 - DNA, 733 bp, Homo sapiens
ttcccacttggcatatttcataaatcagacgcagaaaacacttggaggcaagcccatgccggatattcagggctgtgtcaggaagtcaaggtcactatcattacattccaagtcaagagcgatggcctctatatggtctcaattctcagggaatgtccttacctgaggcacaggatggaaactggcttttaagcaaaatggagtatcccacctccccaaaggagtctacttctcccttctggcatgatgagacctgcctgatggtagccccaggacccaggatggctaacatttcgcaggcgccatgtgccaggcggtgttctaagtgctttgtgcattcctcacccctgaggtatttgggtgaaccacacttgctaacttgccaaatgccacatcatggtcaaataagaaccagaattcacagtataaggctcatgctgggacagtactaggttaaatatccatggagaaaaaggaaagctaggaaataggtcaggagggaggctgggaggccataggaggcggaggtgatggtgctgccgggttgcccactcctggctcctctcctccccatctgcctgtcccagctcatctcagctgcttgccctctcatcctttccttggaaaaacatcccagctgttggggcctggaatactccagcatcagccacacccctctggcctgatgtgtatggctgtgtcaatgtgcagcaggaggcaagtggcttccacc

SEQ ID NO: 61722 - DNA, 1633 bp, Homo sapiens
ctcatcaccaggtggctttccttgatcatcagctgcagggcaagggcctgtccctctaaccttgaccacagagatgaaggcttgcagctgaaagccaggggcctagaacgttctcaccgaggactgggtgcagaggactagaaattaaggaaccttgggtcagcgccaccactgggcgaccaccacactccacaacctctctggccaggctgagaggcgtagggggttgtgatcaatgggtctgagtctctccaaaggcgcatttaataggcgaaggagaaaaacaccccacctggctggggccccgccattgctgacttcattggttggggatttctataggagcaaaacgttcagacctaacgtgggtgcccccctaaaagtccccgacggctaaggccagggcaaggtccaagtgagcagacctaagcctgcgcagctgcttcggaacggttcacggccgtctaagaaggccgatttctgccggcctttctgccaggggaggagaaaccccagacttcacagcgaacgttccaggcccgctgaaacgagcctttctgctttcacgaaacctcgttccaggggcctggcgcggtgggttcctcaccgtgccagcctcgtgggcgcttcccggctgcccgtcccgccccgtgtcccggtgtccgccgcgtgctcacccagccgccctgagcctgcagccaggcgcggtgctgccccatgagccgcgagctcagcaaggccaccaggcgctggcagtcccgggcgacgtcgccctcctgctcctttagccgcggctggaagccccacttcttccaccgggcggtcaccagcggccctctctccagcagcgtccctgcgaaggtcacgagcgtcaccactctgccccaggtggggccggggctgtcggagagcacggaatccgccatcagcgccaccagctcgaagcggttcccggggtagccgaggtaggcggagaaaaaggaccggtgaatctgccgtaacctggcggccgcggagcgcagcacggcggcctcgggcgtggatggcgccggctcgggggtgccgggttcccgggcgcagtaccccaggtagtcggccagcaacagctcggtgcgctcccgcagcgggtcggccatggtggtgcgctcccgcaactggtcaaccatggtccggcctctgctggggggccgggccttcgctggttttcttggcccggccgcgcctcccccagggtagggctgccgtgccccgccccggcccccggcccccggcccccggtatattgtttttcaggactgagagaagagcctttgatgggaatcccacctgcacctgttccagtccccaaggcaaggcctggtggtgcgcacgtgttcgcgtagcaatcagatgcactgtgagactcgggttatttagctccagtggcgcgatcttggttcactgcaagctccgcctcccaggttcacaccgttctcctgcctcagcctcccgagtagctgggactacaggcgcccgccaccatacctggctaatttttttggattgtttagtggaaacggggtttcaccgtgttagccgggatggtctcgatctcctgacctcgtgatccgcccgcctctgcctcccaaagtgc

SEQ ID NO: 61723 - DNA, 1293 bp, Homo sapiens
actgcttattattttttccacgttttaagtaacagctttattgagatgtaattcatataccaaaaaattcaccctcttacagtccagtggtttttagtctattcacagaattgtgcaatcaccaccatctaattcagttccccccggagaaactcagtgcccactaaccgtcactcctcaccctagccctaagtgaccaccaatctgctttttgtctttatgagtttgcttattaggacctttcatatacatggaatcctacaacatgtggctctttgtctctggtttctttcccctggcacaatattttcaaggttcatccatgttgcagcatgtgtccacgctttctttctttgtattccattctgtggatgcgccatattttgttcatcgattcatccactgtggaacattggggctgtttcagctttgggctattatgagtaatgctgctatgaacatttgcattcaaatttctgtgtggacatatgttttaatttcccttggggaggctgccaattaccgtggaaaacacacaggttggaaacagtgacctctgcttcatggttcctggtttctgacaaagttaatctttcaccattggtgtgctggttagataaccttgggttcaaagacagacatttcctgttgtcacagtctttacataaacgctcataccatacttacgattagttgtttatgtgggttaaattaaccatggaatcactcctgatcccatctccttactagagggtctgcatctttttttctggtcctatttttaaaaataatgatctttaattgacacataattgtatgtatttatggggtacagtgtgttattttgatacatgtatacaatgtgtaatgatcagggtaattagcatattaatcccttaaatgtctatcatttgtgttgggaatgtgaaagttgttagaattcaaatagagtcactagtgttttaaaaaaacaaaccatgacaaatagagctggggaggccatgaagaggggattctcatgcttgtatgcctaataccaaaaatgatcacaaaagattctgcaaaaattacaaccttgcacataggctgctgcaacctcacacaaaaattacttctgcaaagacatctgcctagcaactgcctgtccaacctcggactggtgtgacctttgttattgatatttgtagccaaggataattatttcaaaaccattatgtaatcctcctcattttttcctttaaaaacctttgtttttctttttttttttctttgtttttttgagtcagagtctcg

SEQ ID NO: 61724 - DNA, 2511 bp, Homo sapiens
ggccactttaaggaatgtctatagacaaggcacgagtcccagttatataacacagaccatttatttcccattagcaaatggttgacaacacacttttctgagactagctttacctgagggcactttccttagtcagaaagcccttagacgcctagaactaggtcttgggatgggaggcaggagggaaggcactcggcttcctcttttagcttgttttcttcttttgcacatttctgaatggaggcaaaccctccttaccctcccccgggcatctcccttcctttcatttttccttcttttctctcttctctttatacttgcctccctaagcccagagggcaaggcaggcaggcagtggtgtgtggtgggacctctctagttgtgacattaataaatgggttggcagtgcccaaatggagcagccgagagtcccagctttgttttggtgtatggggcagccctcagcaaagctggagagccaggtgccccgggccatctgcaccctcagcagcatgctgggctgggaatctgcaaaccaggggcccataagggtgctgccatcgacgcgcagggtggcttaggcaagtcacctccctgggcgtctgcctcaacacctataaagtcaatgctctcttcaggttgctaacatgacccagaaggtcacagacatgagggtttttccattatcctatcaaggctctgggagtagtttgataagttcctgcagagtggtcatgttatcaagcttaagtagtagaatgtggactctcaatagtcaaatagcttatatgatcaaacagctaaaaagtaacagcttaaaactggtgtctaagttgttggtttcaacttggagcagagggaggtgtgtaatgaagcaccatcacacatctgaggaaggcccgctgtgggagttcagcatcccgagtgtctttactgaaaatgtgggcaaagaaaccagaaaggccttcacatctttagaggacactcaattggatgcagtttagtgctctgaaagagacaatatgatctacagtaatagcagtaattttttaaaaacacagtagagttgaggagagataaatacagtgataccaaggcacagggttgaaacatctacacatggccaaatacccaggaagaaaatcagggtccctgctaactacagctcatacagccctggcctggctcccaggatcgatatgtgggcagcctggagcaaaggtcccttatgtgtcccagctgcagaagtcacctgacagtgtgtgcgtcactgtcctgtctcaccactgcctcctgacggaggtgagacaggacccatggtaaggtcagctggcccagctctctgtccttattctcaggctggccccagaaagacttgcccctcccatttgcatacacactgcaaactcttccatctactgcttgtaccatcctggggaggggaagtgcaaataccactatgcactatggccaacttatagcggatgcgacttacagtcaggtagcaaagccctgacccaggcaccctgactcctagtctagtgcttctctgagtctctgtggccctgtctgccaattctgagctttcaaagcctctgtttcttgcaccctgtgatgggagggaggatggtggctggcaggggtagggtaggagagtgccccacaggcctcaaagtcctggtggcatcacagcgttgcctcagctcagtagccatctgacctgccatgcccttgtgcgcatctctgatgctctcagatgctaactctctgctatttacttgaggaatgacattttaaaatgtggcagatatgcaccttgagttgcagcactcatacaggagaacattccagattactctatagactgctaacatcagtggcagaacagaaggaggccctcacagcttagccctgtagctgcccaccaagcccccgagaggggcctggagccagtgcggtcactgcaggagctgggggtttagtggggagttgagaacaattcctgcagccccttctagggaagtgcctaggctaatcccatgaatggacaagaactgccaccataagcctccttagtggacacaggagccctagggaatttccactgggtctttaccccagacacgaaggtgtttccagtttctgagggggccaggtccaagcagaggacgtcagccccatgtccgtggaagctctgcagcagctgcccgctctccacgtcccacagggcacatgtgccatcgccgctcgctgtcaggatctgcccgcagaaaaggacaggaagtgggtggttgtggttattgcttatgccgggggcagtcaatcagaggcttaacgttccgcagggaaaagcagaacacacacacacacacacacacacacacacacacacacacaccctacctgctgtatctgggttcatgcacagaaatctctctcctatacaaagaaggaaagagtgcatttcctacaccctcacagtccttgagttgtgtttatatggttgtggtt

SEQ ID NO: 61725 - DNA, 1336 bp, Homo sapiens
gccaactttcctgttactatgttaaaccatattgagaccaagtaaaaataacttaactgcttgctgcagaaaatacctgctcctgggagaaaagactgtgaatcgattagacaacttaccaagattaacagcttgctcatccagactcaaagactgttcgcttgctgggctcaccaatccaaagctaaaacggccttgcaagacccaccttaaaatcaccaagcctggaccctgaaatcctctaagtacccttccctaattcctccattttcagaacctactaagattctgccaagtggaggttctcccttactgtggcaggtcagataaccttagctttgcttggttgcaagtatttctgatgttcgcttggggagttgacatcaccagtagacaaggatcaatgacaacagcatgagaagtgctgggatccaggtgtgcacacaggagggtcccaaacccagtgtggtgatatctgagttggtcttcaaggaagagtgagagctggccaggtgaaagaagggaaggggagagacaaactccaggggggcctatgtctgcactaaatgaaaggtgagcccgttcacaggtggggactcagtctgaagccaagagagcactctggaagcttctgggcaggagaatgagaaaagcaaacgtatgttttaggaaactctggcagaggcccaaagagcctctggatagcttacaagtacaaaggtcagccatagagtaaaggcacacaggggtgcccagggaaagacatggggacagggctggaattttactttttgtcactgccagtgtgtatgaggcctgggctctggctgagcataccttcctgggattgggagaaaggcagtgaggactcagggttcggggccctcataggcccagctggcggcatcacagagccctggagccagctgggtactgacagcaatggaggggacctgcaagggagaagctctccctgccttctggctgctccacagggcctgggtgaggtgataagaccgtggaggaagtggctcttgcagcataagtgtccacaagagagccctttgcggatgattactgatggctgaggaaagaaaagaggaatcaggccttatgcaccgctagcatgcaatgcaaccactgaccacaccacaccttcaatttccagctgctgatgggatctctcctcctcaccctttgccccctttccctttttcttcccctctctcttatatgttaggccttgaacataaagaatctcatttttttcccagcactttgggaggctgaggtgggcggatcacccaaggtcaggagttcaagaccagcctggcca

SEQ ID NO: 61726 - DNA, 1136 bp, Homo sapiens
ctgaggctatgtaaacatgttacccctcaaacctcaacggccttattttaattccactaatgattctggcctgaatgagtgattgtgatgatggctggcaagtggtgatctttctcactccatccttccctctgcattcattagtcagctttctaaggaggagttctgcctcctctcccagttatttatttattcattcatttacattagtagagactcatgggttcttactttattcaagaggttgtaatccattactaatactattgactttgatcttcaaattgtcccaggtgatggggagccccgtcaagcaggttcccatgaccttctgacatgtccccctcatagtctgagcacttctcattccaagcttccgttgttccttccctgtccttgctctaaaatcagctgtttctccatggaactaaaagttccttttagttgcctcatttccttgtgataaaagagcaaagttgcacatgggctaaaagtctttgtgaaaactcaaactgtaaaaatacttgctaaactaggccaggcacagtggctcacgcctgtaatcccagcactttgggaggccaaggtaggtggactgcttgagctcaggagtctgagatcagcctgggcaacatggtgaaaccgtctctaccaaaaatacaaaaacttggctggatgtggtggcacatatctgtggtcccagttacttgggaggccgaggtgggagaactgcttgagcccgggggcaaaggtcgcagtgggcagaggtcgcagtgagctgagattgcgccactgcactccagcctgggtgacagagctagatcttgtctaaaaatacaaacaaacaaaacaaaaaccttgctaaactctaaagtgctacatgaatgttcaattattatgccattgcttctgctaaaacattgcattatttactgccacaaacagcatattcgtcttttacaaatacgttctttacaaaatacatcgaatgaagtttaaaaatagattgaattttccaaattcttttttttttttttttgagacggagtctcgctcggtcgcccaggctggagtgcagtggcgggatctcggctcactgcaagctctgcctcccgggttcacgccattctcctgcc

SEQ ID NO: 61727 - DNA, 1927 bp, Homo sapiens
gagcctgggtcccttggtggggggtgcatggtgcagctgaacaacagcaggtgatcatccacctttgctcttgttatgtaagaaaagtaactctcaatttgcataactacattatttggggtttacagttagtgattgctggacaggatttctaagcttagagtgcctcctatttaaagaagacccctaggaaagcacagcacacgctagatccaggtcatccacttctcttaagtgatcttcagagatcaaaaggtaaaggccctagcacgaaccccatttttccattccacatagaatgtaaagggtggcatcgattaggaatggcaggagaacaacgtcaaggtgtgcaggagggcaccgtgggaggtgctcagcaaaggggagatgccaccctcagagctcaaaagtgagcagatacaaccacttccccaagcctggcccccagcccaagctctgctgaggaggagccctctgacaaagtaaaggaacgctgttttggccaagagccgctgaacctggctatttaatcgctcactcataaaaatcacagagccagttctgaattacggtggtggtggtgaagaatgcaagtttaagatcgctatggcttttttatgccaatccaccacatcgatccaaaagctttttaaacagccttaaacgaactgaacggttgaatttagtgagctcctccgtttcccttctctctccgtcatccagctccccgccccaaggataggggagaggttggaaaaatgagctttgaaattgcagtctcataaaagcaaaactgagaaaagatacaacagtgatggagaaagccagacgggcattaaaaaacaaaacaggagtctctcctaggccgcgcctacacgggctcgccgcgctcgctcgtcaccaccgacaccccaccccctgccctccgcatgggaggggcaagaacgcgatccgttcgcagcttccaggcaggtgatgaggatagctagtcccgcggtcctccgctagctggcggcgggggtcggccaggtgcccggaccctccgagggccccaccgccgcgcgtcccggggatcgggaccgctacccgcgcctcacctgcgcgcccgggccccagggccctgctcccgggcggtggcgcgggcctggctcccgtcgcagccacgaccgcccccaccgcccccgccgtccccgcccgggaagtggcgagccggtccggcttgccccgcccgcctcccggcccgcactcacgctccacatcgtgcagcttggctcgctcctcctccagcttgcccttgaggctctcggcctcgctcttcagcgacgccagcgtctcgttctcgtgcagcccctcggttgccatcttcgcgcggggacgcagcggagagggaagcggagagcgggaatgcgctgagccgcggcgggcgccgctccagcagccgtccccggccccgagcaccgccccgcggccccgccctccgcgatgacgccagcagctgcgggcccggctgctgcgcctgagccccaagaccccgcacctgggcgcgcgctctggcgcagtgcctggtgcgatgtccgcgtcagcctctctcctccgggagaggcagggagtgtgacgcccattttaccagcgggcaaactgtggcttagggatgctgggtgatttgcccgaggacgcacacagagggaagggccaagccgggattccaactcgggactccccgcttctggggagaccggtgaggcccccgcgacatggccctcccatccccaagcctctcgtgcagatctccgctctgtgggacttgattgcgggctgcgggcccgtggctcctgcaggcagagagaggacgggagaggagacggctacgaggcttggccgcaggtagctacggtgctcccccaacaaggaaccggaaaccctcttc

SEQ ID NO: 61728 - DNA, 571 bp, Homo sapiens
gcccggccctacttttagtttttattacaggtttctaatggggctcccatctcagcccttctaattcaccctattcaaatactgccacagtcctttctaaaatctgaattttgagcacattaattctcccactcaaagatgtgtggtgggtttccagttcccagtgagatggagtaaccacactccatcttgtctgtcccactgaatgcagctataaagcctgaatggaatgcattcggcagctatttgaggacttggaaaagtaaatagtagcaggtgtattggggaagatgaccagaatttgaagtccttccaagtcaaaagtgagatcatcacttttcccctctgctattcactggcctctactcgccacaggttgaaactcagaggtgggcatcaatgccaacaaagagctccaggggagctctctgattctagctcaaggagctgaaaaggggcctcctaatgctcaatgccctaccttttccctctcctttttctctattctctcatgctcaagttccaatcccatgtcgacagcagtggtggcgaaggaggccagaaggaacct

SEQ ID NO: 61729 - DNA, 1684 bp, Homo sapiens
ttcaaaaggaagttctggccaggcgcggtggctcacgtgtgtaatcccagcactttgggaggccgaggtgggtggatcacctgagattgggagattgagaatagcctgaccaacatggagaaaccccgtctctactaaaaatacaaaagtagctgggcgtggtggcgcatgcctctaaccccagctacttgggaggctgaggcaggagaatcgcttgaacccgagaggcggaggtttctgtgaggcaagatcttgccattgcactgcagcctgggtgacatgcgtgaaactccgtctcaaaaaaaaaaaaaaattaagttgtaacagctggctaagcgaagctggtgaaagtggaggtgttctgatgggagctggagctgagagccctgggggccttccaaggaagcctgggctctgagaagtaatgtgaaagtcactaggccaatcaatccttttgtttaacagagcccctaactgaagcccagagagaaataactcaccaaacagcagacagagtctcaaaggaccaggactccagcagagctagggcctgtgactcctagtttgaactccgtattagttaagcgaatctggccctgaaagtaatcctgaactctgaactgcaaccatctacttgagagtccatgtgctctcctaactataatttaggattggtttcagctaaaagtggtattaaatggcaggcagtattaggacatacgtaaccactgacggcttctcttctgaagaccagtgactcctcagcccagtaccccaggccgcccacaccctgcgatcctggtgcttctgctggcattgagtgccctgcagctgaaacccagcctggtaagtaaacaacggtgagtttactcagctccgggtaagttccacccattcattcctgtcccctcctccctcacattcctctacccacaaagcaatgcttcaaactggaggaagagttaactttacagcattcatccaaacagatgcagtccgcagttcatgcaaacaatgtaaccagctgtcaactgacctccagaatatggggccttcccatgaggcaggagtctgtggactgggatggaacagctcgccaagcccttcagcggagccaggaaagagagggccacctcccaacttccctgagtgccctccccatgccaaggcgccaagctgaggcagaggctcgggaccactgaaccttatgagctcaagaccatgccagccacccccccaaggcacacaggtgagatgagaacagcatcttctcacgccgcctgcttttctgagggatcttctggcatgagccacagaaatgacttgaagacttatatggaagatgggacaagatgggacgacatgtgtttccctcctagaaccgctttctggactgggagtgtccacactccaggtcagccaggccagattgtcacaccatgcccctctcttcctcctcctcttcattcgctcctcatgggcccctcccctggctcccctgcccctcccactgccccccatgtccgtgtctcccaaggtccttcccagcctcttctcatgataggctgtttctggagagttccacccaattccacagcttctgcaactgcctggcacctgtgcatctgagacctcccacccagatcgtgcactggagctctacaccacatttccaattgcctcc

SEQ ID NO: 61730 - DNA, 1283 bp, Homo sapiens
agaggtggagccccagccagcagaaaggaagcttctgaggaatgctctagtgtttcccagagtcagggtatatgaaaggcgctttagaaactgtggtgtttgtactgttgctaacagtacagatgttaggcaaagagcctacgactgcacctcgtggcccctgggctccccaagcgcttggtgccactgcagtgccctcaagcctgtgacccaggctgcttcagcttctgatgagcctacatgcacgttcacgcactttgaagacacagaattctagaaagcagcccgaacactgcggccataagcttctatgccagctcgttcaagggggtcccaggaggggccaggagactggccggcgtctcatcttcctacgtccgcatgggcaactctgattccacccgtggtgtggtaggaagggaccgaggcgctccagtcccgggagatggggacgcacgcgcgacccctgggcactggggattctaggccccgaggccggagcggcggagggggcggcccctcccacagggtcttcccacccacagggcacccaggcgcagcggagccaggagggggcttacccgcgggcagggacggagcacgccggggccctggaggggcgacgctcgctcgtgtccccggtccccgtggcccctccgcggcgcctccgcggcccccagcgcgcgcccgcccgccctgccgtgtcaggtgcgcaggtgtggcaggtgtggcccgggcgccaggtcgagtcagcgttagcagggccggctcccccacagcgctcccaggagcccagcggaccctcctacctgcgtgtacagctcggccaccgccatgggcaggaggggccggggccaggccggggctgccgaacgtgcgaggctcgggggctgggcctgcgccgcagaggccgggcgcaggagagaccgccgcggaaatcaccgccgggccatcttgcccaaagttttccaacggcctcctgttcccgttcccgagttggcggcgaggggagggggcagcggcgggattggtccctccaagcttggcccggctagtcggcgctgccattggccggggccgggcggctgcacctggcgggagcgcgggtggagaaggttggggcccggggcgcgctgccaggcaggaacagatgcatccggaggctgcccggcccgagtgttagctcctcaaagagcagaggatacgaccatttaaatggaagacccaagggaatcaacgtactgaacacaaagaaatgtgttaagagtccagcaaggtcatcg

SEQ ID NO: 61731 - DNA, 1499 bp, Homo sapiens
cgaaagaggaaggtgccgcagcgggcgaccggctggtagggccgagggttctgaggcgctgaaggggatggcgctggtggggctcgcctgggcccggcgctcccgccccctccccagcctgacagctggcggcgagggccgcacagccccagtcctcgacgccggccgcggggtgccttacctttgtgtagagctccgacgcagccatggcgggccccgcgcgcctacgccccccgcctgtgcggaggccgcacctcgcctgggcggccgcccgagcggactaggaagcgcccgcagccgccggcagggagcagggcagggcagggccgggcggggagggccgcgcggggcggggcggggcggggcgcctcaggcgctggccgcccgcaggggcctcgccatcactcccgggctcgccgcgagcagccgcgagcgctccacctgcccggggtcctaggggtcgccgccgccgccgcagccacttcggcggcccgcgatgctgcctccgctgccgccgccgccaccgccgccgccctgtgcattatgggagcgggaggaggctgcgctccagcgctgccaccgcggctgctctgggctctctcgggctcacgctgcctcccatcggctacgagcacagagcatcatcatcatcagcctgccagccggccccgccgccgcctcgcgccctgccgaggcccggaaacccgcccgggacgtgagccccgagggcgcggcacaccccgggcgcccccaccccgaagcgagcccggggccctctgctgcggagcctagctcccgcggtagcgcagccatggcacgggctgttactgtgtccgaataaacgatgggagcctccaggctgctcctcccgtccttccaagcattcctagggagaggatttaggggaagccctcttgaaagactgtagaataacccaggactgtagaagagccttgtcagcagcagtgacccgggagatgggcaatgcaggaccgggaatttcaggttaaggttgatcaccaaggtcattccgagcacctcgatgtctgcagcaaagtcgtctcccgataccagagggcaagggccgcttctaagctacagaaacttaagtgactttgaaacgagatagcccggggacagcccaggtgcctctttcctagacctgtgcgtttgcggagatgcaactacccttctgtcccagccttcttcccgtcctgttcgctgctggtgattgtcggctccatggtggcacctgaagtttatccggttgccacctgaaaatgacggagtacttacatggaaaatctgtattacagtttaactcaacatcaaaagggcaaagccgccctcactctcctcacggtgatccttgaacatccagcacaagaatgtggtctttctactcccaaccctgcgctgtcttcatcctctatcttctccccaccctcattgtcgtttctggttgaataatcttcattctttattgttgtcgttgttgt

SEQ ID NO: 61732 - DNA, 2751 bp, Homo sapiens
tagtcttagagtggtatacaagttaagagataagagtttatacttattttttatgtttgtacatattgtttcctaatacaagacaggaatctatctggttttcttctcttaccaagggtgcacacaccactcaagatagagaaagtgacttagcttttactccatgcaaggcccagctatctaccttaattctttagcggcaacaggcaacctaccagtaaactataaaggtatttttagctgaatactttggctttaagtggaaggtcaattgggtacacagacaataacttaattttttaggtcatcgaactgatcttccaaatagaagaaacaggtgatttggcccacaggaacacagaagtgactgtgcacattttcttcatggttagggacaccatccacgccacaggcacttagcatttacagccaatcctcaatttaagaaggaacattatattcctaacacactttggttgattttaatgacagcagctaaaaccaaagcaccttaaatgtttaatgtagacaatcaataagagaaaacgttcaagctatccttaatattgttaaaagatacattaggcttttccaagtaaaagtatttacactctagaagtcaatactgcatactttggcaacatactaacagaacttatcaaagaaaattacatagcacactactgtgcaccagaagttaatgctaagtttgatgtaagtgtttaaggcaaaccaccacagacagggacttgttatttttgggggctcctaaatttcaagcaataatgaacacaatacgcattttacaataagcaggtgatacttaataatactgttaagattgcaaactttaatatttgtatttttgcccccaaaatccatttttttggtaatgcgtaaatatatctattttcacgggatattctcaaataatgtggtaacttggacttttacctatgctatatgttttcttgtttttcaattactttaacatcctaacagaagcacccaacttaagaaaagttaacacggttttaagaacatatggaatgggcttagaacactaatccaattcccaacttaattaggacataagtgcaacattaagcagaaacccgcacgaaggtcaagcagtagaccaaaatcgtatttaacggcaacacaacctgatttgtaagaaaaattgttgataaacaatttaggagacaagatacctcggccctttctcacttctcggccagtcacacctgcctaggagggcagggcggtggaaataattacagtgggagagacaaacaccagcctagataaatacaaaggcttgatattcataatttgaaccacagtgacactcccggcctattcccctacatcaggaagacacaagggcgtttacaaaatattcctgtttccaataaaaccctgattaatttcgtgagtaaaattttaaaattccaccctttcgatttttagtcaagtaccatatttgagtcccatcgactgaaacctttttgagcacagactgcgctgcacactacacctgactcacctcctctaggcctcaccccgccgtgggaggcaagcaccagtattcggcctttacaggtgaagacactgaaggccggactttactcactgaccatggttacaagggttggccctgaaatgccaatcctggcccacatcgcggcccgcacacgaggcactgcttttggagtgaaccgcacgctcacaatacaagtagttggagagttcttcaaaggaaaaaataaaacttcctaaccaaattgaggcttacagaaaaacttaggctctacgcccaaagcctgcgtcctgggctctcgcgtaaatataagtgactgaggaacaccgcgacccacggaggtgttacaaaaggcacgattcggagtaaacgcggggcacgttggaactcccaattcgtcggcgcaccagccagcgacggcgggaagccaaaggtggggcgcaggagcctcggcctcatgcgcctcggccccgcatctcgggcgcggccctccgcctggcgggagcaggccgcccgccagacccggccttgggcagggcccagggctcacgccccgcgcgctcaccttctgctcctccgcggaggctgcctcggggacttccgcagacatagtgctccctctgcagacgagacgccgggaaaagatgcaattagcgggtggccgaggccacccggccgccgcccgtcccagctctcccagggcccgccgggccgcctccgcccgcgaaaatggccgccgccttatgacgacacggagccgcgaaacgctccgctggccaaggccctcgcacgccggagcccgcctgcccctcccgcaccgcacccctacctacttgaccccgcttctcccgctcgctgtcgtccaaacacttccttttttccttcaaaggtcgccgctcctgcctcacctcacatccgtttgtggctgccgagtgcttcctgggaattgtagtttctaagtggaaccgcccctccccgccctttcctgtccactctggtcccctcgttctaggagctttattttactctttccacttacccatcctcgcctagttctgttctcctcgctctccgctctgtagccacacaggctgtcttttgggcacgccaaaagtcttgctccactctgccacgccttcacatctccagtcctacgtctctgcctcagaacctttccttcctaaacctctacactaggccagagccac

SEQ ID NO: 61733 - DNA, 729 bp, Homo sapiens
tgaccccaaattccatccagttgctgcaaatgacagaatttcattcttttttatggctgaataatattccattatgtatgtatactacattttctatacctattcatccattgatggacacctaggttgactccatatcttggctattgtgaatagtgcttcagtaaacatgggaatgcagatatctctttgacacactgatttcctttctttctttttttttgagagagagtctcactctgccaacccaggctggaatgcagtggctcactgcaacctctgcctcctgggttcaagcgattctcgtgcctcagcctcccgagtagctgggattacaggatgcatcaccacacctggctaatttttagacagggtttcaccatgttggccaggctggtctccaactcctgatgacctcaagtgatccatctaccttgtcctcccaaagtgccaagattacaggcatgagtcactgcacctggccaaggatctgaattcttttcttttttttaattaacattttttttttgagacagagtctcacttggttgtccaggctggagtgtagtggtgtgatcttggctcactacaacctctgcctcccaggttcaaacagtcctcctcagcctcccaagtagctgggattacaagtgtgtgccaccacgcatagataatttttgtagttttttgtagagagagtctcactgtggtgtccaggctggttttgaa

SEQ ID NO: 61734 - DNA, 2302 bp, Homo sapiens
cagttgtcaactcaagcttaagttttctcttcattttatcaagttcacattcaagtttaaaaagcttatgaacttcttgaaagttgaagttagattgactacctaaaaacgagcaagtacaactctaaaatgatacctgtattgtggcaacagatacaaataccattctttactttcattttgagatacactagaatctctcttgaagctagtgcttcagaagcacttttgtaaaaacgcttaaccttctcttccatatgcctttctctacctcaccagctggaatctgtcacaaaaacagataatcacatatgatacagaaatagttgatcctactgcagaattaggttaacacttctaaattgaggcatagaaaagaagggggtgggggaacaagccctacttaaacaaatcatttacctcggtctggcttcattttcacatccaattttcgcccagagtgctgtgaaatgcacctgtgggttctttcaacaggctcgccgctgattctacggcttctgcttcgctttcaaaatgctgaaagagacaaaaataaaattaatctggccctattctaatacccggaccttgcaagtaaactactgttaagttaggcctcttcctggcaccaactgcggtgacagcaccctcggctggtctgaaaaaagcaaaactctctgcaccgcctcccccatctcctccggatcgagcacccccttccctgcctctgtgctctccaggccaatgtgtccttctgacacagtctctgaaccaaaacaggatctatttataacctggaggtacaggcaagaagaagaaaaagatttgagcaacacaaactaaccccttcgtacaaaaacgcctctggaaacagaggcacctccgcagggctggtatggaaattcttccacctggtgcctgggcgcagccaactcttccagtcccctgcgcctcccgagccctccgcccgccccgccgggcctcacctgtgtaattaccctctggctagccttcctgcggcaaccgcggccaagtttacacagaaacccgagtcacctcctcccgcccagcccccagccccaaacgaactcttccgggctgtcccggggcgaccctaccaactcccaaccagtcctccgcggccggctccgggggaggtgtttacagcctgtgctcgccccctgctctgcacaaccccttccgtcccgccgcggccccggatttccttcagccccgccgcaccgagcgccgcgtctgcccctctccccgctggagagttgttttcatggcgctctcgagctggccggctcctccgctccctcggccgacctctgctgactaactcgctctcctctcccgtcccaatcccgcctcctcttggcacttctctccaccgctcgcccagcagctcacatcacactcccacctcagaccccaggctccgagaggcgcagggccagcgggagcggagtatggagcgcagcggcccccgcggctgcctcaggtgaccgtggggacccgagacgaccagcccgaagcggctccccggcgcccctgtggccatccacccgcgcctcagccaccgcctcgctccgctccctgcgctcagcccctccgccctgcctgactggcacccgagccccgcgacccccgggcttcccccgcccgtagccccggccggccctcttgcccagcgcctctgccagctccttgcccgcccgctgtctctagctctggcgccccggctccccgtccccctcgctcggccagttctttctctgctgtttgccctgtcaaaacactgcctaggtcacgtgtcccaacaacagccaacccaccccggtcgtcacttcctccccggcggcctccgcggccctggcgcccggttactatggcaatgccgccgctcgccccggggcgctagtttggggccgggttttcggtgcaggtgcccggcgggtgcgagggcgctggagatggcggctgggagacaccagcagagtcccggaagcccgagacgtcccaggcacttcggttgcgctcccagccggcagaggcgcgcctggattctgagaccaggaatcggagctgcgctattagagcgcagggtaactggggagatgtcatccaaaggcctgccccagacgtggaggataattatagtcgtcgtctcctcctcctcctcctcctcctcctcctcctcctcctcccccctccccctccttccccccctcctcctcctcctcctcctcctcccgggatgctggcacagagttgtgatcgagccccaagtggattgcag

SEQ ID NO: 61735 - DNA, 1785 bp, Homo sapiens
atctctcttcctcactggtaggatgaagtttctgacttaaccggaaatcacaaacccaaatgcctccagagcccagtcaggtaacacaattcagagaagctggctgatgtagaggtgaatgatgaaggggtggtaaggactggacccatggagagtatgggagagtactccctgtctgcaagtcttcgtgttaaaaaacagaaaaaagaaagaaaacaaaaaagaaagatgaacctaggcagaccaaacaaagcacatccaggcaagtgggtcagttttgccccctctttattagaagatgggtacattccttttcacctcccaaaacccacgattgatcattttgaagttttacatttgtcgtggaaactggcccagagcctctttcctaatgtttattaacctgcatgtcacctatcattgcaaaatcattggcttttgctgtcacctatcattgcaaaatcattggctttaatgtagtagagtgcttactgctgaatgagaagtttacataaatgtttctcatatctgctgaactttaccccaaagctctaattctaccatctctcttaaaggaccacactactggtttaaaaactacaaggtgcagagtatttttcacactgaccttttaacgtaaaatgcatacaagtccctttcacttgtatgttcccaagactgcacgcagcttccacttcatgccccttgaatactccagatcgctctcccaccccctgcacttgctagcccctttgccctcctcactcgtcaccacacatcacttcccatctcttatctccttagtgccatcaccccttcccactcccccttttctctggacacatacctattgggttgtgtccgcaccagccaggagcattccctgacacagaagagggagatgatctgaaagtctacaggcagcggcagcagcagtagactctgttcgctgtgcctactgtaaatagagcaaggtagagggcggagtctgggggagggaggagccctgaggcaagctaattagagagacttgcccatcagggagcccaggcttgttgaaggaggcaggccttagactgttggagcctggctaactcaaagtcatcttgctgttaaggcctagttcccaatactgcaggctgattcctctcagtatgcttttttatggttataattatgttgaacctaataccctgacatttgtgttgatgagttgatctctgacctgcaagaactcagaaccacaaatgtctagagcaagtgagatgctgaccagtccctgctgggctgtattgctggcagctgatcccaaaggaaggcagaggaaggtcaggtgtcccaaagttttaaggcctggtgggtgggtgtgagagttagcacctggaagaaggcagctgtaagcagtcaagtttctgttcctgttgtttgtgtatttatgtgattttaggtccctgaaacataggctggggcctaccagctccttggactcttactacagtctgctgctgtgcacctcctggaatccagtctctttcctcgctacaaggccctccctgctctgtctctgccaacctctcagcttcctcccctaccatgtgaccctctttcattatgctcctggcacactgtcttcttgatgtgtcatatagcttaaataagccaaatgagatctgcctcagggcctttgcactggctattcctgctactggaacatttgtctcacttccctccctgcttctttacttaaatatctggctccttctcattcagctcacagggtcacag

SEQ ID NO: 61736 - DNA, 1076 bp, Homo sapiens
aatgaaccccaggtatttactccagacaatggagctgtttcaacggtttcgctgtgtccccacccaaatatcatcttgaattgtaatcaccataatccccacgtgtgtagggagagagctggtgggaggtgactggatcatgggggatggtctcccatgctgttctcatgatagtgagtgagttctcacaaaatctgatggtttcataaggggctcttcctccttcactcctcactctgtctcttgcctgccaccatgtgaagaaggtgcctgcttccttgcttccccttctgccatgattgggtttcctgaggcctccctagccatgtggaactgtgagttaattaaacctccttcctttataaattactcagtctcgggtagtatctttataacagtgtgagaatggactcatacaccctcctccgcagctttgcagtctccttaaaaactaacagcctggcagcctctggagggggagggggacggcacaaggggtttggtgctctctcaaaacaccgttctcagatcatggtcattctttgacttatcaggaagttctctgggaacctccattcacagggcttttaaacattttacctggctctgatgccagtgggctgagggaggcccacaaaagcaggtgggaccttgaccccagcagtgtccagaatgttgacatcatcatgagaaggaattcaaggatgagtcagaaaacagggaaagcgtggagatttattataaagggaaaactcaaaaaaaggggagtgtgcatactcaagagagagtcttacaatggggtttgtggtttctatcttcatgcgtttctttcaccaaaggggtggaatattcatgaagattcctggaaaaaagtagagatttcttggaactctggtgccactcatttttacaccaaatacaggtattcccgtaactgttatggtactgatgggcatgtgattgagtatgttaatgagcatacaatgaattcctaggagaaacctaggtcaaatccagtgccatgttgggtccagttagtcttagccagcttggttcacaaccctgcagctattctg

SEQ ID NO: 61737 - DNA, 669 bp, Homo sapiens
atgatgaaaagaggaactgatttttccagttgcatcatttgaagtaaatgttaactttctttctgagtccttagttaaccgcattagtgtgacaaatatgtctttgtctagcataagtaattagaatttaatcactttaactgcatcttaattaccccaaatgaattgaaaggacatttaatagcaaagattaaattgccttaatgaacgatttttgtgactccatcaatactcgaatcgctttagccactcctctcacgcacttcagtcgcagaatctgcagcgagcacagaggtcactaggtggcgcgcttcgctcgtttgtttatttaattttccccattgatctgttttagaagacaacaggaaagaaagcaaaaagcacatagtttattgcgttccttcgataacctctctttgggactatgagatcatcaccagatgtgaaaacgaaagcagtgatttcagaaaccgtcgattctgaatatcccgtggcggcatatgcaaaggaagatgagaaacacatggtgactggaaacatgcagtgtttgacagaaattgcaagatgccctctagacaactcccagcctatatactctgttttggtcaatttattactttttagtgcagagccctaaaatttgagttacaggcaatctttgaaatagca

SEQ ID NO: 61738 - DNA, 4746 bp, Homo sapiens
agctgaatttgccatgaatgtggaaataatgacatcaaaacagctcgtgtaacaacctccttaaagacctcgtagattagagatgactatagattttccccagcgcggatcaaagggactgaattgaacgttttagcttaatgatccaacccctgtcacacccacagggacgcgaattccgattttataagcaggtgtgcacgtgcactcagatactcacacaaagccgcgtggagggacgaaaagatcaaccacccgatcgacgaggataggtttgatcttttcgattacctcagtgtgccagtgtatattcccggctgggcctagcgccctaagaaacttcggaactttagctgttaatttttgttttcttactatgacttcccaaagacattctatctgcctaccggggcgaagagaaatgggaccaggcgtcagggcggtgggaccctgtccagggtcctgactccgcgccagggctccagaccagtcggcctccgaaggccctttcacccaccccacacaagaggaaacaaagacttctcagctcaaggcctcagggctgcctcctgactccggtcagtttgcaggaagaggaaacaacaaaacaaaggaaccgccaatccgccgggtattatatccctcagctccaacctccgacttcggaccgccagggtcaccttctctacgctgaccccgcttttcttaaatgaaaacacgccaacaaaagcatacttcggatacaaaatccaagtacgcatcttttttggggaggttagagctgaggtgtacttcggaagatgagaattttgttttcatgaattgggtaacacccaggcattgttaggtaccccgacagaccctctagatatccttctcttcctccttcacactttcttcctatcaaaatagttattgttttgaaattcactagaacaacgacgttctaaaaacaaaggcgcagcaagcatccctttcttcgctgccgcgggctgaaccacggacgctcgcgggtcgcccagccccgacggcccgcagggggcgcgcgccgcagccgcagcacagcccggctacccccagaaagggagccgaatggagggaagcagggagcgcggagggctcgaggcttgcagataaggagaggcgcatcctgggatttgggtcctctgctgctacaacacaaccgtgctattgttggcactgtccgacccaagtgtcggtggtaagcggcgatgtcggggctgggtctctagcaaccgctgtgccctgggtcaggctggtcgccccagctaccgggatccctctccggatgcttccagggcgataggtgctgcacccattgacgggatagccgcatacctccgaacaggtagtggagttcgtctctggcaggcatcctagctgcgctgacaccaaggtcgccacacaatagccatcagccccccttaagccccagaagtaggtttcccctgccccagccatagcggttccagtcgtcgccacgagcccacttcttatccccaagcgcacctccctctcctcacccgggtttatgcccgttacacagagagaactacacagggggaactatggtcctacaccctcgaggggacagacaccggccgtgagacaggcaccacgcagagccttctggtgactgtccgcaggagcgagaccttttttggttttgcagtcggctaggtgtgtgtgtgtgagggtccccagttgactaccgggatgcactgccacttttcggcctggcgggctctgggactccttggtctccgtaggaggccatcctaggccttcggaggaggcgctcccagctggcggcgcccctcgccccgggctcagaggcggacacggtcggtcgcgccctgctggccctttgttcgcgccgcagcgggctgggagcagctgcgcgacaccagacccacagcgccaagacgcgaagcgcgaggaaaccgctgcgcttgactccttctcccccaactcttggacccaggaacgcttccagctcctgcgtcccacacgcccagtcctggcttctctcccggcccagaagtcttcaaggattgaagggctctgcctagggccccgcactcctgcctgactcccatggcccagaaaagcagggggacatttgaaatgtcaccccgggataaatattaacaaaaaagcaaatggacttgtgcaggggccagttatcaatcaaccaggccgcaaggccactcagggcaaacacagcccaggttgggctgggcgagactttctcatggccgccccccgaccgaacccctccccccttggctcaggtccttcttaggtcgttctggggcaaacaccggacgggaagggggcgccgccaactcccccgcggggtttggaggtttcctcgcctccaagtcccgcagggcagggtcggagtgcccaacacccacccccgcccgaacctcgggcctgcgcgccgccttcccctgggtccgcggtgctgcgcttgctgttgggtgtgtgtcgctgtctctttccgagccggcagctcctgctgtgtggccgaagccctctggaatctttaattggaaactaatcttggtcttgatagacgcccacgtcagaggcgcgccacccacccacaccccccgcctcatcccggaggagacgcggcgagaaccctgtcgctctgctctttaatggggcagcagcaagtagtacatggagggaacatatattgatttttaaaaggtagttaatttggtgggaatttcctcctgtcgcccttcttccaccagccgctgttatttcgtgaccggaaggcgcctccccaaacacagcgccacgtgcaagagggttttgaccctctgcaacaggctgccggcaactggaggacagaggggcgtggagaagccaccactctcccgctgcggagcgaaggaaccgagctcagtgagccctgacctcgcaaggtggttggaacgagactggggagggtctctgagcgcaacagcaaggaaagctgccaggggcacctccccatatgggagctggtagtggggggcaggcactaatgtcccgtaggaacggccaaggcgctctgcaatccattttaaggctcatgcacttggcccgttagagatcatttggaaagttcagaaaataaccccactctttttaaaatatgaaaatgttaatgagatggctccttcttcagtaacttaaaaataggttgtgaagagactgttcctggttccttgcaggagaccctcctggaccaacacagaatcctcagtcctagccctttccaccatcccttttaagttaaggaaacaaaaatgtaatagacatgcttcctcagggtctcaggacacagagtcggcttggtgtttggtgccaaatgcctgccctgctggactctccagtgtttcactttttcgaggaaaaggccatgggcctagggccgagggctgcatggacctctacaggttgctgggtgcccaggcaggcgctccttcgatagcctcctgggtgccacaagcacctgccaggcaccatgtttgcgcctccagcgtgcgggtcccagcactcaggctccctccccctccacagtgccgtcccctgagctcggctatgtagctctccacgcttggaggtcagagggcgctcctgcggccaggtttccatggctcagaggtcgtctctgaacagaacgtgtcagtctgtccttccagggggcgacagcaggcagtggggggaggagggatattgaagtccagagcaagagcctccagggggcgggggtgggggatggggaccgagttttcccggaggggtagccttctccatttctatcttcttcccacattcccccgctccactctttggcttcagcgggcactgcctgggtaagaggccctgaagcctggctctggggtggtgtgggtgtgtgaaaaggcactaccttgggctctggagagacggagcagtcaggacgaggagcagccccttcgcccactccctccggaacctcagttgctcgcgggcagcccacgggtggagatatggtgccggtagcacaagagctagagagtggaaaaccgggggccagcgattcgctggggcgcccagcgagcctcttctcccctgactggttcccgggcgcaggctgcaggaacctgcatgaggactttgcctggggcgaacgaaggcagagctgggctggaaaacctggcagggcagagtctcagccagcgcggtgctttgggaccggtggcctgcagcgcccaaacccaaagaacgctttgggtcgcttcggggcacgaatcgcaggctggtcggcacctgccacccccagcttctcattggcaggcacgagttggaggagggggctttggcctcacgctttgattttagactgtgaaacggctcagtgcccccggctcagagcggattgactgtctctcgttctccagggacgaattaatggagaacgatcagttaattaacaaaccctcattccggcttttaccttttctcttcgccaaggctcaggcctgggcgctgggctgagatggaggtggaggtggggggtgggggagtggggggggagggggcatggaccaggagtcaatcaacttggcaaccgccggccggatctcatcaaacccaggccaccctccgctgtccttagctctacctcccctcatgttctctaccctcaagggtcgccgaatcctcctgaaatccccggtg

SEQ ID NO: 61739 - DNA, 3743 bp, Homo sapiens
gtctcggggagccaggcgcggtgtctgcgctgcgccaaggagagcttccagctgaactcagaaacacctggggcttggggtttcgggcaggagacctctgctcctagacttgggggtcatttacacactctcatccccaaacccccctcccgcacggggattcagacgaaaatcgcgaagaggaataataaaacaaaatgcaaagtcctcagggagtcggcagcggagtcggtcccaggacatggctattgctttgcagctctcactgggaccttgggacggtcagcctccctctcctttccacagccaattccatgcgcagagagcgtcctaacccttacaactcgtctgtgctacacacccaccgcccaatggctctgaaactttttgcccatactcttagattgaggtcaccccagccagcgccaaaagaatgagcgcgggagggggtcacagcagccagttcggccaaacatcgacgctgctccggcacgctccagcccagcgcctgggatgtgtcagaggtacctgcgaggaacatttgcgtgcgattccacgcacgcgttgcatccctcttcccaaacccggatcgctgaactgagaggtggcgcagagtgtctcaccaggtgcggggatttctctccgcctcaggccgtacgagcttccctcgctgtccctgagcgcaaatgagcctcttcagtcgccgaggcccggccgcttagctctcggagccttccacagcccaacaccctgagccctggagtaggcaatttgctcccacagccctgtgctggcccttccaggcacagggagtcccccttctaggggtaggggcgggcgggatgaagcgcacccagccctctctcctacccttcctcctttggtcccttcggctttcgtgtaccttatctcccgcgcgcccagctccttggccggctcacctgctaagcggagcgcggacatgcgctggaactccggctcctgcagccacttccacatcctccggaaggtctcccggccggatttgagtttgctccagggtttggggttgcgcagcaggtccgagagggtcccctgggagcggcagagcaccctctgcgcgaagatggcctgtgggatgctgtagcgcttgagctcggtggtgatacgctgcgccacctctttggtattgatctcttccatctgccctgaattacttccattgctgacctgcgcgccggtcaccgaagggttgggctcccgggctgtgcccaggagttgcccgtggccctgggcgttcaggtgggcgtggggatggtgcggaggaaggccgttgatgggcaccatgccggccgaggtgggcgtgaggtgctgctccccgtggcggccgagcatggccgggtggtgggcttcgaagccgttgggggtgagcatcttgtcggtgggcatggcggcccccgggtgggcatagtgggggagcccttgctgggagttgtggatgctgcccagaccggagctggagaggggcgagaggctctggcccatgccggccacgtccttgtggtagggggtatagaggttattcatggaggccagcccgcgctcatcccgcatgagcgtgaagctaccgctcacgttgcccgccaggcgctggtggtggtgcgggtggtggtggtgatggtggtggtggtgatggtgggggaacttgtccgagactgtggagatgggaggcagcggctgcagaggggtcaaggtggtgtaggtggtgggcatgctcatacctgggggagtctcgcaggccatggtcatggtgggatgcagggggccggccaggctgtgctcaggggcccggtggtggtggtggtaatctccgccgccgctgccgccgtccagcagggacgccatgcccatggagcgcgggtgcgcggggggcaggtggctgccgcggtgcgccacggagctgcgcgcgtgggggctgccgcccagcaggtcggcaggggcgggcaccggctcatggctcaccccgtgcagctcgccgatcgcttccatggtcagctgcgcgttcatcgtgatccgggcgagcaggcggcggacacaacatcgatgtggccaggcagaggcggcgaggggcgcacggagtccggtcttcacatcggctgctggcgactgttgccttccttcctctcactgtggggctctgtctctctctctctctctctccgtgtgtgtgtgtccgtgtgtgcgtgtgcgtgtgtgtgtgtgtgtgtgtctcgccttccctcttaccccccaccttcccctctgcgtcctcggcttttttttttttaatattaatttccaaagaggatccgcgccgttgggagagcgcagtgccccagcccgcccgcctcggccacctctcgcccctctctttcttaaaattctgaggtctccggctcccctgccgcggcccgcgcgcctgccgcgtctgctgcctgcccgccccgctggccagcttgagccatggctctgttactgttacagactctgtggccgcggttcggtagccgccgccgccgccgccgcagcggcccgccctcacgcccgccaggcgcagcgcgcatgcgcgaggcccgcccccgccccctaggtcgcggcgcgccaggcccttggcgtcccggtacaaatgaaggagggggcccagcgccttccctgcggcgctggatggccagggagctgcgggcacgtgcgaaagattggcgcagagcgcgacctggggccgccgctgcaatcccaggagactcgcgcctggctcgctcgcctcccttgcttgagtgggctctgtcctcccagcccggggacgctcgtgtcgggcttctagcggctggagtgctgtgcttggagacatcgcccctctctctccagttgctgcttcccggtgcagcttgcccggggagctggggactgtgtcatcaccccttcggctctagcccactaagctttatttcccggggggctgctgggagtgcgctttcccacccttgaattcacggcctattgggggatgggggttggggtggggtggggtgcagattgcttaaagggctgggtccgtttggcggccgttgacccggcacccttcgtcctcccagatacatacttgcccaccctttctcatccatgccctggggagaggagtaatcagtgccaagaatcccagttcgggccatacctcactgtcccccgccgcctggctccttctcccgctcagctcataattaaggctgtgcgtccgcttcgccgatgactcggcctgtggaggggggcgagggagagcggagggagtgccctggagggtacccatgttaacttccgggtgctggtggggccgtggaggctcgggccgtccctgcggttactcccaaggccctcctgctaaagcacccggaggcggttgctttccagaagtactgacgcagacagggtggacgccggcgcgcgggtctccgcttggcccctagggacgcccttttcccggcgtccccgagagacgcctccagatttgaaaatcaattcagcttcgggagtaatttcgcccttcccacagtcacgctccaatctggaatcgaacctggtctttgggcctggtggggacgtgtgcggaggcccccagtttgagacgtacacccggccgccacatgccgcggctttctttcatttacaaaagaaagaaaaaaaatccgcaacaaaaggcagagccgtgtccgcttaggtgctttcatccc

SEQ ID NO: 61740 - DNA, 1874 bp, Homo sapiens
tattaattatttattcgctggtgccttccttcgtttctaacttattattaattaggcgcctctagtctttcgcagagcgctccactgagccggttgcagctttaaatatgaattaaaagcaaatccaagctactgtaatgcgaaaattattccgtgtcttgcatggcagagatgaatagctgcgtggatcaataccgtgaaactcggctcccaacgacagggttattgatagcttatattaatgatgttaatgatggaaaaaggaaaacaacggcccacccgacttagaaacttcttagccgctgaaaccccgcaataaaaacgggaagggggcaggaatcgggcttaagtgtaataagaaaattatttatgaaaccggataaatgacttcagagccttgatgcatttgaacctaacgctctcggctcctggcagccccggctccagctggggagaccgcgaaaaccccaagccacggagagctggggggcggggggcgctctgcttgcctaggcagcctccggcttgccgcccctcttcctccgtccccgccggaagagccctctagggcgctgctcgcagaagctttggaaagttggtggaatggggcagggacagagttggtccctgctgtccaggcggggacagaaagccgggttagtggtgcccagcggtctgggatttgggttcactttcttcactggttctcttggcacccgctcaaattctgcggtcttgtcgggggcccaggtcgggctctgcactgtggcctcctgcccatctggccaaggctttcgggatccccaaaatgcaaacgggtggctggtgcctgagcaggagagggaaggctttatatgaagagaaatcgttctaaacacggtaggaaaactggaaaaggcgctcaccctcctcccccgtcccccgtgcctccgtgggttctttaccaggcccggggtttaattgggccttggcataaggctcccagcaagcgcgggacattctaggctagctgttcccgggctagaggagagtgagcgctcaggtctgggcccaattctcctgtaattcggcacaggcgccgcccccacttacccactggccccaaatatcgacccactctcggttttcccctagtcaagggccactgagagggaggaggagaaacagagggggtgggggagcgaaaggttaaatcctgaccctggaggaccgcgggaaagttcagagcccgagggtcaatctcaggcccgagttcccatcccccactgctgggggtagagccgccaggtcccctccccctagctagggtcctgggcccttggaggcgaagctgagtgagggagaggggcgacccctggccgcagtgggatggggcgatgcaatgctagggtagccggtggtgtcccggcctggcggtgtggtcgggggtgccctgagtccagtctttctgattggtgcggaaagttgaggagcttttaatttacacaggggctgtcatttgctcagtgcctcagaagggaggagaggccgtctggtactgcaggcaaaggcccaggtggtccaccagggcaattacaatttcctagaaaagaccgggtaattttgtgttttttattaggtcttttaagagctgtttttcttccttctctccctcccgtcttcctttctctctctcccttttactccctcccttcctttctctctcattggttccctccctccattcttttcttccttctctatcactcctttcttattttcttctcccttcccccctccctccttttttctttctttttctccacccctgtcttattctttccttctccctagctttcttctctcatcccctccctccttctctacaggggagc

SEQ ID NO: 61741 - DNA, 1232 bp, Homo sapiens
aatcctgtttctgaaaaaaaggagaaagaaaggagagtgccaggtgagcctcaggatgcagaggcggcacctaagcttctggggccctttcgctgtaactggcctttcctgatgtttctcagttaggcttcagtccataacctgtgcagggtcgtgcccctttcctgagcgtggtacatttctgacatccgtggaggttgcattcctcttgctaagtaatattcccacggtgccatctgggcccctgacatcagcaagatttgggggttgtttttatttttatttatttgattttatttggagaaaaacttgagcctgtcaatctcaaatgctgtaacccctaaaagcaccgtcagagccttaaatctagtctagggcaccggggcggcccattcaaatcactgtctcagacaaaacccaaacttccttccacccaggaaaaatcccttgtcagctatctggcttcaaagtccacaacgtgtttcagataagcaccagcctgcatagacgcagccccgttgccacacagtctaaaagaaaacagcccttcttcagaaaggaaacacaacagccactacaaaaaatcactggattctggaaaaaaaatcaatatcaaaattagatttattgtctgcttatgtgattaaaaatgacaaagtgttgcctcttattttcataaaaagagagaaggctgaacaaaataatttactatcgagttgtgctcgtttcatttgcctggcaaaacctggaggaggcctgtagggcgtttgtggagtgcagtggcagaaccagaagcccactgcgcaggagtgagctcgctgtcagaggatgtgtgtgctacagtgtctgagaacaatttcctagtccccaatatgtggccacgctggttcagctgagcaggtctcagttctgcctcgttccagagaaatacagggtgatctgtcccttgctcacaattttttgattcaaacccagactccaggtcctgttcttccaaataactttcaagatgacactgctgtattggtttccgtcacagtcttcctggttcgcttagccaccgcctcccagatccgcatccagccttcgatcctgcgaagagctacgcagtccgtgtgtgtgtgtgtgtgtgtgtgtgtgtgtgtgtgtgtgtgtgtgtgtgtgtccgactgcttggcccaggccgggctctctttcctgggaggctctcagggtttcagtctaggctggaa

SEQ ID NO: 61742 - DNA, 5406 bp, Homo sapiens
gaggttttttgtttgtttttgtttttgagattttaatgatttctctaagcttaagcaagtcaaggtggctttgaccacaggactgaggaggagtctcccattgcatcatttcattgccccaacctggccacagctggaaagaagttgccagaagggatacaggaaaagcaaacgaatgcccagcccttcaaatagacagttctgttccaaaggggccgacctattgcctgagtgggggcaaggctgggagagtaaaaagcagatttctatgcatgctcatgtggcccaatgtaatgaacacatctctatcaatttctggaggcagaaggctcaatttattttggttttagtggtggaaagtcctcagccttagctctgactgatgacagagcagccgagtagttagaattctctctccaacgaaagcgatggtcaatagaattctcagtatcaaatgagcaataatttgctgtggctacatgctggataatgaaagatgttagcaggatcaataaaaaatgaaaacacttttacttacatcttgagttactgttttaagagagcgagagatgtaacaaacccaaagccaggttcagagccacccaacacacccctcaaaaccccaaggcacacagttttgtcaccacctgactggcccttccagaatgccaggcctccaccttttccctcaggagagtagattatttacattaaattaaccctgtagagaccagtaataatttaactgccagggtttaaaatttttcttttgtttcctaaagccaggaatacattttaaattgttttccaccaggattaaaggtcacgtaataggttgcagtttaccaaaaaagtgtgcaagtgtcccagagctgatctgtctgttgaaatgcctcaaaatgtgcatctgacccagatgcctaggagggcaaaagaatagatttaattcctttggatttgttctgtgttgccatttaatctgtaaagttcagaccctaaactcgattttttccagacaagttaattcccccatcttctttcataatcatttcatctgtttaatttgttttccatttggattgggtttatttgtactttccagtctgcttttctcaccactcaatcccaaacgttttcttacatatctggttgttaaggaacatactgtgaaacaatcagagacacattctacatttttaaaagataccaagacgtaaaagacgagaaaaacatcccgggtgctctgcataaaccacacgcaacgaaaaagctcaccgccagacagcttccagcactcgaaccaatacaagtaaagcacatttgcaaatgtgtttgactgtttttgtaggtttaagaagactacgtttttctgaccacttcaaaaaaacaaacacgaattcagccgctgctttaataacctctgaccagaggagctgattttgccaccgagttatcggtcagtgctgcgaggtcagtggcctgtgatcatgtttatagcaggtttggcttggatttggtgacacagccagcaaacctgggagattatgaaaccgtgaaccagcccagggaagtgtagtcaagtttcagtttgggcatttctccgggtgagggaatccggtgggctccatttctacaaggctcacaaacgcaggtgcagttcggccgccgcacgctgcctggcgggagaaacgcgcacaaaccgcagacgcgtgctcctgtagttgccactagctcggggcacgcccgtgttatttacaccctgctcgggggcccccctctcatttgttactttaaactcatggggaggaactgttagctgccgtggcgggactggcaggctgggaggggggcgcccccgctcggctcccgggccgtgacgcggccgctgccctccgcccctggcttccaccctgtttgcatggccacaagctcagcggtggaccagcgtggccaggcccccggagcccttgccccggcctaccgcccctacttcttccccctcaccaccccccccaaacgcttgtgagactggcttaccctggtgggcgagtcgcagcgcattagcggatttcatggcaagttgcttctgtgacatgagatcaggttcgcgttcgaggatttgccccctaggagggaaggaaaggagagtcaatctgcataatttcaaatgagaaataaatagggaaacagggaactgaatttcaagccccctaattcctccctccccccgaacctgtgagccaccccgcaccccccacaacacgccccgtgcacaggtaaaaaaaaaaaaaaaaagtaatcagcacacgtcgcaggtgataccttttattgtgctcattttaaagacaggaacaggatggcctcctgcccgaagactttctctgcagccaggcccggggcaggagggtcagctgggcagcatccgggcccgcggattcctgcaaggtcgcgaggtgagaggtgcggggaggatagacctcgggctcggcgcacagggtctgggccagacgcacaagcccaaattccctccagcttcttcggctccatctttaagtccaggcaaagatcaattccctctctctcttgaacacacacatttgcagccataaataaacagctcccagctaaatcaggaaccggagaggagaaagggaaaaagaaaggagaaaagagaaggattgagaacccaagcgcgagtctcgcctcttccgggcgccgactggctctttttggtcaggccagcctcgcatttggggatgcaacttgcatttgaatagctgcctgggcttgttatggacccgggaaagctctgaaagggaatcactatgcaaattgtcccagttacaatcgaaaggttcgatctccaggagctgcctgacggaagttgatgtcagctatctatgcattagggttgcattaccgccttcgtcggcctcctcgccacccccgctcgcgcctgcaggggaggctttttttttttttgcttatgtttatattttccctcagtaattaaaaaaaaataaaaaaagaaaataaaaggctgaaggtggtggcatagctggctagggcctgggaggcccacgggctgagaggggaggaggtgcggaagggcggggttgggtggcggggggggtcgttcttttgcagcaggtgttgatggtgcgtttgaaatcaaacatttagatttttttttcgctttgccggacgaggcggcggcggcggcggcggggggttggggcggcgatgtctgcctcctcccgcccgcttgatcctacaatgccggctgcggatcaatacccgctcactgtaatcccagtaattgtagggctcgcagcttttattttaaagaaataggacactagggcgccggcaggcggctgaggcagaacggttgggctgcggtgcctccgggggccttttggggcgccttttaccccagagctcagaaagctccgggcagcggggtggtggcgggatggccagtagccagggcccacctggcggcccgccgggatgtggaggcccactgggttccggcccggcatggcgctggcgagaaggcgccgctgggcgcgtagggtaggcagcacgcgggatttagccttttcccgacctgcgcgcgggccctggcgggaaggccaggtccgggatgggcgtcttgggcttgggcgccgactgtgggcggtcttggccccagaccccgacgcgtggggacccaggatgctggaactcaggccttcggcctagaaagacagaggttttgtctcctttctgccgccttccagggccggaggccgggccaggctcccgggtggcctagctcgggcctagtctgcgtctggccctcggtctgggaattggcagggacgctaggacctggtgatctaacgcccgcgcggcctcttacgccggggtttcctccaggtgctcgttgccacgcgttcgcccgacgcccgcagatcccgtcgcgcccgcaggctaggccagctccgcaagccgcctgctacctctgccgcccgccccttgctggcagagtccgggcaggactgccggggcctggggccgcagtccccgcgccgctggccgcccgcagcttctggcgcccccgaaaatgaccatctgtcattcaattaaggtttcagggcagctgatgggggagccagggtcagcgaccccaggacaaaacggcctgctgcctcggataggagaagttcaaatgttaaatgcagaatattgtgccctctcccagtccggggccccacccggccgcaggtccggccagtggacagcagtagggtgaagggcaacggtcattagcacttagatttcagctctgggcccagctccttctgttgggctattttgaccagagaacctttaaccctttcacgccagccctccctctagagaaggccagattgtccaaagggggaaagtaagagagggaacttagatgcacccatatgaagaaggttcaaaatgttttttgtgctcacttcttcataggaatagcagacaaaatacccgcaaattagaaaaatgttaattatagccaaaacaaacgaaaagtcctcagaaagttttaatatttttagttttggggaaaggagtgcatttattaaatatgactgtgaaactgctgggccagtgtggagagagtctgtaaaatattccagacttttcgcccataactgtgtttacccaaatgtgtgtgagtggtgatgagactctgctagctatagacaactccatttatgtgctggtgatgaagtctccattgcagccagtctcatttacagttgaaaataagttagacagttggcttttcccttttgagacgttcctataataaaatgaggtaaaagtaattgtaactaatggaattcataaagtacattcattaagcatgtacataatgcccacaggctgtgggtatttaggtattaatatgcttggcttttccaccccaatctgaggagaagcagccgcacacttagcagttttcagtggaagatccaactagtcctcttaattattaaccaggaagcctaaaaacagctatattagcaagatatcattttaaggcttggaaatctaagtccttcagcaggctagttagcaatagaggaagaactcagagcttctagcttccagcgcctggttctaaacattaaatctagtccttactttttggaagtaactatcaagcaatcaattaatcaatcaggcattcagcattgaagcaccttagaaaatttttcattggataacaatgaataatgcatggccctccagtatattgactgtggtaaatggtctttaaggtaaggtgctgcaacaagtacctttaaataaaatcaaataaaaagtttaccacaatcataataaattgttcagtcatcttct

SEQ ID NO: 61743 - DNA, 2435 bp, Homo sapiens
ggcaagggatgatctctttatgggccctcattttcctgtttttgaaacgagggactggacaacagaagttttaagaatcattcaaacttcgatattatgtgatgttttccatggcttttactcagggggagcaagagtgaggcagcgggcagagagttggtttgagtagaatgaaggtgaatgagttctttctacttcctgagcaaacagtttcctggtgtgtgaactctggacttcttgatgagaaaaataagctccaggtttgcagctggaagggtcaattccagggtcttccttggagcttcctctaatcaactccaggttccctggacctcagggccgggattgaaaccaactcgggcaataagtactcctaggaagtacaggcacctccattctgacctgagggtccaaaggcactttgcttctccttaggactcctccctgggactgtcagggcacatcatggtagggaacatgcaaacgtgtttcttccctcctttgtagcagagaatagcacactatgaaaaaaccactctaattcttacatactcttttaacttataggcctgccacactctctgcctatttaatactctatcttgggataattagctgtgccaaacatggacagaggaaactcctttgtttcgaatcacatcctttcttcagtctgacagtctatgcccagtcataggtggctatgtttttccatagcaagacctcacagagatactgggaggttaaatgcagcactgagttgaaagcatcagatcgtatgcaggatgctatgtgtgtaacatttggttattatttccagtgagctgaaaattcctcagagaccaggactaggcctattctttccatgccctttgcttaacacatcataggagcttgatcgatgttggttgaatagaggaatcagttgaaaacctgcctctgtggctcttgtaagtgacttgtaacttactcttagagtagctcagggagaagcattggtatttatttttggtaaggtcacttagtatcctggccagttttgtggataatgtattcatgtgatgcatggatcttatgattgtgactctccatcataagtgatttccaggtagaaaattctgtcatttagtgtcctggccagttttgtggataacgcattcatgtgatgcttggatctaatgactgtgactccccatggtaagtgatttctaggtagaaaattctgtccaactgttgacttaaccttgttaaaagtatgcctagttcaacctttgttctcttgctgggacatctgggcttaaacagttcagccttgtttgttcttacagccccactctcagatatatgcaggtcaatggactggcttagcctggtgtcctgccgcacccccctggcagcctgcgccattggccagcacctccctgaaaagcaggtggctgtgccatttttctgcacaatcatcctgtcacagggatgagtgacgtctacactgacaccattctggatgacaaaactgaggggctactttacagagtggccagtccaaccagaagaagggtaaaaggaatcaaataatcattattctagagagaggactgagagctggaacttagtgatgtcaggtattttgcacatttatccagtggttcattatactttgtatgttatgtaggaattaaaaatgattttatctgattgaatggaaaaaaatactaaagtataaagtataaaaaagtttagtgatgtttttccccaattagttaatggcagtattgggtctagaatccaaagtgtttaaaggcaccaccccctctttcttttttttttttttttttgagtcggagtcttattctgtcgccagggctggaatgcagtgactcaatctcggctcacagcaacctctgcctcccgggttcaagcaattctcctgcctcagcctcccaagtagctgggattacaggcgcctgccactacgcccagctaattttttgtattttaagtagagatgaggtttcaccatgttggccaggctgctctcgaactccggactttgtgattcacccccctcttagcatcccaaagtgttgggattacaggtgtgagccaccgcatccagtccccatccttttttttttttttttttttttttttttaaccacactataggctcctttttgttttttaaccacactacaggatctcaatatatccagtcattgttgtcctattgttgctttgcctgctgtccggtgctaaaaatctttctactgtttatgggaaaaaattccaatggctttcaaaaccatgttgccaaagcaaacagctcagacccttaccttttctccataggtgacttttcagtaaggaaaataaaagtactaaatgttattacacatttgagagccagcccaaatgatttcaaaggcaacttattc

SEQ ID NO: 61744 - DNA, 1403 bp, Homo sapiens
ttaaagggccagaagacaaggtgatattatgagtttaatttgctctgttatgaagggaactcaagggtactgagttatgaaaaacaacggttattttgagaaaaatgaagtcaaactggggattttaaacactttctgatgtgtttagtattggatgtgatctgcagtttggggtgggggtgggaggctccgttgttccattgtccactctattcactttggggaaatgctcttttctctgactgtgttctgaacatggacatttctctagattgctttcttggaaatggcaacagaaaatggtagcaataataggttttaaggtgcttggcagtgaatcatgccattttataaattcatctccttacactttatttccttgctgtgagataatttagacgaatgtcagcgaggaaaaaagaaagtgattggtgattccacctcacccaataaagcaaattcctaattttctgtcttttatctttcgccattcttttgtgctcctctttggccttgtcaaaacatatcgttcagttagagactaaaaatattttcccatcgattggggttattgattttttttaatctgtactttggcttgaagagcgcgggtgaagggtgaaagttcaccagcttagtctgccgttttatctggacagcaaaagaatgtattggcagcagatttgatttaccttgttggtcagttgtaggcacttcagccactgaagacaatcctccagaatgtcctgctgctgctgtctttttttttgtacccaggagctcttcaaagattccaccttcctattgattttatctctctgtttccaaggcaagatttttttttttttttttccccaaaacaagttttaggagaagttgcgatgctttctggactcatggtaaataaaacaagattgcatgcttctgctggagtttggctcctctgcctatttggctgatggtttgggaacatgtttatacccccggccacagcagaatctgatgtgactagatcaaattcactgagatctttttgtctcccttatcatagctggtcagacatacgtactcagggcagtttttgagtcctaatttgagtccccaaatggcacctacagcttcctaacaagtgttaggcttgtgaaaggtggcaccatagctatagtcagagaggaagtacagtgtcatgagtgagtgtatggctctgaagacatactttccagataagtatgagtgggtgacatacttgccagctgggtgaccctgggcaagttgtttaatgttttgtgctttagttttcttatctataaaatgggtatataaagtgtacctttttcctcaagtggttgtagaatcacataaataaatacatgtagaagtcctacaatagggccttgcatact

SEQ ID NO: 61745 - DNA, 682 bp, Homo sapiens
tcctccctcccaagctttatcttgtccagcctgaggctgtggccctcctgttcagcacaggcagttcagaggcatgattagaaacttgctagggaactggcttttggattatggaatagcagaggattcagcaggtgctagtgatcagatcagggaaagcctgaggcagggagccagcctagagcaagtaaacacaagcagttgagtcagggcagtaactgatctggagagtggccagtggcaagaaggactcaagtgagaagagacagctggtgcaggggtggggattatttgccagattccaaggtgtgagtcaggctgaggtggcagtcaagacatggccagagcagagagccgttttgggttaggcatggaaacagcctagctagctcagtaccctggacagctcctgggttcaggtctcctggcagctgcctctgcagctccatcctcctcggattgttaaagtggctttatgccagacttcttgtttatacacgataaggcttgtcttcagagcattagtctagagagctccatcctagaagaaagtggccacatattctggcctgacaggtagctctataatttgtttgcccattccttccttccttccttcattcaattattcagcaaaatcattaaatcctactatgtgccagggcctctcctggctgcaaag

SEQ ID NO: 61746 - DNA, 1412 bp, Homo sapiens
tcaccttaagcggctggaagcccctgcatatcctgcccaagcctcaggaaagcatattgggaatgaatgtgagacggaggtagatgcgtgtccgtggcctggatggatgattggaattgaggaagaattgatcatctaaactcggcagggctgcgctctactcgggagcgtctcttggctgaatagcagataaaatttactggatttccatgtctgaacctttgcgatcgcactctgtactccactttgatggatttaaagctggtcattatgatacatggcaagttgtagcaggaataaaagcgggtcctttcaaccagccattttaatcaggaaacagtgttactctggcatcattaaagcttgccatatgccatagaaaggggtgaaacatacacttgacttttagggcagattaaaaaaaagtttgattttacggggaggcagggaagaagcaacccaataatatatttaaaaatatttatctgtctcagtaagcagggcgaatttttaaaaagccccctttagaattgtgtctctcctttcccctaaaatgttgaagcgaattaaaaagaaaaaagctccgctgcgtcatttcggttttgttgggagcggcgaggctccggggctgctgagcacatcgagagcgccccctaggcgctggcacgtggctctgcaggaggaagccaccggtcgatcatccctgcgtttgtcaggcgcccaaacccacacacaaagccctggcacaggcggcgacgcggcctctctccgccccctgtctgaggagggactcggaaatgtctccacttgtttcagaaatttcccatcgaggcagcactgggtactctttttgtgtgtacttatgacaaaaatgctttggagagtgatggtgaaattaaagttaaacgtgtagcagtccagattggtgtccccattaaggcttagggcacagattctgtgcctccggtgctctgggatttgactggccctgcctcatttaggtgggagcgtccactctggatatcttggtgggggcaaggttgtctctactctgcaaaaaggatgaatgcctctttagacttctaatctgacactgaaggaagccacctgagaataaaaaaaagacactgaatttagagaccaaagactccaattttcaccctggctctcttgcttaaatgctgtgtgactttggacaaatcactccacttctctgagcttcagagtggttgctccataaaaggaagggatttgatcagacattttcagtgtttatgcccagttataaagcatgtcttaactttaacactgaacacgtttgctttaaagtgtgtccatcaagccaacacaacacttcatagaagtctcgaaagatctaaattggttaaaaagaacagagtgcatttgttttg

SEQ ID NO: 61747 - DNA, 3949 bp, Homo sapiens
ttaggctttgtggcccatatggtctgttgcagctactcaactctgccattattgtatcaaagcagccataggcaatacgtaaattaacgtgtgcaactgtattccaatcaatttttgctatggactgcactgcaatttgattttcatataatttttacctgtcacaaaacaatgttattcttttgattttttttctgtggtttaaaaatgttaaaaacatttttcactggcagggtcatactgaaacaggtggcagctggatttggcccattgcccacagtttactgactcctgctttaacctgtacttgtgaaaataagacatataacctctttgcttacatttcatttttgagtactttatcaacacgaactcatgaagatcagtggaagcatgaaaacacaaaaaacagctgctgcagtgtgtaaatactagtaatttcagattttactttggtagagttagaaggagaatattcaagaagaaaaaaaaagcaagcagcatccagactattttccttagattgctgtgttttttcttgtaatttcagtactctttgagttaaatttttcccaggagaatgtacttccatattcctaatggattgtaacttttcctttctaacaaatgaatattcattattcatattcataaataatcccaacaaaattactttttctgattacaaaagttgcatttgtttattttagactacctgaaaaatgtataagatcgcagattacttttagctcagggaaaattactatttaaaaagcaagagatcgttttatcttctctcatgcatctgtagttgcaactgcagtcatgatgtaaaaatatttccattggtgaatcaaatgttaataaaacactcggctatttggctagaaaacttggtttaaccttgcatgtggattcagggtgaagcaaaggtctctaattctaaatatttgttggtaaatgttgctccatcagctacttggaaatcagtttccatcagattgggtaaagcctgctaactaaacagagcagcaattaggcctcagaaaacagcctctgtttttattcttcttgtacttatacaaagtcaatgtgtccctggcctcaatcctcctaacctccttctttggtatgaaatgtctttggcttgcaaagcaacatctgtgaggttatcaatgcattttgtggcaggctccctgtgaactgaaggcctgcacaggtgttcattctttgagaaggctcaatccatgtgactgtggcttttttttagcactcttgcttgtaggcaggtaagctcaaagcatcaccctgtagcttccgtttaatgggaatatgaacacttagagtgaagctgtggacttacatagctttcttaaagcaaattcagctctttaaagaaaaataacaactattctttgccttcaaacctctctcctctgcccccaacccacacccccaaatcagacaggccagatgtttgtgaaaactgccgtttccacaatcaaaagtacagcatttaccatagtttttatcaaagatttcaattcccctcatcttaaggaaaatgacccttttattttgttgtggacataaaattatggccctgggaaaattggaagcatttctgttgagggaaatcaattttctcactgccatatatgatcaacatgtcacagccatcacccagataataatagtaaagtacaagtaaaatggctggtaatactggctttaaaggtagaaaaagatagaagcaagataacaccccccatccccccaccccccctttaaagcatgtttgcaaaaagaagaaaaggaaagaaaaatctctaagggttatttttgttctttaattttcttccttccacctcactttcttccctttgctagtgctttctagagtgtaagtattttattttcttgtgtggactaatcggccaaagcattaatgaaactgtagagatatgtgttcttcctggaaaagagtaagcactttatgtgtaaaccactctggctccttttcaatcaccctgttaatgggtggctaattgtcaaaagatgtgaccagactgagatgacccaagagtgtgtttaggtgggaggcaacagggaaagtacagaagcagcttcttaatttggatcctgcaaacaaaaggaaacatcagatctgacctcgctgctggagtgttaatggctttctccccgtctcccccctgccacttagcatcttttgtgccccaccctgggaagcttcccggcagaagtgtgcattagcagaactctacagttacaaaatgctgcttactacagacaagggaaaaaaaccttcagagtgattaaatgttttttggacaaacacatccatagccataaaagtgccatttttatttcaggcaggcctttcagtgatgtccctgctggggccaccagcacaaaggagtgttgtacctataatgtcatcggagcccttgaaggaagatctaagcactgtctttgtctttataggaaatttggcccccacatgtaaatgtgcgaaaccgaaactgcctttcatttaggccaaggtcattactgaggaaacagcagacagaattttggcaaaatatcaaatattttcaataattcaaccatttgaaaaagaatactgcttgtttcggaatataaatgagagtgagtagtagaaataagaaatccaagctagggaccaaagaaaactaagctaaggactctcacagatatgataaatgggcatgcacaaagatgttcatagaagtattattaagaattggaaataacctactatctagcaataatgaatttaaaaagataaactgtggcatatacatattatgaagctattaaagacaatagttttagaaaagagaaataaaactaaagatacagaaaaaacctttgcagatttaagtaaaataataataataaagttatagctatggaaaaatgcatcctcaggaaaatacactaaaaagaaatacaccagaatgttatggttgtgataggacagcagtattatgggcgaaatatgttttctcttttattccgattggtagagaattggatattgtattgatttagaaacaaacaaacaaaaagtaggcagaaataagccctaagaagccctttttggtgcatgagaacatcattcaaaaagaagctgtacaatttctccctagatttttattagaacttaacatcacagttctccaatatttaggtggtaaattgggaataaaaaggcccggtgggctctttctagcccaaaggaggtactctgctcccagcagcaatgtcccagcgccttttcccactcaccttcaaaacatcgtgtgcctgtttgctgcaatttccacagagaacatgacataaaatttggagactctagacaatgcctgatgctcaatgacatcaaaaacatctggactcaaagagaaaaaatagttgatttttctgcctttattttataacttttctttcctcccaaaaacctactttctcttgtacactggatatatgcatagttcatctgcaggtttactcctagttagttttctctttttttgaagaccaagagttgtccaaggtatccatatcccagctcatagtcccaaactgaaaggttatatcaggtcaggatgtaagtcgcacatcaggaaaatgtcacatctgaattgaggagacctgggtggctgttggctcacttagcactgtggctggagaggctctcagccctctagacagcatcatggaccatgtgttagaaatgatcaaactcagtggcttattggagtggaatggtaggaagagaggtgttcaaagaacacttcctatcagttagtaaaagcacatcaataaaaataaatcaatgcccacttgttttctaggaatctgcttcatattcagcaaagactcccattatgctgcatttctg

SEQ ID NO: 61748 - DNA, 4234 bp, Homo sapiens
gcattgtaaccaacttttatagataaggaaatttaatgacaaggaataatgacagctgcatttactagggacctcagtgttgtatgaactatgctaagcagttagcatgcaacatctccatgaatttcataacaacccagtgaggaagtcattattattcacacattaaatatgagaaaactgaagctttaggaaatacagaaaattgcataaggtaattgcagcacttgtaaatgtcagggccagaaatcaaactcaggtctgactccaaaacacatgcctttgagtgattagtccagaggtgcagaactggtgaagggtcaagttggaacctgggcctgataatcctgatttcaatctagttccctttttattgtcctagtatattcccactttcacaaaatagccatttaataagtggttttaagtgaggtgaaattatactaagaataattttagtccatgtttgctttagccatttagatgtctccttacttggaattagagcctaaacagaaatattaccaacgtccaaacctgctgcttggtaatagagtagatatggtatctttaaagagtgcaaatatgaagaaggcttagtagaatgtggtattcgtgtgtgtgccttgcatattgggaagcataacaaggcttgtgataattaagtcctggttgatccccaggggtcaaagggcagtgggttttaggagcagtatagcacagggatggcaaataagcagcatggctaatttatcccaggcttctttcccatggggctctgcagtggcttctgatccatttcagcacagaactccaggcagccactgcccactgcccagggctgactctagagaagaaagctattcagcatcctcagtagagtgagaagtgcataggttataggtttagttcccaaccctggtgcttccacttattagctgagcagccctaggcaagttacttaaccttacagatcttcagttcagttgcattatcatcatccagaaaataataatgtagaagatgccagtatcccccacctttttttttttactgagtcctgaatttaatcagaataatcctgacatttcacagattttttttcttttaagatatgtgatgccatcagttcatgggatttggagtcagccatacagaccaagatttgagctgcaattctgtcacttaactttgtaaccaagaataaattgcttaactgctttgttcagtctccttatctatgaaaagagaataacatcacctctaccacagttattgtaagattaaaaaaaaaaaagcacatgacaaagtacataagctgtcatttacttgataaatattgtaatcattcctgcaaggcaggtctctaagaggcacctatgtccattccgttggaaggagacatttggccatgacactgcactttgagcttgtcctgtttagcacagccattgtgctagccactgtttacttaactgatgaagttacctggtttttgtccttggctacttgctagcccttgtgcaatagctcctgattggaggctggatccctgcagatcacgtaacctggtcacagcagaagtggtttgttctctctgtctcccttttgtgcccagtgttacaaactgtcaagtagaaagaaactgaagggactcaggggtcagagttggggactatcaggactcttgtactacctgatcttttgcatcttattcaataattattgattacctaccataggccagcttcctagggcacaaacatgacatgacccctgcctcagggagctcagagcctggtgctgccatgagaacaagttttcacttgtaagaataattactcaaaaactaagttggacatgctagagatttcttgaagaaatatatgtaggtgtgtacgtaccaagttcaaggaaaatacaaatgtatttcctcaaaagatgcctttgaacttgaaagaaagagaatgcatctttttaaaaagtagaagtaagactaaacaaggacatatgtagacttttgatatgtgtgtgtgtgcataacttttattaaatgtatatgaaaattgaaagtgaacacttttatcaaatatatatgtatatataaataaataaaataactagagtttaagaaactttcacaaaccagacacactcatgtaaccagtacatggattaagaaacaaaacattatgtgtaccttccaaatccctccatcacacctcttgtagtcactgcctgttagggtaaccaacatcttgtattgtattagcataaaataaatttatattttgtataaatagcatcatatagtatgcaaatttaaaactattttcctatcaaatttcagagtattttttgatgctttgttcattaaactaaactagtgaaggttgctccactgtgtagcatatgctcgaagtgaaggattctcaagcttgcgtaaaaatcgctgactctttctgcacgggacgatgcctttgtacctggatgtcctgatcttggaggttacacttcagaatgtgaactcattcattagaaaatgctttatttgattgaaggccaggtacttgcttcccagcaacacagcttaagtaaatgcccaactcagacagtcaacattactgtctcaaaaatctttcattctgacatattatcacacatttgtcattagggaactgcatactcacatatgtccataaatatttggtcttggtagacccaggttgacctgcttgagaaacagcaggaaaaaaatatcttatctctgtccttggacaacgtacaattaaatgaagggaaagtttgaatgtggcctctgagggactttgtttccctgaaaacaaaatcattttgctctagtcaatcaataactttacatggtaaatgtgagtcttaggctcggaaagaggttatcggccataacatttcttaacactttcataatgttatcaggaattaaaaagtaacatttatcaaatatttacaagttgcgtgggacagagcactgtgtaaacgtatgaatctgataatagccaagctgcgttttaaaacagatgcagaaacatctcaaaaatgtttgcttttcagtgatgcattctccatcatgtaaaaatttaactattgagatgctctggtgacacgtggaatgggtcacacaaggaggaatgtatctcatgtgaaaggtcaatatcaacacagatgaaagagattgcattaggcaggttatgccactcaaggaaggacacacattttctaaatgaacgttgaaaaaaaaaacctattatataatggaaaatgtgagacaaatattatttacttcagttgattacatatgaaaagtgtgtactaaggcacacacaaaagcaatagtccctttgtcttgctgtcaactcctttctccttttgttgtcagtggtggcacttctccaggttctaaaggggcagaaattcatttatctttcttcctccacagtcccctgggcactttgcctctgtatagggcttatccagtcaagagcccccatagctaccttcatcatagtagatcctgtattctattaattagagatggtcaagaaaaagaaagatgaggaggaagagggggagggggaaacataaagtgataggtgacaatcttaaagaagaaaaaagaagagtattagctgaaaaagggagttactcagccctaacaatctccacattttccctttatctgatgaatttaatggtcctaaccctgcaatttccacattttccctttatctggtgaattaattaaatggtccaagagatggctgctgagtcctaacctggcctctgcatgctgctatcttctctgtccctcccttctgggccacatgtgagggccaggtcttagtcaaaattggaaagtgtctagtgtggtctgagaggcttagaacaatggaatggcactttccaataaaaaaaaatgttttaaagtagattctgttggtagggcattttttatttgtttcaacagttgaaaatgtgtgtgtgtgtgtatatatatatatatatatgcttgacaaaaatgtttactttcaattttcatatacatttaataaaggttattgctaatttcttagccctttaatctgagagctgtatttaattttacattgatgtggatggctgctgccaattcaaggctgcaagggtaattggtaataaggcccagatgctcttacagaaacagaacaaaaaatatttc

SEQ ID NO: 61749 - DNA, 1703 bp, Homo sapiens
taattatccaataataggtatctttccctccagccattctttaaattaagacaagtcatacccctaaaaccaaggtctgatcatgtatttcctaagtagaaaacccacaaggacctttgttcactcagcaatgaaagattctggagccatggatttcacagccttttgcaatataatctcaactcgcatttagcgatttctcactagatgctacccctctctttatccttccaatctcagcctctgatatcatcactatagttagaggagactgctcactgtcccctggatatgccatttatttactgcatttgtgcctccgcacagatgcccagtttgagatatcccctctaacatcaatcttcaaatctctgctatctcaaatactttttattgaagacttagctgaaatttcacctttctgtgaaatcttcatcaatctgtcagttaacattattttttctcctctttcctgtattccttagcactttatttggcctgtgttatacttataatcccattctttgggtctcatttctgactaccccactggggtagggaagcaagacattttagacacattttgagactttgaggctgatgttatgaggataactttgcctctctacaatggaacctctggtgctgaaatcagaagactgagctagaaaaatcagaggcctgacccagtgtgtcagtttctgtcatctttagcttatctcagacaccaggaaatttatagattatatgtttgctccactaacatgatgagtctaatgctcatgggacagctaacttccaggtagtgatgactgaagaagtctactttatttgcactgaatgtttatgtagcattgggtggatcatattatgcaatatctctaggccaaagcatcattttcccaacactcactttcctaacctttagataactttataaaataatatgagtcatgcgttgcaaaagattacaccttctccctacaacagaaggggaaattcactgatttccactcccttttccttattctcataaatcataaacttaaatttaccctagggattttatttctttgaactcaatgtacaagcataaaacaaattttgttctcacaggacatcccatttttgtttcattagttcaaggaaagggtcactcaatttttaaagcatttggtttgatctttgctatgattcatgctacctaacatccacagacacactctatatactgaaatgtatcttatatataaaatgtgtctccatggaccctataatggtggtactctcacgtaaagtactcaaaagctgtattatggatacatgagtctaggcagggtaaccagaagtagaaaataaattaattttgttgaatatttaaataattgttgttttgcccaagttcctattacacgacagatttctgtttcttcttatgaaaggtaaaatacttccctggggctacgggaggaaatgcttgaaaaaatttcaccaaatataaggcctagattatactagttctattttatacatttttattctatgttcagccatctcactgatatttcattccacagagagggaggtgataaaatatttttttaaggtaataaaggaaaaaggaaataaagaggatttgtcataatttaactagataaaaataattcttgtgatcttaatgtaagaatagactatgatctcta

SEQ ID NO: 61750 - DNA, 775 bp, Homo sapiens
aagaagaaagagtcctcattcgcaattcacacaaactgtaatgatgatacacatgtggattttttttaaagtacaatgaaagtttaagaaaaaacatgcaggttttctaaaaatgttttgtaaagattaggtgaagatcagtctccccaacagactcttatttttccttacaatatctgtaggaaaaagctcatttgcagacagctgcaatatgagcttcctttccttgccctgtcattgacctccaacctgatctgaaagaaccaccttctttcaaagtgagaagttattcatttaccataatagctctattcggggcctccttaacagaaactagcaattgtgcccaaacaagaaggttttgtgatcctgactaccgttcttacacaggaggacaaaaccaataggaaatttccgttccgacagccacagtaggcggccataaagttggtgtttaaaactatggcttatgtgtggtgatcacaaaaagagaaagaaaaatcattaggagtttgcacttgctctggttatgtactggggtttgccaattatgttctcttaactcgacagcttattcattgagcaagagctgctatattagaggttagctgacagtctgcagtgtgcaacttaaaataaaaccactttatgaagaggagtgagaaatataaatgataagcctattggataatcattagaaataaataaaaagcctttgatacatgcagttagtcacaagcattacaagttgaaatgcagtccagtgttaaagaga

SEQ ID NO: 61751 - DNA, 496 bp, Homo sapiens
aaaaagcttgtctccaagaacattaagcactttcatatcttcaggggccactaaaatgtattgattgagaatgcaggagaaaacctctgtttttacaaaaagttttgaagtaggaaattttagtgaaaagaattgcgtgtacttctaggaaatctcatcatgatctcagtgtaatagccatttgcaaaagagccctgaactgagtccatgccagggagcattattggaaaatggcccactgcagctacttcctggaattcctcttcgtgcttcagcagctagcttggtaggcactgggcaccaaacagaggcacagcatcttacagagcatggggaaactcattccaggatgacacagtttgtgatttgtgacttgagccttgaaacaggcagaagacaacagctcacgttacccaaatcatgagataagccttaaaaaaaaagtacaactaaaagtggccatggaaaaaaaagactgaggtaattatggcaagta

SEQ ID NO: 61752 - DNA, 657 bp, Homo sapiens
aaaaatgtgaggagtaaatacaaattttaagtgattggtttacatgttgtttataaaacactatctgattgcctgacagataattccccaacatgtgatttccaggtattgcatcatagacaaggtcctggtattttcctcaaaaatcatcacttttactactactctctgaaatcccaggttgagaaaagagagaaggtattgtttacaattggtaaagcaagagggtggcactaaagaacaatccattccaacctctgaactttggagagtttgggagtaaaataatgctgatacatctacatgtgaatgctataaacagcaggtggggagtaggcaaaggcacacagggttgaattctttgtctggagtacaaagactttgggaaaagatactgagtctgaaagtctgcaagtagaatcccagatggctggcaggccaaaattattcctctactacccacaagagcccagaataattaaaaccaacgccaatgacacgaaatgcaaactgtaagcaatccaaagtacatataaaaaggaaaaacagaaaggaccaactgttcagacaaaaaaaaaaaaatgtaataggtgtgaaagtacaagtctaacacttttatctgaagaacaaagaagtgtactgatttattttcttttt

SEQ ID NO: 61753 - DNA, 1180 bp, Homo sapiens
tcacgtcgcattatttaaatttattacaccaggcatgttatttttaaattttaaaatatttcaaaagtagattttgtccctcatgcttttaattgtaggttaagttacttattgggtataatatccttgaagagatttgagtctgttcatttatatgcttctggtgtcaattaatttaatcagatcaatatcttgctgagttgatctggaatttttcctgggaagaggaagagtattgggaaaggataaattggggtatggtctcttgaataaagtgctgggtgaggggtgaagtcctatgagagttattttggttatttttttggagaggaaggatatagtagagatgagagtaccaaaacattttaactgccatcagttttcccttgggacatgatggtgatttgccttaggcaaataatgggtgactaatgctccagcaggcatgtcaggatttgttttgaaaccaccaaggctcagggtaccctcactatactcctaggtccccagtgccacttgtaaaattcaataccatattaccacacccagtgacctcaaaaggctctctcatctcttcacacttcctttctatagactcactcaccagtgaggacctccagaaaggtaggactgtcctacctgaccactaatgtaataggaagacttctactaataatccccaatgacagtcatccttatgtgattccctcccctttgaatatgataggatggccctccagtgattattaaagggcaaaaggaactttgcacatgtaattaacgtttctactcagttgtccttataataagcagattattcaaatagaccaggcctaatttgatgagcgctttgaatgcagaaagttctctccagccactcaaacaagaggaagtcgagatttaaaacattggaagtatttgatgtgccattgctagcttggaagtggcaggaggccatgaataaaggtcagggagtggcctttaggagctgaaagcaacacctggccacagccagcaaggccctcagacctacaagtgaaaagaactaaattctgccaaggacctgaattagtttgaaagtgaattggttcccagagcctctagatgagagcccagttggctgacatatttattttgcctcatgagatcctaaatagagaacctggttgagtttgcctgg

SEQ ID NO: 61754 - DNA, 913 bp, Homo sapiens
ccctagtttctcttttggagttagatcactatgggcaaagatctgaagctgaaactcagtaacttttcagacctttttctcagttagctattatgtatttctcaattttttcatgtagccccagaaaaaaattcaccatccccaaaattctctagattgggaataaatatctcagcatgtgtagcagactttgtggcagccctggtgaatgaaagctacaagcaaaggttaaaaaaggaatgtattaggacatttcactttagacttatccaaagttcaatccctctaaatattacaattaatgatttactataagctatgaaaataggtatctctttgatacctgttcaactagccagcatattaaactattctgtttatacaagctggaccttgattcctcactattcttttggttttcagaattcagaagcgtataatttctctttgtattaaaaacaaaagagaggcttatcttgtttcaactagaaacccaatcccttattcataaatgcatattgaattgatatgacattcctgagtatattttggaaaataactcatcaggagcctagttcatagtatttcttccatcagtggaactttttcctacaggtaagtcctatttcatgagggcaagctttgctcccgtgacactgcacccaaatcactggctatgttccttttccatctctctgccaccattctactgataattgagtcctctcctctgtgagatttatttatttatttatttttattttttatttttatttatttatttattttgagactgtcgcccaggctggagtgcagtggcgccatcttagctcactgcaacctctgcctcctgggttcaagtaattctccctcctcagcctcccgagtagctgggattacaggcatgcatcac

SEQ ID NO: 61755 - DNA, 456 bp, Homo sapiens
cgaagaccaccagcctgggacccggcagcccgacctgcgctctgggggtgcctgccttacctgagccgtggggcggaggagcggcagaggccaggcaggctggcgggtctcgcccttagggtcacgggtaccggccccgcccgcctcgccccgccccgccccgccccggtcctgcccccgcagcgcgcggaccgggctagctctggccccagccgcccgcgggcgggtgcacccgctctcccttcctgcaacctggacccgctgcctccctccctccctccctccttctctcacttgcggtggcggctggaaaaggcccgccagcagcctgcggttgcctgtcctctcagggctggagagaattagttagggggggttagatcaaaagagcccaggtgacgtgaactcttgaccctaggcattggcagagatgaggcctcaacctttttttttttt

SEQ ID NO: 61756 - DNA, 734 bp, Homo sapiens
cttgagcactgaatgcagaggaagcagtgttacctcggttttgctggaagtaggcttcttggatagttttctttctttgatgaagtttctgtattttcatgttttaagtggaaatactttttttttttttttaatttgccttggagccaatgtatttgttcctggtggtagggaaactgtgcctgcgggccacaggacttaaaggaaaactgtggtatggagctctgcttgaattaaaaacttttttttttctttgagtatccttagctacttatctggcaagtgcaggacccaggtgttggcctgaactctgccaaacatatgtaacacttaaatgtgtgcagtttcccttcttgctacatccatgttgtcacttaacccccaggaggtttttattatctttttgttaatgtcaggctgtgaggtacgtggatgtgatttggtcaaggaataggcctgggcagatacccaggcctgcatgactcactgagtttggcatgcaagcacacacctccacttattatgtaacctgtttttgtaagttcatatttggctttgagccactattgctgtaaaaggtataactgccctgttgacactgtgcacaagagacatggctcttggggctcggctcagctcaacatggcttgacatggtgggtgcgctggcgcccagagaaagagagagtcagagctttccatctttgcagacagaggggatccaggatacagctc

SEQ ID NO: 61757 - DNA, 2122 bp, Homo sapiens
agctgaatcccttggatctaattaatgaggtcaatatctttgatctgttacagagatataaggtgaagaagtcagacttgtaattatttagcacgtcaaattcaccttaatatacagattcttagaccctcttcccctcccccaaagattccaactcaatagatctggtgaaaaccaggaatctgtaaacgcccagtaattcagaagcaaacgtaagagatcaaattctgagaaacaatgtgtttctctgagaaagagaggaacgggattcattctgtaatgacaggacaaattcatgtaccattcaaaacgtctttcacaactaggactcatatttattatttacgtttacagacttattatacttgtagccctacgcccaaggctctatcatcatttacaatccagtcacttcctcaaacaaatgtatttgctccgttctctgccttttctcaaaatgttcactttccttccacttagaaggccccctccgctttcttccgcaaaattcaggatccaagataaatatcacctctatgctgagtctttccgtacaggaccctccccaactcacctgcagtaacttaatacataactctaccattaagcaatacggaacacttccatcaacctctacactttagtatggaccttagtgtaatgcctgacagggtatacactcaacaaagtttactggattcaagaatttggcccaagtacatgagtggccaaacagccctcacagacatccaagattcctggtaggcgctagctgggatcgctcctgaagttcctcgctgccaacgccacccaagggtggcgtggtggccagcgccgctcggaagacgggcaaggagaaacccccgaagcggaacgttgagaacggaggcccagttaagccaccctcccaggggaacaacgggaggaacccgggccaaacacggcagacgcagaagcacccagcaccgagccgccgcgcccaggaaccgcgggagctaggctgaagcaagaactggtgtcgaccgccttaccttgcaatcgttgcggacgaacatcatgccgtgtccaggatagatgggccccgaacagaaataacacttttcgatacgcatgttgaacccgcgtgtaaccccaccaaacaaacgccaagcttgagaggaagtgatgcaaccccgtcaccggaagttaccttcttcccccttccccgaccggaaaaaggcaagcgtccttcgttctcgcgggtctgttagaccagatgcgaacacgactgtgcctccggcggccgtgtggtcaaatgcgctgccgtttgacgcaggcgcagagctgcagactagacctgttcgctgttactttggggaaatgtggttctgcgccaccttgtgaacttgctctcacagcgcctagttttttctctctgtgtgtcggcatttatgcaagtattatgtatctttggtttgtgctttgcctcggagtgctctcgagagcactctcttaactcatttgtctactgcctgccctagaccagccctcgattctcgtcccacagtgatttgcagggtgtaagcggcgaagaccctgcaatccagcgttgcttcgaacattgcaatgaaaacggttgagttgctgatgctccaaggactttaccagcaatttttttaaatataaaatcgtgttatccgcctcccccccattttaattaatatgcatatgtagtaaacaaatattttcgccggaaactacgactccctccctagacctgcggtcttcctccccaggggcaaaacagttccatttattacctgccagagcttttctgtgcataggcaaacatgtatatttgtgtgtttgcctgtctctacgtcctcttctttataatactagttaatatgctatttactcttttctgcatcttgctgttaccttgtatcccttcattggaatgtgagctccatgaggggcagggatttcagttcgtttggtttacaactacatcccagtatctagaacagtccctggcacataataggcatttgatacatattttactgtaaaagggtatttaacattctttttcatatatatatgccattgtatgaaagtattttaattggtcactaatcga

SEQ ID NO: 61758 - DNA, 697 bp, Homo sapiens
attatctgctaaatcctcttttctcattttaacccaattcaaaaactatagattgagctcctctctatgaaatactccataaccatcgtgacctgggcacaggtcaaagacagtcccccacacccctcagataccccatatgacagaaggcagggttaggctctgtgaaaccagacaggctgtggaatcctaagaccgagggcacaggaaacaagcaaagggctgaaaaagcccacaggggcaagaagtcaagcctgaccctcccccagtacttgagaatatacttgaatgtgcttgtttgatctagctaactcctctaactgcctttttcttttttttctttgcatttactgacatactctcaaaagaatgctctaggatccatggtttccattgcttcatcacttacttcctccttacccattgcaacatacctcacagcttcaacactacagcattctctgtggtaatcgttctctccctgtttcttttccactacgttacatgagtgcctctcaggggagcagggggacatttcagactggccggtaagactctgtcagcctccccctcagaatcacctaagtcactggttctcaaccattgcacatgaagatcacgtggggagattttaaaagataccaatgcccaggctttgtaatgagtcagcttggctaggctaaacaacatttcccag

SEQ ID NO: 61759 - DNA, 1085 bp, Homo sapiens
tttagaaaataagcccaaggtcatgtcttaaagaggatgaatataaagcataataaaagaacaagcattgcagtccttattcagagaagcattaaatttgtgcttttcagtctgttttctatgaaacgctgggattcatgaaaatactttaagagttctgtaaacttattaagatttttttttctatgtttgttttttgtttttttgagacagaatctcactctgtcacccaggccggagtgcagtggcctgatctcgggctcactgaaaccaccacctcccgggtttaagcaattctcatgcctcagcctccctagtggctgcgactaaaggcctgcgcaaccacgcccagctaatttttgtattttttagtagagatggcgtttcactatgttggccaggctggtctcaaactcctgatctcaagtgatctgcctacctcagccttccaaggtgctgggattacagacttgagccactgcgcctggactccttctattatgttttttaaaaactggaataaaaaaaagtatatagtcaaataagttacataccaaatttagagacctccaagttatttacttatgctactttgttaagctatttatggctacctttaacgtatacatgttatttggaattcctataattattagttgagaagactgtactttgcactagacttctctcctttgcttaatcagaatggattaatttgtctattgtgaaattatttaaggaagtacatgtgaactacattcagtaaacggcagtcaaagctcaggcacatgtttcagcagatgtttgctttcatcctgttacaacagtcaattgagcaataaagaatgaacacaacatgttgcatcacaacattttattacagatcactatagagattattctttgggaagtttgttgtctgacttctagaagcatgaaagggctattctgggtttgggctacttctttttcatagcagatgagtgtcttcacagtcagttcctgcataggaaacctacataatgtcattgcaacaaacctttcattgcctcagaaaactgctctggcccagctggttgcaaact

SEQ ID NO: 61760 - DNA, 944 bp, Homo sapiens
tcacttgagcccaagagttcaaggctgcagtgagccatgactatgtcaccacactccagcctgggtgacagagtgagaccctgtctcaaaaaaagaaagaaagagggagcaatctgaccgtgactcaaagcaagagccaggacctgagctgagcaccttcttcaaagccaggcaagatttagctagatagtgaagaataggatacacagcatgtttcatgcaagggcatgttttgacttcaatttaacaagtattgaggaggcttgctaatcatttcaaaggatacaaatgtgcctcagatataatcctctaagtacaaaactggctgtaaactcaaaggaatgcttatgaggtaatgtgacaaattgaggagagcaggacgactaatccattggtatatggggttcctctgccaccatctgtttagacccaggataggtcaccatccctctgcaggccttgttttatcaaatatgaaataagaggtttgaccacaatggtctctttccaacacagacattctatgctgtatgattccaggttcaaagttcaaagcttagtcatgagaaatttaagtggggtcatggtgacagttgtcccttctatcacctctcactccttgaagatgagagcctagatgagggcagccgcatgggaatgggaagaaggggatccaagatacactaattttaaaataatagaacagagttccacatcaggtggaaaaggacacagcaaagagaacaccaaagaataaagcctagggggccaggaggccaaaataatgttgccaacagaagcaggacatttgaagtggggaagggaaagagttggaatgggcataaggtgtttgtgggtggtatcagatttttggaagggaaggatgatgagattggatcggggcaggttcagcatgagagatcatcaaagccacatgaccaaga

SEQ ID NO: 61761 - DNA, 1004 bp, Homo sapiens
gtacatcaagatcatatttaacttctactagcctcagataccaaatctgtaaaatagggataataatactgacctagcaaggtggttgtgagaatcaaatgaaataagtaatagcctcacacacagtgtctcacatacagcaggtgctcaataaaagtccattccctcgcttgtgtatggcattctaatgaagacttacaacaatagtttttgaataaatgtcacctgttttgaataaatatcaccaaggaaagcagatggccaggaaagttaaggcctcaatgttaatgactcatcaactacaaaggccgaggtcagcagccttaaccagcgattgagtcatgaaatgtacttgtagacagtggttctcaagcttcggggtgcatcagagtcacctagatggttttaaaacacagactctaggccccaccagagtttcagattcagtaggtctggagtggggctgaaaatctgcatttctatgttcccaggtggtgctgatgttactggtcctaatctgacactttgcaataaaaaaagaaaaactatgctgtgtatatttcctgtttgacactagactggttagtttcatgtaaatagagaaaaaaactaagaaaccaacaatttccgaggctgtgctgcctctgtccctgagaatcttactatgttgtttgaacaatgcatagagaggacagggagatttgagttctatcttcccactcacttgctgtgtgactctgcatgagacatatgatctcttccagcctgagtttactcaggctgggagtaaaggtgagctagacactggttcccaaaccaggttgtccaccaacaatcactagagcagtatttaaaataaaacatagattcccaagccctagccacaaacctaataaattagaatcaccaaaggagagactgaaaaatgtgttgttgtttcttgtgggtatggtttatatatatatatatatatatatactttaagttctagggtacatgtgcac

SEQ ID NO: 61762 - DNA, 2249 bp, Homo sapiens
aaatacagaaaataatgatcctcagtcaagttccttcagcattatattaacctttcttcacttctaaccatctgcagaaactgttttccagattgtattttccctctaaagcaagtttttaaggccgaaaaaaaaaaaagaacaagaacagtgagtggagaatcaacaaatttaattagcaatgattacagaaaacttaaatagcacacacaactctataatccctctacccccaattccaacatctgactgatcaaccaaccataaaatgtgagaatccatccagaaggaaagaacagctgttaagctgtaggggtaaggaccctgtggcagaagaccctgaggccatgtgggcccaggtggccagcaggagcggaaaggctgggaaggctcctcagtccagggctcacaagactcccttcgcttcaggcctgactttgctgaactggtgatctattgggacagagacaggctttggcaatagttaccaaagcctgtcatcatatctgcaccaccaccagtcccgaccggagggcctggctgccaggtagttttcagtctaactgacaggagaagagagagcccctccctcgcagctagtctgcagtccagaccctcaccaaccggagggcaaccaggttaaacagttaaactgaaagcaaaagagggaggaatgaaccggggggcgtgcgggaggtcggggactttcctcctttccctcctggaaagtttcctacccctgatgggcatcctcccacctggatgcaacccggaggcgatctgagaccctggccggacctgggaccgcacctggccagcaccaggcagttgtcatcactggggtctgcgctgagggcctgggagagaagccactcttcaggcgggctcgggcgcctggaggcggggaggaagggcggcgcactcggaccccagccctaggacggccccagggggacgcctcgctcggccctcccggagggaccggacccgccgcgcgcctcccgctcctcaggccccctcacctggctcgccccgccgtcctgtccccgcctggctcgggtcctcgcgcgccgcgtccacccgccgccggccttttttgggtcgttggcgggtattttccgcctggccccacatcacttcccgtaaaggagagcgaggtggggcgggaccttctctcctccacctcccgccttctcctgtcacctcgggagcggcccccgcccggctggcggggggcggggtgctgtcgcgctctccccggcggccgcgcctccgaggggtcctctgtgagccccgaaaaggccccgctcgcctcctttgtcccaacactagtttccgctgccccattctggaaggcgctacaaaatataggagtgttttcgttttgggacacaggagggacatttacaaactgcaccaaggaccggtgcgcggcgaggtgtcgtttggggactctcccctattcacctccccaaaaagccatgttctaagggtgttttccacggcatcagttcgcggtcgccaccgtagcagccggaggtgccgggcgtactcacgccggccccgcccgaggttcccgagtccgcgcggctcctgaggcggcgtcccaggcccggccctgcccccggcttcccgcccctgcggctcctggcttaggtcggcctggacacggcgtttccggggcaagggaatgcccaggattcctggaaataacatgggagaaaaataagtaaaaaatttcgcaggaaaaaaatcaatgtaattccgggaggaaatggcaaacggagtctctgctcacactgtgtaattcaagaatataaaaccactgtaaatttctaagagtgttagagcaatgagtttaaaaagaagaaaactacagtatgttaaggaaccgcctctgtcggaagaaacctgcgcgcctttgctgccacccagcggctctcttctcccagcgccaacggtgtcgctccggcctgcggggtagtgaacctgggactgcgtagggggtcagacctcgtggttcccactcagaggcagccaagttcatccctctcagtggccaggaggtgtgaacagcagcccttgggcctgtccctatggagtctaaggcaaaggccctttgaaccaaatgtttccacttctaagcagagtaaaatgttgagaagccttagttcagcttcccttctgccttctaagccgtctcgctgacttgtgtctacctccaccgcaaattccagctgtcgcaggcc

SEQ ID NO: 61763 - DNA, 1633 bp, Homo sapiens
cctctgacctcctgatccgcccgtcttggcctcccaaagtactgggaatacaggcgtgagccaccgcgcccggcctggttttacttttaacaagaggagtgggccgcacgcggtggctcacgcctgtaatcccaacactttgggaggccgaggcgggcggatcacgaggtcaggagttccagaccagccaggccaatatggtgaaaccccgtctctacaaaaaaacacaaaaattggccaggcgtggtggcgcgcctgtagtcccagctacttgggagctgaggcaggaaaatcactggaacccgggaggcagaagttgcagtgagcccagattgcgccactgcactccagcctggactacaagagcgaaactccgtctcaaaaaaaaaaacaaaaacaaaaacaaaaaaaaaacctaacaacagcaacaacaacaaaaaaaataggaaccattcggcctgtttccacatctgtacaacaagctaaatcatccctaccctgcctacctcgttgaacaggcattttttgtgagagcaacgaacctgaaatgttaacaccaacactgacgtctacaattaccgttaccgtttttaataaccactcaggtacctccgactgttctgcgcctgctccacgtcactaaactcgctaccgcctgctcccctccagagaccgggggccttccagcagttttcggacccccgagcacagagaccgccaagccaaaggcgagtagcaatccctcggttcggaaacggcgaaaggaaaccgcaaggaggccaccacgtcgggtgggagctacgaagttgcccgttcccggttacttccgggcttgcgagcgacgactgctctcaaaggccaaacttaatggatggacgagcagcgcgctactgcagctttcttccgccttaggaaggtggcggccagggatgaggaggcccctaagcaagtgcggaatggagccggggggcggagatgccagcctcactttgcatggtctccagaaccgctcccacggcaagataaagctgcgaaagagaaagtctaccttgtacttcaacacccaggagaagagcgccaggcgccgcgggggtgagtgaggggacactgtctggagagctcctacccccatctaaaaggaaccccctccatttcattaccagccagttgcccgttgagctctgtgttgccagatcttgagttttgaaatgctgggaaatgctggaaacacagattttaatataaattctgatttttaaatgttggcaactaaattcaattttttaaaaaatactctgtatttggccgacaggctgtccatttgtggtcaagagcaggactttggagacatcacacagacccgggtttgaatcctgataagtaatttacaactttatttggacaaggcagtttaatttctgggcctcaatttgctcgtctgtaaaatggggctaataatacctatcccataatattgtttggaggattaagtgagatgcatgtgaagaaattaacacagtgcctggcatatataatagtaatcatcaatatatatgtacagaggaccattttatattgcacatatacaaagggctgcttcccaaattagtaatttgttagctggtttctttca

SEQ ID NO: 61764 - DNA, 2597 bp, Homo sapiens
cccctgaatctatagcacttactatacttctcagcataatttgcctaatggtagcttacactacttacttttttccttgagctactttattaattagtattaagttcaaagttttgataaatagctccaattttatttgttaatgtctttattatagctttatttttagagacaggatctcgctctgtcactcacccaggcgggagtacagtggcaccatcacagctcactgtaacctcaaactccttggctcaagcgatcctcccacctcagcctcctgagtaattgggactacaggtacacaccaccaagtcaggctaatttttgtatttttagtagagacggggtttcaccatgttgggccagactggtctcaaactcctgacctcaggtgatccactctcctcgaccttccaaagtgctgggattacaggcatgagccaccacacccagccaatatgtacttgtttctaaaatactttttctttatcgtaaatattctatatatcaacctaacttgaagttaatctcaagggtcagatcctctcatagccagagataacttccccagaaggaaaaatctaaactccattatttctttggctcaaagactaatgctttaaacatgaaatgtatttctcagaggacctgagatttcacattcaatgtagtctcattgttcatgaaataacttaaagatccatttgagaatattaaaaacaatagctacttcctattgtcaaactagactgatgaccattcttacacttatagaagtgagattaaaacaaatcaaaaccaaaattaaaagctcaaccacagaagtacactgcagtttcaggacatttgatgcaacagagtgcaaagtcacagtcaggagaggagccaggtttccttcagtctggaaaaagccaccaatctctaccaagaaatcaaatgaataacccatttgactttttttcttcatcaaacttcccagtcaaaaagtatttatcacatcaaggcatcacacttcaaacatataagtgctttatgtaaatgcacttagtacaataatacttcatatgagtagataactccaccacttacaaagcaatttcattttcatatctgatttaatcttcacaaatacccccataaaggcagcttgctattatttacaaattccaaatgaaaacgaacagaaaattataaataataacttcctcaacatcattaaaaatcctctgatttccaacctaatgctctttttacatttcaacatgctggcaatatgaaccagaagtaagattttgtaagattttaaaagaatagtgatttggataagtacttaaaaaaaaaaaaagatttcaggcttcctgtgatgacagaaaaaaatacttaactcccacttcttattttctaatacttcctcaggtaattctatagacccttaaagaggtttccacacattaaataccctttgggggaaaaaatccctttatttatcacttaattacaatccttcccatatcatagggctgaatttcatcttagaactcaaattgagagaaaatatggccaagtttatctgatgcaatacattgcaaatgacctttgaaaccaagtgttttagtctagttacaattatggaactgtcaggaaggaaatttgtgaaaatgtaatcctttatcacttacaatactgcaacttcctcatcttcaccacaaagaaacacaaacataattcagcctccagcagttctgcactgttagatgagtctgcattttttgtttaaagtaccttggacttaacaggccttgctgctgtgttcatgttcttaacatgttcaaaaactactacttccatgattttagcagttcatatgcacctaatttttaaaagtctttctttaacttgcataagaatataattatacaacccatacaataatactgtggaatgagttagtaaatcagacatgttaatcaattatgaatttttcttatgccctgtgaatagacccaaagcctaataacatattgagccaactcagtacacagaatatacaaaattataaggtaaaaaatattgaaaagaaattgacatttggagtaggcaagctccaaagaagacaacctaagaaaataaagtatgaacaccacaacctgaaaaacaacgtgttaccagtgttttttgtaaaacactttagaatagatattttatccagtgttaatggacacttggtgttaaggtaaacccccttaatttttaagggctgatagtagccaaaaaaaagaaaaatgtactgtatattactgtggaagaacaatgtagccctttacaacagaaagcaaaatgtgggctaatgattgattatactacttaccagtccatatccaacataaccataacaaaaaataaaaacaaaaatagacataagccaaaatatcagacatataaaacatggttctgaacgtgattcaatgttgacaagtttaagattttccaggcttaagtgaagaaaagctaagtactttcacctctgatttaactgtacaaagtgaaaagaaaccagatcaaaagatgggatgtacaggccagacatggagctctca

SEQ ID NO: 61765 - DNA, 1788 bp, Homo sapiens
aaatatgaattaaaataataccctcaccatctccatcttctgctatatgacctgaactcagaaaataaaagtaaaccattcacactggatgtgtgtgataaatatcccctgagacgtgtgggacccaatatgattctaatcttaaaagatacgatgcagtaatagcgatatttcaagcactatcctgtagattggaggagacaaatctaaaattcatagtactatatagttagctattctaactacaagaatgcccaactgtgtttttcaataaaagtagagcagaacagtgcaaacttcaccactcaataaaataccttacttggcgctcccaatagtgctaaacataaacaacgcgtacaaggcactgcatgggacagctgctaatgaggacaaatcgattagggagaccaaagctaaaggaggccactggaactggagaaggatatggagaggtatttgatcatcatcaggctggcgtgctagcggaagtctccgggcattatttaatatttaatctttctattcctgacatcacgggggctcaaatgtcatcaaaagacaggctggcattaaacccggcagggtgacgcacataacatcttaccatatggattttcatcagtccagaccgacaagcacctcaaagcctgcccagtgaaggaagaagggtggcccaggccgtcagctctcccacccttggcgcgcagttcggtatagcactcggggtttggaggctgcaagaccaccggaccggacgccccagggtcggctcgggcctccggagctgtgcactcgcgcacggcccgaggaggtcgcccgtgcggccgctgacaccaggcgtcaagtccccgcccgagcagccccagcctaggaggcggaccccgccactgctcctctactgagccgagcgtgtcggccagggactcagacagtcggcacaaaccccctcccggggtctaagcccgcctagtacagtacctgaaggggcagcgccacctccgcccgattgtgctggctgccccagtggcggcggtcacagctcgggcgccaatgacgcctcttataaaaacaacctgctcgcaggcgtctgcagccggcaggcggtgaccggctgggcgccgcagtgcatgccgtgacgcgtagtcccgcctgcgcctcctgcccggcagcggtgaagagaagaactaccactcccgaagtggagcgcaggccgccgccgggcggctgcgggaagctgggccaggcggccgcagatccccacaacatccgggagccggcgaccacttccagttgctatggttacgagttgcaacctccagaaagaattcgtggtttcacccgggaaaacagctccccggattaaacggataggtttacacatactgatccacccagctattcatcttctgtttgctgctttaattgggtgcggttaaaaggccacgtccctaggcgttcaccggctttcttgccatctgctgcatgaaaactgactttgccgaaaaaattaacaaagaagagcgaaaatgacagaccgcaaccgggtgagtttaggcagagggctagatgtttgggaatgttggtattcgctagtataatttgaggcaccacctactcctaccacccccaaccccacaaccccgaaaagcactttacaaggcaactactgagcttttacatttacacttgtaaatgcacgtttccttaagtccgaatagcctctgaaggtgtaaagaccatcgagattgtatgcattcataccctactgttgcaaactgttcagtg

SEQ ID NO: 61766 - DNA, 1159 bp, Homo sapiens
tcctctttcaccttccaccatgattgtgagacctccccagccatgtggaactgagtccattaaacctgtttttaaagctttataaattacccagtctctgatatttcttcacagcagtatgaaaatggactaacacagctactgaataaatgatacttctttttgatgataatgtgctttcaaagggaacctcaacgagcaggtgtttttttgacccctttccaaatcataaatttttttgctggaagaaaccctcgaggtcatctgatgccatcctgtcactctgcaaacaagatcctgaggttcggaaaagttcaatgactcacacaggtctggctagacagagtgtgcaactaggattccagtctccaaaccctatccaattctattccaaatacatactttctgcctcctacttgcttactccagatgcatgtaactctacacaaatcttgacttggactttcctctcatcctgtcatccatgaaaattgttaaattctacttgccccacatacagaaggctctttattagatcacttaaattttccttgctccctaattcccctcctttcctatgagccctcccaccataataagaatattaacaggacttaaatttcataaaagagttcctaatcagtggagtctcctcaaaatgtccatatatttaacttcaaaatactaaattgtgttcttactttaatggagaatatacagttttagaaaactttgaaaaactagatttatattctattctctactccttaacctttaagaaggccatcaataatggccattccttctacggaaatatccttagagggaaaactattaatgcttgggtgaaataaacatccaagtaaataatcttcattgcacatgttaacttcattcaatagttattgttcttcagagtacagtaaaataagaaattaaaatttttttagtttaaccaaatatttataaaatctcacctctaattcctcagcctgttctgcattatcatcttctgagccactggttttaggtaaataagtcatttttagtctcagataacctttaactcttgatttgtgactgtagaaaagaaaataaatattcataaaactttaacaccgggagaaaagtattcaattaataagagtttaatgaacac

SEQ ID NO: 61767 - DNA, 1569 bp, Homo sapiens
cagactataaaattcacagttttccttgttagttatatctacaattatttcctgaatttaaaagtcaggattcttaggcaggtaagcaattaaagtaatttttgcatctcgttaaaaacctgaagtaccatgttagtgaaagacacaaagaactagaaagaaaaccttttaatcacaggcctaatgattataagcttcctagatttttaaaattttgtttgatttttattacattctttcttcttttgagataagatggttaattcaatgattctgacgctggttttgtaagacttcaggttgtctcaagttatctcatgggtgtaaactcttcttataaagtaaaggcaaactgctttcacttaaaaaaaaaaaaacaaaaactaggtgtggccgcgcacggtggctcatgcctgtaatcccagtactttgggaggccgaggcgggcggatcatgaggtcaggagatcaagaccgtcctggctaacatggtgaaaccccgtctctactaaaaatacaaaaaaaaaaaattagccaggcgtggtggcaggcacttttagtcacaactactcgggaggctgaggcaggagaatggcatgaacctggaaggtggagcttgcagtgagccaagatcacgccactgcactcaagcctgggcgacagagcaagactccgtctcaaaaaataaaataaaataaaataaaataactaggtgttatgtaaccacttctacaaggagacatggagaaggaaattcttgtgatatatagggttgtaaaccacaagactttggacactttacttgtccattgttaaatttctcctgttttcctcgggtatccaaagtactcaccattctccacgaagtaccctccaaactaatccaaactatccttcccccaactccatttcctcataccacgttacctcttaattggccaaactcgaaggcaccagaacactcgcaacatactggtatttatcagaatccatccttacccctaacctagtgagtcaggagtcctcttgttttgagtctcatcccccttgttcagttctctgaactttggagccttgcgtcatctgttctcactgctctcttttagacctttggctttttctttgatctaggtttctctaggcatataaatgtttttaaactcctcctccccttgactttccctcccttctccagcaaagcaaaatacatccttttcttccattcccagtcaaaccttttcagaggcagtttttaataataaaaacaagaacacttatatagcaattactcagtgccagacaccactgtaatcacgtttcgtgtattaattctttttttttttctttttttttgagacagagtcttgctctgttgcccaggctggagtgcagtggtgcagtcttggctcactgcaacctctgcctcctgggttcatgccattctcctgcctaagcctcccgagtagctgggactgcaggcgcacaccaccacgcccggctaatttttgtatttttagtacagacagggcttcaccatgttggccaggatggtcttgaactcctgacctca

SEQ ID NO: 61768 - DNA, 1911 bp, Homo sapiens
ccttcttcaaatcccagagcttaatctagttttcaaagggaacagatgtggtaacttctttataaagtatttatacttttttggcttcactttttaacatcaacgacgaccggtgaaataaagcatgaacttctcacactagacacttgttgctaaagaggaggaggaaaatttatgttcctgctctcccatccctgtctctagttaggggattaaaaaggatttcagataaagaagaaaaaaacaaaccagcgaatgacaattcacttggaactctccagaccgaagtccgtaaagttaagtcggcccggcctccgccagagcaagcaaatcaacagcggggatgctgcgaccgtctcccaacgcctgggagctccgcacacccggcgggggtggcaggaaggggctggcgcggtgatgtgggtcccccgccgaccgcctagccccctcctcaacacttcctgaaggaaactgacaagtaaggcggcggccgctccgggaaggggcgggtgtggacccgacaagcttgctccctccagcgagcccccagcgcccgcgcgccgagccgcccccacagtccccgcggcgcctcgcgcgctccccaggctcgcgccgagggaggaggggctgacagcagagcctccggtcgtggccgccgccgctacctccccgggtccggctgctgaataacccgaagggaagcccgccccgcagccccgcggtccccgcacctcgtcctccaggagcccgaacacctccaccgcgcaagttgccatttccgaacgcttccagcaaaccggacgcgctcgcccccgcccagggcaggcaactgtggaggaggaggaggagaagcgggaggaggcggggaagagttggaggaagaggaggaggcgctccctcagcgacagcagcgcctcccgcggcgagcgggcactagcggcacccggcagcgcggcgggaaaaggccggcggcgcgcgctcctggggctgggcgggggcgcgcgtggcggggctcggggagtggggagggcgtgcggcggggctcgggtgggatgagcgcgcgcggcggggaccatggcgtggggagcgcgcgtggcggggcgcgccctcggtcccttcccgggaggtgggtggttgacgggcccgccggggagccagggagcgccgggaagcgccgggaagccaagctgcagtgttcctcagcaacaagtctcgctgagatccgacccagagttcggcctctgactagacgcctgggaatccgtgagcttaatccccgcttaaatcccaaacggaaaatcatagcgctttcttgtcggttaagggtgtcattcccataagaagctggacctggggaccgccagggaaagcctgagcgtggcagcaaatggggaggcctggagggatcgcagcagtcttggactcgggatctgaaattctctccctaggatttgtaaacagtgccagttcctaagctatttgttgtcctatggtctgtccatctttaaatcccaccagtaacaatccaatctccaggctgaccctctaaacctgctttagctgggcgttgatccgcagcaccaccagaaggcagtgacgaagagggaaaaataaagtgaactaggacctcctgtagaataactcctcctgtggaataactcctcctgtggaataaggttatggaataatcatgctttttaatattcctgtctgatgggctttataattccataattacaggaagacctccaccaaataaggcatccataaaagagtctggggagaattatgaacacccaggccacaatttatatcatgttgtttttatacatttgcagaaatttgcagaattctgcaatctcaaaatctaatttttattttcctcaatgatttcagaataactctgattta

SEQ ID NO: 61769 - DNA, 2553 bp, Homo sapiens
aaaaagtgtgtgcatacttgaagagttaaactttgtagaaagtatctcgtaggtgaactggcttcagtgggctttactgaaaatcatgatttagagttttaccacatagtagagttcactaaaaaatattacagctctccaggcatggtggctcatgcctataattccagcactttgcaggctgaggcaggaggattgcttaagaacaggagttcaaggctgcagtgagctgtaatcatgccactgcactccagccctgtctcaaaaagtaattacaactcaataaaactggtgtgtgtgtgtgtgtgtgtgtgtgtgtgtgtgtgtgtatcattgattgtaagtctgatatttctctctcccttccttccttgctgtctccacccttgtaaacaaaacaaaacaaaaaaactccaaccagttttcccagggtcagtctactgaagagctgatttctacgtattgcataaactatactattcatgaattttaaaaaataacttaaactctcaggtgatatcatcattttctttgttatttctttctattgcataccaccttcagaatgataaagagactgaggctctagtcacaattatattcagctgtcaggaatgattaactatcttccttctccccatgaagtgcatgagaatgcaaccatgcaagttaggctgataatgtcccccatcagatgctatggctcctcttgcctcagaagagaaaaacagcatggttttgtactaggttatggaatgaagtctgggatgaattttctggtttgtctggggtcagtcttctagcaagacttactttaattttaaatttttttaatttaattttttttgagacagtctcagtctgttggccaggctggagtgcagtggcactatcatggctcactgcagtcctgacctcccaagctcaagtgatcctcccacctcagcctcctgaatagccaggaccacaggcatgtgccaccacgcctagctaatttttaaaaaaatctctttggtagagatagggtttcaccattttgcccagtatggtctcgaactcctgggctcaggccatccacctgcctcattatcccaaagtgctgggattacaggcatgagtcaccgtgcctggcgagcaagacttactttgcttcaagttttgtttccagaacatttaggtaccaattctcaatatagaattctaactacaaaagtcacaagttataaggcatttttgaagcagtcactgttcatgtccatctgtgtctttctttccctccactagcatggataatttggagttaactgtagagcaaatacttaggaaattaatcccacatgattttcaggttcaaggtgagaaaaaaaggagaaagtacagttcttgtaccttgacacactttattccatctgcagaagtggctgcagctcacatgtgtgactcacgttggaacagcgggctcacataatagcatcacgtgctggcaaagtgttcagatgacaagccagttacctcattcggctgatgcaatcctggaatttcctgaattgaaatacaatttaggaccagaagggagagaccctgggctgtttgattagggcatcacctttagctaattctaaccacccccaccttttttttcccatttgtctatttccttctttccttaggtgtgaggtaataatactaattggtaacagttaaactgtgctgtgcactcatctaagagttttactcttaattgtcaaacaatcctaggaggcaggcatcccatttttttcagataaggcaactgaggtgcaaaaatcccatgtcattgctttaggtcacacaggagaaaatgtaaggctcttctctttgagatgtatacctgaggatctttgcttttagtgatcagattgtgtgtaagttttccagggagtcccactcgtggaaagcccacgactgctgtgagctgtgactgaagatgttgccacctcagtgtggtcaatggctctgtcatccagttttaacctccatatcagaactttctttaaattatatgtagaattttttatttttctactattgtttcagatttttcttagtattttaagatggtttttagtgttttaccagaaaagggtcaccacttaagattcccctacccctgctttttaggatttaaggagtgggatatagttatttattatttagtgtgttaagattattttcagataatagcaaatggtcaagtcttaatcatttttataccccattattttgttctggatataataccaatatttatataaatagaccaaggtagaaggattgcttgaggccaggagttcaagatcagcttaggcaacgacatagcaagaccccatctctacaaaaaatttaaaaaaattagctgggtgtggtgatgcatgcctatagtcccagctacttgagaggctgaggtggcaggatctcttgagccaggagtttgaggctgcagtgagctatgattgtactactgcactccatcctgggcagcagatcgagaccctttctttaaagaaaaaataa

SEQ ID NO: 61770 - DNA, 3701 bp, Homo sapiens
agtaaacacatttcacattctccagttccaaattcatgccaccatcatgcaatatgacttaatttcgacccatatttctgttacaatgagtgaaaaaataaaaccaaaaaacttgtttatctgcactcacaattgaggaaggggtaaaagcattttttagctaagaagacaggggctgattgatgcaaagtccgcacacctccagagatcctacaaatgtgcacccgactggggaaagccacattcaatgaatgcatcagcctcctcctccgctccccccgcccgccgccccccacccactttgcagcagaaatgtgcctgggctttttcacgcgagcgatggaggatcctcttaccagatggagttcttgatcttgtgttgcagcgcgctggcctctgtccctggcagcccgggcacaagggctggcagggccacccccgagttgggggcgctggggggaagctgctgatgggcatcaggctgctgtggtggcggctgttgttgttcctctgccatcgctgcagaggggtgggagggagggagggaaagatgggggcgcggggaagggtgagggaagagaccgggaggggaggacgaaggggggagaggaggagggggagggggaggggaagaggaggaggaggaggaaggaagctggataagctaggcctttaccccagggctcgagtgagtcgctttcgcctgccgcctggggaacatcaccggggagaccagcggctcctcacggccggggcgcttcaccgcgggagaggcatggcggcgcccctcagccccccgctggcgccgccgcctcctcccgtcagcggccggggctgtgggggggtgagatgggggcgtttgaagacgaagtggggggggcaggctccccccaaaatccaagaagaacggttgctcagggatttggcggccaagccttccttccttgtccccggggctttctactgccgggtccccgtgctgctgcagccccaggcaccgctccacgccactccccacgccgccgccgccgccgccgctcgctcccggccccgccgccgccgcggccgccgctgccctgccagccccggaggcagcccagtgcgcgcagccgcactgcggcccggcgcagaccgcacaacacctaccgctccgccggggggcgtggaccagggtgtgcgggccgcgggcgcgacgggccgggatgggggcgcacggcgcggagggcggcgcgggccagcgggccagggaagcgcgccgctgggggccgggaggagtccggcccggctggtggagagcaggaaaacgtgggggaggtgctggcgagagaaagagaacttgcgtgaggaggaggaggagaaaccaaatttaataatatttggcgtggaaatgggatttgggcgggggaggcatcttcaaagcaagtaaagagaaatcaacattatcccccttcccctgcacatgcatgtgaggattacttcctccctgagtaaatgaagagaactgaagcaggtaagacgataaactgacttttcagaagcccccaaagaagaacacccgttggaattaaccaccctttaggtaattcggtcttgaacggaaatcgcgagtcaggagctgggttgagtgctcctcggtcgggcattcaaagccctccaaatctggccccactttaactatccaatcatagcggcctccatccccctgcaagaactcccggctccaatcagggaagtctccatgccatcctcaacgcgcagcagattcattcttccttcgtgcctttgctcatgctgttcccctccacctccccaccccaccccaccccctttccaggaatgccctccctcctttataccgctcccaattccacccaggctctaaagcatagctcaagtcgcggcttgtcagggtccctgcagccaaggccactgcctgcctctgaaagaaacgcatgtagtactcacaacatggaggctcaggcgtcagccacgagctccttcctttggagcccgttgaacacccgccctccccccgcagactccgcaccattcccccccttcccattcatacctaaatgatagctttgccacaaataagtcagtctcctttaagagcagaagaattggcttttctaggtggggctgatcagggaggctgcgtggatgtagaatacaacagccaaggcctctggcaccaaatggaacagctgttcagctcacactgacctttctttgggcccgtgggtgttatgagcccttcagctttaacttttctgatagagtgtctatcaggtttctacctgttagatcctctggccactttcctgctgtgtgtggactttgggctgtggggctctgccaccttttagactcctagtggatggtgaatctgattggcttgggttgcctggcctttgagttctcagttccctgccttggcctgaaaccctcttgcttttgtccactgtgccctctctcctggcccacagacttaaggcccagactcacactgaatgcttgcacgtggtgagggttgagggtgggggtgcagggaggaagaacacctgtgtgcaaaataagccgcccccccgcccccggggcctcttggattacgctgtgctccaactacccattgcacgagttgcatcacacaaatgagcccccttttccatactctaaggtctctattagcttagccactttaggaaactataggtggtttacgacattcattttgcatacatatcttcatgtgggtgtgtaaagacagtatttttgtggacctaattgatagacatggtgtgcactagacagaagctttgaaggataaaaatagctaatgtttgttgaacactttgtgtgccagactagcactttccatacattatcatagttattcctccccaagagtgtataatgtaggtattattagtctccctctgttacagatgaaatggaagcttaggttaattaacattcttaaaattacccaattagtaaatgcaggagccaaaatttgagtcctggaagtttaattccagagcctgcaagctatgctgaaactggaattacgctgaaaaatcttgaatgtaggtatatatatacgtgtgtgtgtgtatgccctatatcacgttgaggaaagttgccaagttccccaaggttctaattttttgccttgccaagagagaatgatggctccaagttgcaacaccctgggagggggagatccttaggaagtgggagagtcatcgagggggtaacgtatctaaggtctgccaaaggccttaagaaaaggaagccgagaaccaagacgttttataaaaagttcgctaccgggtgtcacacaggctggcttcccaagtgcaacttctgagagtttttaatgggttccataaaagagccaggtcaccccagcagccactagagggctcacgaagctgcagccgcgggctgccctctagcggcggtgctgaccggagtgtggtggtaaaccttttccggccttccaggacctacagggagttgaaggagaccagcaatgggaggggtggcagagagtatcagactgaggagaccttattgccagagtgagataccctttcagggaggaaaggggcagccctcactactcacttaacatctgggagtacagtgggtgttttgttccagtcttcagagaagactgtgaataaaatcatgac

SEQ ID NO: 61771 - DNA, 903 bp, Homo sapiens
taataatttaggttgactaacttgagagcctgagtcttagccatgcatgctgtaaacaaaaattagaaatcaaaacttctgaattccactgaagagctcactttaagcaaacggggtgaaggtcggattagccactaacggtttgaaaagcacaacagggagggattgcctcaccagcttgctttctatagagtagcggcaaaggacctgcctgttttggctgaaactctttcaacccccacaagttgagaatttgcactaactaagtcgaatttgcagttaggaagccttcctgggttcctgggacagcgccgagtgctgcgagcaaaggccgagcccgctgccagaggctcgcgccgctcgcagcacagaacctgagagtgggaaggcgtaggcgcccgggcgggaggcaaccgggatgtggaaactctcgcgggaagatgcgtcgttgcctcggtaaccgcgtcgcagtcgccgaagatggcggggcgaagtctgtgtctcacggtcagttcaactccaggctcctggggagcgtctgggttccggcgactaggacgcctaacttcctttaacttcgggtctgaaagtctgtggctcttttacagagaagcagcgttccagggactccgttcccgccacccgttcagcaaccctctacacctggacccgacctcctcgccttggaggaagaatataagtaagaaattcggcggttgaacttttccttctttctttcatctgaatgaggctgcttacaagtacttttttctggagactggctggatcttcgggaccactcactctgcagcattcccttctcgtcatctcgttcacctgccgtttatcctttctttgtctttgatctgagtagttcgcctgcgtattagaagatatttgaag

SEQ ID NO: 61772 - DNA, 1332 bp, Homo sapiens
attaagaaagcagacaaacagacaaaagacaaacagccatataatttggaatctattattctgaaggcaagtacagcagagaaaaacaaaaattattgtaagcaaagaaaagaccatagcaacaaatgttatttttagacagcgcaaactggagaaaaaaaaatatgttaagatatgtcaacctgacacaaagataaggtggaataagaatctagtcccatttgaaagctgaaaagagctgaataatgagagctagtgtcatgaacttggctgctcaactgcctttgtgtaagaaaacatctcagaactttgaacttaggaaattccaacttgtcttgcaccaggtcacgagctccatagagcaggaacctatttcaacaagcagctttaaaaaaaaaacaaaaaaacaacaacatactttaatacttttcattcgtattaatgatacatttaaaaatgcaatagtgctaaaatccatcaaagtaaaatgcactgaataaaaattaaacttactcagaaaggtgctcagaagttgggatacaaacagaaactgaaattagaagaaaagttttacatttacaacagcatatgaaatatgatgagtgagaataatgatttagtaaagagaccatattgtggatgaccaaaaatactggaataaaagtcaaaaatctaaagtagcacagttacatatacgtacctttctgcattacaacttggcaagtatgagttttatgttgacttaagtgtgtagccatattatctaagccagaaacatcacttaggaaatcacaattaaggcacactagagtaatgcccctaaaaaaaaaagcattaaaaaaagatttttatcttttatgaaaatccacttataagtttgatgattatttttccataatttgctttttgtgccatacataactataacttcccatttttgttatataaatttgacataaactgacattattctctggtaaatgacatagccatgtccaaattatgctaccatttatttacagaaagtatttattttacacttttacctgtcataccaattgttaaaagttaggagtcagaagacctagagtcagtcttggctccacaaccaacttgtgtaacttaggcaagtcacattctatttgtcctcccacgcatctgcaaagtgaacatagcgtattcattcacttgatatttactggagctatttttatatatactgtactactaggtattgtgaatataatggtgaacaagaaatagtactgtctatgctcgaatggagcttacttagaatctggtgttttattcagttggagataaaatcagaag

SEQ ID NO: 61773 - DNA, 2072 bp, Homo sapiens
cctcgcctgcaaaatgattccagcaacccagaccacttcaaaaggggctaagagatacaaatcaggggttatcaatgaaaggcacaaaagcaagacacaattacaacagtatttgtagtgatgttaaaacatcagaggcacacagccctaacaatggtataagcaaaccagtgccttccctggttaagtttctgcgtggagacagctggagttggcacagcagtcccccaaagcaggacaccttacagatgctaagaggcagcttttgtgctttaaaactgtccttctagcgttccattttatgtttcatggcactaaaaaagacaaattctgtccaaacctgaaaataaagccaaatatttaagatgacagatttttttttttttaacaaatcttcgcaaacaaaggcctttggccaaaggtctcccgtgcttgcagaagcgggttcaccttgacgtttttcctctccagcagatttctccttaaaagcgttaaaacttgcgataagttgggaggaattccttccatcgctggagcaggctaaaacctcagagtgagatcattctttccgtctcagtaagtgaaccttgcaaagctcagaaaattttgtctccaactccacgtttctcctcagggcccttcttctgtagacaataacgggaattctatggcagaggaggggaggtctctttgacaaaaatgagggtgcaaacgtggaacgaccggtcatctgggcaaaatgaggggccctgtgcctgcaaatcccgaatcccctttggtctcctttcctacgactgaagagacacgggggtgggctgtggtgtgaggaccatgggtcttggccaaacatcggcacaaaatgtaccaaagggagttgcctccagagagaaaagccaaaaccaggctggggacaaacaggcgcacacgcctgggagaggaggtggcggaggagcagaaggcgaaggcctgcgcggcccaggcctgcagcagccgaggcggctgccgcgtcgcgccgggatacctcctcccccgcctgggccgacgcaagatggcggtccggccgccgccgcgcagccggtctcctcccccgcgctctgggcgctcccgacgacccgcgccggcctcaagacccccagtccagcgcccccggagtgaggcggcgcaggccgcgcgggagggcctctgcctgctgcagcgcagggcgggcgggggcgggggggcgcttaccgtgagcggagcggatcggcctgactggagccctgaggaggaggagaaagaggaggaggaaaaggaggagcacgaaaaactacactgcggcgacggcggcggctcccattgcggagctggcagccgagccgtggaaaggggggggctctcgtgcagccggcgcgctgcctcatgggtaggctccgggtcagcctccccgtgtccgagctccctgtcttctcgccgacgcgggaggcgggcaccggcatgtgcgccgcgtcgcgggccctcgaagacccacgcgccccgccacgcgccggtccggggcgagggccagggccctgcctccatgtgggtgcgagctgctggctggtgtggccgggaggcagccccaaaatccggactgctcggaatttgcaggcgaggagccgtgcgttccgggccctccgcgtgtgtaacgacccccagtccgttggcttggaaagtgaaaaggtcatgggatacagccgccgttcgaaagaagcaaggggcctgtgggtcgaagactaaaccaggagagaaaaaggaatcgtccgtttctttaaataacgagctgattttaccaagtctgttttaaatgtgtggttttgcttgcgttccctgtcgaggtcaaatacgaagagacgaatctgtacatttagcgttttatttgggacacaggaattgcaagttcaggttatttacacatacagggtggtcttcagtatgtcagaagaacaaagaggagttagggggttttattttttaaaaaaagttatctattgtttttctagaaagttcgttgacatttagtaaagttttgggtagctggttagttctgactggtg

SEQ ID NO: 61774 - DNA, 1473 bp, Homo sapiens
aagaaaaatgttttgaataataatttgaaaaataaagagcaggaggaaataaacattataaagaggagcagacaaattacacctggtgggggaacagaaggtctaggtttgttgttgtgaagtcttacagatgtgagctattacagcatggttgtatgttgaccagaattacccaatagagaaagacaaactaatggtgtgggagacagagagggcagttccaggaacaaaatgcttgagtaaacaaaaagggaagggatccagcacacacagacagagatcaggcagctgccagtatcttctgctctatacctcctccatagttcatttcgcacttcaaagccagaaagaggctttccagggcaattccctaacacacattatttcatttgatcctcacaactatcccaagaattggcaagcattagcattctacgcataacaaatgagaaaactaatgttcacagcgcttaagtaaatttccagtttctatgattaggaaagagtagagctgagagttaaaacaatttccttttattccaatggcagtattgcttttattactacaccttgttgcttccaagaaaaggcaagaggttgagtaaacggtataaagactgagtagactgggaatgattgcactagacttgggtgtcagtgtgggggagaattggagctcatatttaggagtcctgggctattcaataaacactgccacaggcaaaaatagaaagtcaggaattccatctgactgatgtatcattctgaagatgttagctggccaatacaaagtccaagcgtatggcgacaaggcagatgatgggatacttcagaccagaacaagaaggttcaaagctgaaagtagaattcctgagtccctagagcagtgctgtaggcatttgtatagggtgcctggcattggctgtagtttagaaaggaatcattaagggtactgagcttacagggatacaggtatactaaaattccataatagctttaaggttcctgtaatgggagaccataagaatgcactcaaaaaagaataatgagagcacattggggtggaggatggggtgggaaggttgtgatagacacaggtgactaatttctcttgatatataatgatgcttgggatgggaaaagattcccctctctatctaaggaaacatatttgattggtctaatgaggtagaacgagtgtcatttctataagttctttagtcggggaagagtggacaaaaggaggcttaattattaataggtcctaaggatcaggaaggaacagatcatttattttttcctgaattccttgatcacagtactgaataatacacccttcctgacttgtttaagctttcaactgcttaatttttgtgttcttattccaaatgttttctttttacaaaaagatactttctgttgttttcattatgggaatacacatagcaatagttctcacttcacgttacgcag

SEQ ID NO: 61775 - DNA, 835 bp, Homo sapiens
gtctcctgactcagcccccagagtagctggtattacaggagcccaccaccaagcccggctaattttcatagttttagtggagacgagttttcaccatgttggccacaccggtcttgaactcctggcctcaagtgatccaccagccttggtatcccaaagcgctgggattataggcatgagccactacacctggcccttctattcatttactttgttaataagcttgctttcactttactctgtcggctggctcttaaattccttcatgagctgagccaacgacccatgtggcttcccgggctgagccctacttttgggctttgccctgtgccagaatgggaaagtctagaggtggagataatgcaacactacactgcattttaaagtttacattctagctttttaaaacgagtggtagcttgatacagcgggaaatggaaagtcactcgaagtctgaaggcattctctggctgctgtttactagctctgtgacctttggcatattaatcaatatctgtatcctcagtttctttttctgctatgcgggattaatgttgtagagttgctttggtaagtgagataagcctcggaacacaatgcctcacacatagtaagtgctcaatgaatatttgtttccctcctttttttgcctaattcagaaccttaaaagcgtttatttctgactgttaatatagcttgagttagtgaacacccacgtatctcatttcagtattttagatggttctaaagtctgtgccacagaaggcaaaattgcatcacatttgcatttgggagaataaatttacaatcaagaaattaacaggtactttgggtt

SEQ ID NO: 61776 - DNA, 1311 bp, Homo sapiens
tccctaataaatcttgccattttccctggtaaggaactgtgtgctgactaaatggttgctgacacatgggagttattcccataatttcctcacacagtaagacaaatcaatgcaatgcagagctctgttacagacactaacagatttggagcatgtcagaaagtgggggggtatataatgaatccatgtttctagactttcctaccagagacagcttgaggcaatctgacagcaaaggcaggatctgaagtcctaaactcagacattttatctccgtgagctaatttacaaccaagagagccacaatactgtcagatctagaactcaactactttaaacagcgaccttttgtcttatattttgcattgatttttttgaagtgttatgttgtttgaaagctaattaccttcctagaggattaatttcaaaccttttcaaacctagaaccgctttagggaacaaaacaactgactctcactgctttcttgttatcccaagctggactccaagggccccaggccccacttggtgtaaggtatagaattctgctttataccagtttacaggtatcaaggaggcaggagagagactcagggtagtgaggggaaagaagatcagagtcatctctttttcatgtctttcatttcacaacttcttccttcccatgcctgctggtgcgctccctcgccttgttccagagccaaaagacaggtcaacttcactgctttttatccaagttggcagaggttgtggcagcggggtggtaactctgcccgatgttcccaagctgcagctgggacatgtccaacagcaaagtcactcagtaaacagttctctgtttctcttttcctcgagttggctggaatatctctaagccctagtaccacccactctttaattcaagacaagcccacagaccagaaacttcacagatcactctgtcttaaaacagtcttttgctgggtacaaaataccatgtataaaattattgatatgctacaattatttccattccaatccctatagattatcctttttgacggtttagtttttctatttttattaatatcccttgtacatcattcagttcaatattcaaaaacctccttagatgtttattttgtgcctagctttgtggtgatgtgggggagataagcaaatactgcacttaacagttacttattttaagatgtttacaaactaattggagagagaaaagccaatatgaagcaagtgataactaaagaaaaactgtctttaaaccctaaaagtgggaggaaatagcaaagacatgcagaggtcaggaaaact

SEQ ID NO: 61777 - DNA, 574 bp, Homo sapiens
aattaaagtataaaatgtctaggattacatttacatttaacacaaatgctaaagggataaagaataattcttaactgattagctagcactttctgcagatgtctagcttctagaatgagtaaacagaaatgttaggagatgagaaaacatcacagaggcactgattaaaaaaaagaaaaaaagagcagtaaataaacatagggagaagcagtcacaagaacttccacaactaaaggaaatgggaattggggtaggccatggttgctaatacacagcacaggagaccaagaatatttctatagtgagtcatcggcttttgtatacctaattgattccttgtttcataacttccagatatctgaatttctacacattcaacttactatatagaatcatattcatgttgaaatggcatcaactttgcatgaaattttagtttgaaaaagcaaatgaataaaattatgatgtcaaatgcagtaagaaattgcaacaatggtctttgtgtttttgctctcactgcccactccaatgctgctgtgttcaaataaattatttcagcaaataaaatatttag

SEQ ID NO: 61778 - DNA, 2105 bp, Homo sapiens
ttcagagagtgcctttcaatggcaccaccttccctccacccaaaataaaaccttcaacattttcaccttaagtgaaatgtttataacacactttgaaatagtgagtgtggtgaagatagttctattcaatctgctacgaagaaacaagacacaaagatctgacttggccaccatccccgaaggcatccgtggcagaactgggatggtccctcattccccagtggtctcaagcgtttgttctgatgtccctgtatgtaattgttttgatagcaattttcctggttctctctcactagcttgctaactacgcatgtcaatcacattcaggaacaccatgggcctaagggtcagccacatctcaggagaatgtgattcaaaagaggacacaaggcataatatagcactttctccttctagcatgtatgtcagttgcgttgcggcctcgaaagtctgacaatgtgtaaagagagtgttgcattttttttccttcccccagatgcagaaaggaaaggatttatgaagtactctgaccacaattttaaagcaagtgagaaacccaacagtgtaagatcctcttactagagaacactcaatggtactgaaagagttctccacctaaactctaaagaacccgaagagaggtccagttttttcctcccaaagatccatctccagagcttcactccctagtccgttagggaagccgggacggtgggagagccacagatactctttctcctacggaacccttggacctcttgccccgtttccctgtcactttagggagcagcacgcaggagactagaggccagggtccaagcccgcagccgtagcaggccggacgaagaaagcgggccggaagggcagcgtcgcggtgctggaggctgttgctgggaggcgtggattctggaaagtgcgtgtgcgcgtccctggagcaccgcccgcggagccgattggcccggacgcgcggcgggggaagcccttggctaatctcctgccactcagcccggctgacgtcggcgcccgggatgcagcgccgcgaacctctcgccccgccgggccgggccgcgcgcggaaggacaaatagttccggcggcagtgccgcgcacctctacgcggctctgctcgccccgcccgggctgccgagcccgaggcaggggtggcgggaagtgggggcgggcggagcagggccggcctgtgcggctctcggaccccggctccgctctttgcggccagacgggtggattgcgctccctagggaagagtaattggcttccaggctccctccagccgggatcagcggaagtcggctgctaagcctgcagcctgggaggggcgtgtggggaggaaggaaaggtggggagcgccgccgggagggacacggtgaaaccactgtcctcttaagtgcctgcgtgcttgtttctgtacaggccgcatcgggaagctgggtatagagaaggattaacagagattgcaccctggtgacctttcccctcaggcacgtgactcttgccccttccaagttgtcatcctcattgtgaaattcacctggtagctgatactcaggagaggaatactttggaagcctgagtcttctagccatcacccttctgtttttctctcaaagctccacttggagctcagctggagaaggaaccctgtgaagtctggaattggacatgtctcttattaacgaagtaattgtggagaaaacagcattcttaccactatcatccaggaaagtatcccaagtcccttccttggcagtagcaaacttcccttaattcccttccccttgaggagatgcagccagaatgagagccttaagcagagtttttgggtgaaatgataggcatgttctaggaattgtgacttaaacttggacctcttgtgattttttttcttttcatcttaattactgcatttcactcattcatcatgaaataaactcttactgaaggctttgtttgttccaggctctgttctacttatcagacatacgtcagtgagtaaaacgaatgcactcatggaacctcattacagttgctctagtgggggagatagtacatttacaatcatatacaattgtataatgtcatgtaggg

SEQ ID NO: 61779 - DNA, 3044 bp, Homo sapiens
aactgtactaactacagtaatggcatatggtagctgaatctacctctctttccatcccagtccggaatccaaaggctccttcttgccatgttgtcctcgggcgttggctgcttcctcccatttgttactttggaagtgtcttctttcctcagtgtttcttctgcgtgggccttaccggtctttactgcactcacttacctaagaggcaaaacaatggctgccattcaagaaaatctcacttcagcccagaatcgaagaactggggcttattttgtcttctttctactctggggcttctctgaggccaagttcagaacttgtgcacaagacagtggctgtgtgacagagccacccagggctgtctccgttagatgaagagactggcttgatccattcccaagaactagtcccacgtgcagttcggttgctccgaatgggatttgggtgcgaggggctgactggagatgtggggtctgggtgagtggggtatttgagaacctgaagctcacaaggctttgtctggtttgaggtacgttttgccctttctcccgcattcggctctgcatcgaatctgaccggccgcgcctactctcggaacggccgaggaggatgggtctcccgtctccacacgcgcggtgtctgcgccgactgcagccctcctggacgggagcctctgggcccagcttagggtggcgtccagcgtgacctactcgggaatggcagccttcagtgtcctgcggcctcgggttccgggaagctcggggacctgggcagcggatccagatgcttccacagctgtgtctccgtcgctccgcttcgggggccgagaaccagcaagaccaacgcgaggaggcgccacggtacctgccaccccgctcccaggaggcccggacgaggcttcgtcggcgagcggtcggggcctgcttctcgaggtgcctgcgagcgcctcatgcccctccccaccggccccaactccgtcccgcctcacccgaccgcgggctttgtccacccgccgcggtgcggctcctcccagtccccgacagctcctccccgccccctctgccggccccacttcctaggcggcggagcgggtcggggagggaagggttaacccgcggctcttcccggcgcggagggatccggaggcgagccgagcgcggtggtgaggccgcctcagcgaaaaaaatgtccgcctgaagagacccacaagttctattcggggggaccgacagcccgccccgggaggaaggggcggccaggcccgaaagccgcctccccctcccagacccgagagctcgtgcggggcaaagtgaaccgagccgctgggcggtgcaaggggaagcccaagcccgttctcccggccaaagtgaactttaatcggggtggttggatgcggagacggggcggcaggtaattgcgggctagcgagcgggagtggggcggcgcggcggggctgggggctgcggggcgccgccgcgtccctgccggagtgggggcgcccccgtcccccgcctcaactccgcgcccctttgtacagcgcgaaacccggggtcccctccaagttggggagcggagtgggggcggaggctcgagtcgcgggcgctcaggcccgctggcggcgcgctcggcctgtgcgccccgttcggtgcccgactcgggccggcgcccaggctccggggcgcgcgggagatcgggcggcttcggccgcggagccaggctcattgttcggcaggtccggggcagggcagcaaaagtgggaggaggccgagcctggggaggaggacgccggccgagagcgagactagttgtcggggtttctgttttctgtttaaaaacgccccttggatgagctgggggtgctttccgacctcctgggcccgccggggacgtccgggcggcggcggccgcagacgcgggcctgcgagcggcgcgttccctgcaacttgtcagttctattgttgccgagcgagtgagtcacttcgcatctccgctcgccgccgctccgctcgctggacgccgaattgcccctcaccccgctcctcgagaccccagccgcggccgggcccggcgcgcggagcacccggcggcggcgcggagcagggggcgccgaggaggtggcagagactggctcggaaacttgggggagaggcggcgagttgcgggagccgccgcgtcgatctcgggccgcggcgaggaacgcgtggattccgggacccggcgcgggcactgagccctcccgccccttgctcgcgccgcggtgggagcgagtcggggtcctggaagtcatcccggcgcccccagcgctcttgcgtaatcttccccagtacctctctctgttccctcacacactttgggcctcggtggtctctcgctgagcccgtttcctctgccctaggacctgctagaagtggccgaagatgaatccccagcaacaacgcatggccgctatagggaccgacaaggagctgagcgacctactggacttcagtgcggtatgagagctttccatggcatcttggggttctgctgaggtttttgtttgtttgtttgtttgtttcttttaaataaagggtgaggggaagcaacgtggagactaggcagcgtgaactccatctgctttctgcttaagcagtagttctcagggctggagtccagctcccccaagttggacacctgaactttgatgtaatgtctagacttgcacatttaaaactttaatgccagaggggtcatttgatttaaccagttaaaaggagaacaatgtaattatgacctttggttgagtcaccctcccaccgcgatgattattggggatcttgtactttatatgaaaaagtgttgtttttttcttcagtactcctcaccattttcctctccagtatcagatgtagtttatggtacctgaaagatgtcagcgacaagaaaagtagtccagagctagaatttcgagccttctgaaacagagtacttttattttatacacacacacacgtgtgtgtgtgtgtgtgtgtgtattatgttcttaacatgggaaatgacttaaa

SEQ ID NO: 61780 - DNA, 524 bp, Homo sapiens
ggaagtttttggtactacaaaaactttttgagatttttctttccacaatctgaatgaagaggaaggtgaaactagctgctgaatcaaatatttttagaatttttttcatcctgtttggaaaagaatcattagttatttgcatgtatattatatctggaaatggtaataaatattcattgaagaaatagttaaaatacagaattaagttcaaaatcaccatttgctctttgcttttgtttactgagcaggtctagggaaatgtctagggcttagaggagtgccagggttttttgggtctgataaaactttagggatattccccatttgcaggatagttattctcttattgcaagtcgagtgaaaaaaactcttgcagttatccatgatgggaaatggtttgatggttaataattaacatacaattagtcactggctctgatagcataagttatatttatgtgaattttcttgaagaagtaatattttatattagtgatttttgattgaaatctttagaaaatgta

SEQ ID NO: 61781 - DNA, 1880 bp, Homo sapiens
ttgcttgggctcaggagttcaagactagcctggccaacatggcgaaaccctgtctctacaaaaaataaaaaattagccgggtatggtggtacatacttgtaattctggctactcaggaggctgaggtgggaggatcacctgagccctggaggcagaggttgcagtgagccaagattgtgccactgcactccagcctgggcgatagagccagaccttgtcttaagtgaaaaaccaaaaccaaaattcagatgctttaaatttaacatagtgctaagtctcccacccgtttccagatggctcagcccatgttttggttttcattccccataaccaatgatggccccagcactctaaccttccatgcaaaatagctgtcaatatcttcagatgtcttgcccacccccatttttgtagccattgctcagttattccataaagtggctgaatgccaccttgctgttgtgtggacaaacaggagaggtttggctggctgaggtttggctgagtttagaagtagggcaaaatctcaggcccttcatggttgacactgagattatgggtgctgtctctggagtgtccatttgtgggctacatagccccatgtcatgtttcttagacagtttctccaaaaaaacaaggacttagagactcagttatttgaactaaaataagaatgctaagccacactattctgatggaagaccttgtttgaagtactgtgggcttgtgccctgactgatttatatcttacttgtggagttccaaccattgtaaacaacacttctttccagggcgatctcatgacttcttggtcccttagttcttatatagaagccagacattaatttgcccccttaccagaaacataatgacttgtattgtaagagtgattttaagagacctttaggtatttaaggaaacatcatatagttctcatatgattgctgagatttctccaaaatcaggctaacctagattacttgggggaatttcctggaggggctgactcattcattatttacgtgtaccctgcaggtagtttatctctaggatggagtcatccggttaggataggtattatgaaatcagtccctgacttcagctgaaatgattagtgttaggattttatctctaaaaggtattcaggtcagcatcaagtcactagccagaattgttatgtatgatagaattgcctgggacttcttcatgggccagacagattacaaggtagattctgtgtaattgccaatgcatcttcctatacctggattaatgctttagtttaagtggaaaggtcaacacagaaacatgaggaggaagccagttgaatttctaaggtagactttgatggtttatgggatttgtttagctgattttgtccaagaccctagaggacctagtggaagtcagtactgtagattgacctcaccttgctgctcagagttcctgtttgtagtagccttaattacataattcataaggcaaattaaatacatttggtcctccctttgttggtcagattaatcagcttggttgatagaatggcatacttatagaaaaattgactgggagcctaagacaatgtagaagcaaagggtacatattgttagaaggtgattttccttgggcctcttgcatttccatgttttacaagcagaagcactgactgcctttgttttggactgtcctttcaaggatgcttgtatactaaacagccatggaaagtagacatagtttctccctctggaacaaagggcaggtatgtttactgtgtatatggagagagaatttatctctccagagcaaaagtcagccatacttactgtgcattatagatctgggcttcctaaactcaggcttcctttcctgtaaacgcactg

SEQ ID NO: 61782 - DNA, 977 bp, Homo sapiens
tacttgtataatttccatagtggttttatagactataaacatggaacgcttgcagatattttataaaaattgtttttattttgtgaagagtttatatttcaatagtctgtccatagaaatataaggggggggaaggcatattaaattaagttttgttgttgataatttcattgagtcatttttgtctgttatctttgttctatcagttcttgcattgcagaaagcttatcttgtattcagtacaatgatcaatttaattggctctgcagtgtctaggatgaggttgcttggccaggatatatttggcagtgtgaggaaggcaagcttctatgttgattataacactgccttgtcaccattgtgttctttctaagcacagacacagcttggtcccctggcagtgatatacagcaaacgtcaataacaacctttgtaaatgttaaataaaagagcaaattgaagggcagtgattcattaggaaagaattttgtctgagcaaattaactcttatttctgttaacccatgttaaagaatcactgactgtctcttgagactttggatgcagttgaactagaaactatacagatgaaggtcctcttttccctttagtgggtgctttggatcagcagtatgtgctcttcatttgaaatatctttttttttctttttttgatatactttgacatcttaccaatttgattaagcttcagacagtgctgttacccttaacttgcctcccagttaacagaaaccttctgaacttgcctgtggaaaaatttttaccatttttcagttagtggttgcgttttcagttttagatttttcagttagtggttgcattgtgcatatatgtgttacttcttcagacctacttgtctaaagtagccagtatattttcagatttttatgtctaatgtgattttcttttccagtttttcttgtcttgtttaaccagtgtaaaggcaatctaagtgtct

SEQ ID NO: 61783 - DNA, 1005 bp, Homo sapiens
gctgcaatctcagtgctttccaagagccctgcattgttagaaacttcccagcacgcagcaaaggctgctgcaatactcgctctgcctgcctttgccctgcgcttcctacttaccctccttttgtttctcccaaacatctgtccctgactatgctcatctcatgtttgtcctcagctgctgaaagggccacgtttgttttcattacaaataagaccaccgagtgggctcctggcgtgggggcgggaccagccgcgcgcagtcttcagaggcagccccccaggctgtctctggagggtgtgtctctgcttccctttccccgtgtttattttcagacgaagccaagtggcccggggggaccctccggactcccagccttcagagaggagggcagctcgggctttcgccgcagtgcttcctgcccgtcacgtgtgtgctcctagccggggtcgggggagctggtatcttggcccttctgggaggacgcgcacagcccgaggaggcagagccccagacgggaatgggcttttcagaggtggggtgcgggcgaggggacgatgcattatttttaatatttgatttatttttccaactggacttcttcccggggctctttctgggcccagctgcctttgtgatcccgcgccccggtcctcggcctctcacctccagcgccggggcgccccctgctgtcggaagcggctgtgaccgggcagaggtgctatctgggactctgggttctcagcccggggacagcgaaccgaggggcagatgatccatcagaaaagagccggcactgcccagccccgcgcccctgcccctgcctttttccgggagcgcgccgcgccgcacccgctacggccgcttgaccccatctttgagcccggccccaagctctgggaccgtcgtgcccctcatcaaggaagagccaaggaccccaaggagaaggtcaggagcggcggtgtggatgtcccttggctgcaggccccgccgcgcactcccttcagt

SEQ ID NO: 61784 - DNA, 1824 bp, Homo sapiens
gggaaaaaggctaagcagggaaaggaagggaaaggggtaaactgagctcggcgcagtcgagagcgcgaaatagggagggcttcctgcaggccaggaatttggagaggccgaggctgggagaagaaaaatgcccggtgacggcggaggggaggtggaaggacgaacggctccgggaaggggtgaggtctaagcgcagccccgggcccagcggagccgagggcgggtggtgcgggggttcctgggtaggttcgtcccgacgggccgcgggcggattgaagggagggttgggcccgccggcagccccggcgggtccaggcccccggccagcccctgcccctcctcccaggagggcgggcggcgactgcggggcggggcgcgggctcgctcggcctcccggcggcgccgcggcccttgcactccggccgggctctgctggctgcggcgggagctggacgcgggaggaggcggcggcggcggtgagtgagctccgggctggagcggggcggggtgtgcgccggcagccgggtttcggggtgctaggggccgcccagggcggcgggacccccaggggttcgggctcagccaggtgcactgtgctcagtccgcgcgtccactctcggtgacccgcgccgcgcgtgtcctggggctcgaagatgcgacccggactcccgcgccgcgccccgccgagggcaggcgcagaacagatgcgggcgatccctggggaacccgcttcggggcggggtgggagggaggaggccctgcagaacctccctttagtgaagagggactttctgccttcgcacccctgcctggaccctccggctctagtgacagctgggagagactcacacgaagcagtttctgacctatcctgtcgtacacaagtcctcggcgtgctcggccggaccatcccctggaaagaaaggggcgtgtgacctttctctccccgatcctccagaccactgcgccgcccagggaggtcatccccgagagagcccccgcctcactcggagcacacattctagctctccccgggacttttccaagttgcatcactgtttggcctctagacaggtacttggctgtcatgttggagttagttacacaggatttttgaaactttgtatatttgctttgtgtgttcttcaccctaaggccgctgccctcccgactctgcttatgccgctcaaaacgttgctcaaagctcgctgggaatgcttttgcgggcattggttctcaaacttggccccacatctggagagttttaaaaaatactggtgcctgtgtcccactcccagagatctggattcggcttgcctgggttgcagcctggacaatggaatttttaagacgccgcaggtgattctaatgtgcaggcaagtttgaaaacctctgctttgagagttgctcccaccagccactcttcggacggctcaagatcagtcctgatctagaactcatctcaggtcctcatagctcttccctaatccacctctccacctgaagaacctgttgattggtgctttccaactttagacagtagatggtgcctttactgaagatccctttgtttctacctctctgtttacagtcaatactgccagggcactttctgccaaggaggtgggagtgtaggcattagaaccgagcagtccttgtcagggtcaaggttataatacagggttgtcctattcagggaaaaccaagtgataatttgacttgtcatattcgggaatgatttcagattaaaaggagaaaaaatactttagggtttggtcagcttttggagaccctccggagactcccccacgtagataatggagt

SEQ ID NO: 61785 - DNA, 1633 bp, Homo sapiens
caaactcctgacctcaggtgatctgcccacctcggcctctcaaagtgctgggattacaggcatgagccaccgtgccccgcctgtatttttattaacagtgggatgacatccttccaagaatgccttgctgaagtgaaagaacatttacattcatttctagctgctaatgtaagtccaaagaacattcattttgaaaaatacaaaaatgacataattttgcccacttggttttctcgcttttccccaacttccacgaccatgctctgctgctactactgtattcacttgctggaggtgtgcaccctgtgggagccgtcttcattgtcttggctttggcttgaaatggaggttacatgcagcgcattgtcttacagggtgtcccctgacccgaatcatcaccctttggggagcaagactatatggaaagtgttttcctactgttttttttgtgtgtgtgtgtgtgagtgagtgagaccatgccaacaaaatgaagccatattattaaatggtttgttaacttccaaatcttgtctcaattgggaaaagaaaaatgcttattcgaggatgctgttgaattcatggtgtctgaaaagtcacccctgaacagcaatagttacactgtgaatataataatacactctacccccccaaaaagaaaagtttatgtaaatgtgggcctaagcacatttattgcaatttctcactttggagtagcagctctaatatcctaaagtgattagaagaaagtaagtgaagaaaaatatgaagaaagggttagtgagatactttttcatttagggaaaggggatacagcaactagaaaaggccttgggtttgtgttaagaatttattgccctggtggcttcctttttttctttgtttaatttgcttgtgctgatgggtgagggagagttaaagaaatttaatggcctcctaactctctttccccgtgaaacccatttatctaagagatgccattggccttttaaaaatatccaactgattttatgcttttcctttcttttcatcttctgatctcggcactaaagggcggtggcatggctgagaggttggcatcagagcaggaaaacaaagttcaaggggaaaccaaaaattgggtaattttctctgaatgaccaagtgcttacttttttcaggcatgtgacattgctgttatcaagaaaccagttatgacatgaaaatcctgaaaatggaaaaggaaaaaagaaaaaaaaagggaatggggtgggggatggaaatagcaccagggttgactgacctttaccgaggagggaaggcttagtgttttcagcctggtgtcccccgtgtcccgattgcagccccctgtacttctctcctcatgcaccctcctgcatccctcaagccaatatccttgggggagatagtgcttcatcttaaattcacactaaggtgtctttttgtttttgttatttgagactctgctctgtcacccaggctggagtgcagtgatgtgatctcagctcactgcaacctccgcctcccgggttaaagcaatcctccctgcctcagcctcctgagtagctggaattacaggcatgcgccaccataccccgcttatttttgtatttttagtagagatggggtttcacca

SEQ ID NO: 61786 - DNA, 719 bp, Homo sapiens
agggtgcaggtatccatcatgcaaaggggaggtgggaggtggaggaagagaacagattctggcaggtgtcttttgcttctggagtctactgaacaggggtacttcctgggagtgggaagctcatggagaatgtggctggatccatttttggcacattagtaactggtaaagtaagcttagtagcggctacctccgcaacagagctgaaaggagaatgcaaagtgcagtgtgaaagccgcagctgcagcactttttggagcaagtggttgggtttgtatctatggctcctgccaatgggcagacattggttcctcatcataccatggttgctgtagctcaggcttccttgggcaggctgaaaactggacttcacactgtttttcccttgggtaggtggtttccaaatagctgacccatagggctaataacctcatggttataatagttactatttgtttattgactgcctttcaagtgccaggtagcatgctcagcacttttcgttcattactgtaaaccctttacattcctgagaggcaggtggcagtgacctcattttacatatgaggaaactgaggcccaaggaggtgctgaatcctgcaaaggtgcatagtagttgacagtggcaaagttctcatgcctgtaatcccagcactttgggaggccgaggcaggtggatcccttgagcccaggaggtcaataccagcctggacaacatg

SEQ ID NO: 61787 - DNA, 1320 bp, Homo sapiens
ttccccagggctctaagaagatagaaaaactcgcagaaggtgtggaccttttctttcttttcctttttctttttctttctttctttctctttctttctttctttctttctttctttctttctttccttctttctttctttctttttctttcttttctttttctttcttttctttttctttctgtctgtccgtctgtctgtctctctctgtttctttttttcctagtggggctacaacttatgcttaatacaaataaatgccttttattcatttaatacagatatttaccaagtaccccctgtgggtcaggccctactctcaccctaaggatacagcaggaagcaaagcagaggtggagaagatcccactaaacacacaggcaaggcacatcagtgggtgatgagcgctaagaggaagtatggccagatgaggtagagggtgaggatggggcggagagaatcctacctgttggcaaagccttttctaccagatggtccaggaagatttatctgataagcaacaggagggtgagacctgaaggagcctccagatcagggctgcctgggggaagggcactgtgaagaggggacagggacgctgaaggccctaaggcatgaagcataagagcaggaggctgctgggtgtgttctgggaacagcaaggaggccacagtagctagagggagggagtgagggtgggggttctaagagaaggagggcagagcattctgaactttacaggctggcataagggttttcatctgatgggagttagaagccagttaagggttctgagaagggtggaggcgagtggctcagctaggagcctagtgaagtagcctagaactttctgtggaatttgttctgcaatcatgcgaagtggcagtggcatggtaacatgggtaagtggtagtgactagatcctgagatgggaactgaaagcctggagtgaatgtctcaggaaacccgacacccgtctggcccagagggtccttatttcaaaactgtgtttaaaatggcaaacacatgagatcatggtaatcaaacttacataagtactgtgcaaatccagaaaatttgtagtgagtgtactgaattatttgccaatgatcaatagtgctgggctctgaatgcaatctgaaataaaaattgttttcctgaatgtatttatcaaaatactgagtgcttaccaaatactggtgcttactgtactagttgacccgtacaatcagtttaagtaagctaacttaaatttatgacttttgacttattcctgatctattcacaggccgcttggaatgttgggccatctgtccttttg

SEQ ID NO: 61788 - DNA, 1435 bp, Homo sapiens
ggtttctcccgttctgctctgtgattaatcagttcggtttttcatccaattatcatgtctgtcttggagaagcatgtttcctggggaaggttggtctaccatggttgcccagctctctgcctgctccttcttccttctgtaagatggcagtttgctgtatttttagccctctagttctactctttggcttgtgggaaactgtccacagctcataaattatcaccacattgctcataatcacaccctaccttgtctagtcccctgagcttggagacttactgggcttctctttatgtacctgtgatgtgatgctgtgtgttcacgggcccagggagatgtttgccctgttcttcctggcagaagaagagcagtgttctgagacctgaccagcatgtgtgcccggtgacctattgaatgatgtgagtttctctgcgctggccgtccgacatgccagagctggcgggtgagtcgggagttggacatgcagccctggagtgaccacactgactgcgtcagtgggtttcactgcctggtgccttttttttttttgagacagagtcttgctctgtcgctcaggctggtgtgcagtggcgcaatctcggctcactgcaacctccgcctcccggattcaagcaattctccttcctgcctcagcctcctgagtaactgggattacaggcatgcgccaccacgcccggctaatttttgtatttttagtagagacggggtttcaccatgttggtcaggctggtctcaaattcctgaccttgtgatccacctgcctcggcctcccaaagtgctgacagtaaggcgtgagccaccgcgcctggcctcccttttcttgacattgctttaaaaaaaaccctttaattttagaatagctttagactgataaggaaattgcaaagatcatacagaaactacacccaatttcccctattatcaatatcatgcaattggtttgccataattaatgaaacatttttgataaattattattagctagagtccacactttatcccgattttcttagttttatttaatgtcctttttctgttgcctgatcccatccaggatactacatttagttgtcatgtcttggctgtgatgctttgagatattccttgtttttgatgaccttgacagttttgaagggtattggttgggtatttgctaggattggaatttgtctgatatttttctcatgattagactgcgattaggaagtcccattatggggcttctatgtgggaggaagaccacagagataaagcacccttctcatcaaaggacatatcaacatgatttatcactactgatattgatcttgataaagcatgtgcttggctcaatcagtgtctgccaggtttctccactgtgaagttattcttttccccctctttctatactctagcttctgtgaggaagtcacta

SEQ ID NO: 61789 - DNA, 1608 bp, Homo sapiens
tttttttgtattttttgtagagacaaggttttgccatgttgcccaggctggtcttgaactcctggggtaaagtgatccgcctgcctcagcctcccaaagtgttgggattacagggatgagatacagctactggccaggagacacattcatgctttgaaaggagacatgaatggtccttctccctcacacatttcctttgagtgtatgtgtttgtttctacccagttcatttccacatataatttgaggctaacagagccatctatatagatctgtgatgccagggagcctggggcagaagatgaaggctggaatggggtgagggtgctttaggaaggagagagggagctaagggccacagcactgcttgcagtgtctaaatgaatggccgttctgcaagtacctgaggggctggtgagagcaaggcacagcgtgtttggggtgactttaggatttgggtttgggtagtcccccttcccctgctgcccatctgagagaattctggggaggaaggtcttactggggcatgaggtccctggtgtcatcaactttgcaggtaacagctgtcttgaacaacaacagagaacctgaatttatacatgtagcaagctgctaggtttctaaaaatatttcagaaggtttattttgattttatttttaaacattttgggtgcctacacagtgttatcttccatgtttttaatagccacactatacaatacagagtaggtttctgtggacaaatacaggtgcctatcatttatagcacagtctctctgggacccgtgcaaacaactgactcatgcgtttatgagactgggttggtttgtgaatcgatgacgcccagggagctgggaaggctgcatggcatggacgcttccccagtggctctggattttgcaatcatttggctaaatttgctcatgatgcacattccctcacccctttccctgatgaggacaaagatggctaattttccctgattggatctgttgttttgagtgaccgagaagaaagagatactttgctgaaagcacaacatattccgagggagaatactgagctttggaattcactttgcagacatctgcgaggatgttccgggagccaggcttgttatagctggcattgctggaattccacacccccccatgcctcccttaagagatacttgataaccccagggcctaatttctacttttggaacatacataccttgtgaagtggaggctggaggtgggaaggaaagcccccttgaggctgtggatctggttctcatgttttaaacagttttaaatattggggctggagatgcctgaaggatgggtatttgttatggaaaaccttgacttttttttttttcttttacattgttcacattttaaaacaaagttcagagagctgtgtacattgagcatgctttattagttcattcatttatgtgtgaaacactgttctggatgccagaaatgtggcaaggaggaaggcctggccgaggagtgacacttccactgagctctgacagatgagagcttgtcttggtggcacaccagtgccgcgggacatggtgacatgctgtggtccacagccctccagtgaccatgtgagc

SEQ ID NO: 61790 - DNA, 1334 bp, Homo sapiens
tgaggcagggtgagcatcctgcttggtgagctctctgcagtcatctggcaaggttggccacacaccagaaaggcaacggcaactattcttggcatcaggacccatcacaaaacacagagccctgagtgttcttcattttttaaataatattttccagatcaatatgctattgaacttttttgctaagaagaaaagattgaaaatgatttataatcatttaatttcactgtcagtctcacaaacaactgattccttatggtaaaagtgttggaaacattatattcaaatagtagtgttaaagattttgcagcaagattgtgggtaaaaaaggctgaaagtgttttgagaggaaaatgaactgcagagtaacaaagaaaaatggtgagcgtcagaattccttagctcttaattattttcatggaaaagtacctagttctcaaatgctggtaactggaacatcctattggttaaaaataaacagcataaagtttcaggaaaccaactaaacagcaaaaaaaaaaaaaaaaaaaaaaaaaaaaaaggcaaccagaacagcccaaaacagaataacaaagtcagaataatgaagctacgccaaaagtgtcaggtcattacacgggttgtctgccctcaggccagggttcaaacccagtggtgacaaactcagtggccacgtgggctgaagggcatccagaaagtcctgctgggtcaccagagggctgcccttcagcacttggttctgaggtgtctttgctgtttaaaatgtcttgttttctttgaactttgaagtttccccttcctaattatttcagtcttcatttaaacagatgtaattctaacctaatgtcctctttttaccccatctctccctggtagctggaacagtgaaccatggagctgtatttcggtgaatatcaacatgtgcagcaggaatatggggtccatctgagactcgcaagtgatgatacccaaaaatcaaggagttcccagaactccaaggcaggctcctacggtgtcagtattcgggtccagggaattgatggtcacccctatattgtcctgaataacacagaacggtgcctagcaggcacatcgttttctgaaaatgggccaccctttccacctccagtgataaataacctgcctctacattccagcaatggttctgtgccaaaggagaacagtgaagaacttcagcttccagaaaacccatacgcccagcctagcccaataagaaacctgaaacagcccctgctccatgagggcaagaatggagttctagatcgcaaagacgggtctgtgaagccatctcacctgctgaactttcagaggca

SEQ ID NO: 61791 - DNA, 681 bp, Homo sapiens
acaccatactttaaaaattaaaatgaatacatttttaaagtgaccctttactatttcaaaagcaaattcaaagataggaggagtttctactcttcaggtttgaatggagtccgccatcaccttgagttcttccgtgcaatgtggtagtcctttagaagttacaaataaaaacacctcccctccccagagttaacattggccaagagcccctgcttccattatttttaaagcatgtgtgagtcatttaaaagcagtgctttccatgcttatcttggtggttgaggtggaataatcagggtttcagcccttacttagatactaactgtgctggaacttgagcaaggaatttgaggtttctgtttcagttctctcaacagatgtgattaagaggaaggacaaaaaaaaaaaaaaaagctttacagcctacatgactgaaaaccagccacttggcaaatcctcattggtatcaaaatactgtatatttttgtattgtgccttacaattatttgtcagttttagagctaacaacatagtaaggctcaaaatataaaacaggggatcttttgaaagggggaaaaaaaaagtaacctgaaagattaatctagctaagaactggttattagtatctccctgtggaagactttaccatgttaagattaaggtagaagaaatcttgacttt

SEQ ID NO: 61792 - DNA, 2698 bp, Homo sapiens
ttagatgcaatggaaaaatccctctgtccgagtcatctctagggaacagaacttgtttgaaccagcattattagtttagtttcatgaaagacaaaataaagggcaaggtgtttgctccacagggtgactgcagcagttttcacagtaatgaataaagtaatgctgttttgtcagcagtgagtaggagttggggactgggagaagcttgttccattcctcaggaaattccaaagtcatgcacgggccttatccttggggaacttacagatgaaggagagaatatggccaagcacacatatttctccttttaacacttcccttctttttctttctttttgttttatttgttaaatttctgcacatgtttctcaagtgtgtggtctagtgggaaggaatactggcagtctctgggtttagggaaacattgagtccccttacagttagaaataaaaggctggacgtgcttcaaagactttttgaaataaggctggggacaaagaagtcaagcaaataaatgatagagtccagagaaggtggcattagagatagatctgaaagcattcagggagacgtggtgcaggaggatgggaaaatcttgttttttccatccctgaattgtccaagagcccaaagacatctactctgcaaagtgtttgctggatgacagtgcaacgaagacttagatgctagcaaacttcgttggaaaacactgggttcttcatgtatttggagcaagaaccaaggcattagtaaactttggaaaataggcagtgaggttgtccgatagagtccatctggggaagtattttgagccagttgggtttataactatgaccctaaacttgagtccagcatatgccaagtccaaaggaaaggtatgttctttggacccctcatgctctctgatttacagggacctctttctgcctggtcaaggcatttcatgactctaagcctatgactttttgtgagaagaagccttccatggctcctttgctgcttggttttggggttttggaggcaccaggatgccaggctcctaccctgtgtgcagtgcttccttctccccgtcccattgtgaactgtttcccttgcaggttcaactcattgccacttcctgtagctgtcttagtgacccttcaggccagaagcagatgcctgtgctgtgtaccatgcccctcctgctgctgaactggagagaaaacgtggctggcaggtggtgaactctctggctgattcaggcccagtggagaaggagggttaataatttactttgcccctgtgtagccactggtgttgaccttgtcaaaacactagtagaaattaattagagtctggcctgtcatttaactaacaggatagtaaggccccaaaataacttcttgttttgaggttaatcctgtctctgagtttacggctgacattcctgtacatccggccctgtttgcatccagcagccaggaccgtgggctcatggtgttcatggggctcacaaagagggcacacaaggtcaggggcctgtctctccatgggagccgctcattgtggtaggaggacaaaggccacagtgatcaagatgctctgtaggagaggcggcagaacaacatgtgggcctggtagatattgcaggtgaagagcctccccatcccccaagcttctttcattttaaattcacagcttttgtttcttgagaagttccgaatcttttgcatctggtgctgcgagaaggttcacctggttaaacatcctcaagtcaacagcacagctccttctggaaggcactttaactggatgggatcctctcactgtagacattgctacctccctttcctgaaataaagcctgctccagagcagtgattgtcttgtggtgtgttgtggaaagctgttaatagcttaaaaggtctcattagctgctagataggcctagactgtgaaaggatacatggtgacccaagggtagattctttttttgagagtctcgcactgtcacccaggctgtagtgcagtggcataatcatggctcgctgctgcctcgacctcccaggctcaagtcatccttccagctcagcctacagagtagctgggactacaagtgagtgtcactacctctggctactttttgtattttttttagagatggggttttgccgtgttgctcatgttggtatcgaactcctgggctcaagtggttctcccacctctgcctcccaaagtgctgggatagcaggtgtgagctacagctcctggcccagattcttaccttattagggagtatctaaattaatctgtttattgatctcttaagtagaatctgattaattgtccatcaatagctagctgcaaagcactgcagaagcccacttgccactctccttcccccagctctccaggaaggtgcaaggagttgtttgagatggttctgacatccagcttttgggtccctggtttattgccttttccagtacattggctggcacctttatccagccaacaaatacacgctctgtaaacatgcatgtacttttggagaaggcagttggaccaaggtgagggtgtggaggatgggagtgaaaaacagagtaagccagaaaaaggggtcatgggaaaggaagggcaggagctagagggaagaggcctggggactgactagtgcccagcaatagaaacaatcagcattagaaatgggcaaaggggct

SEQ ID NO: 61793 - DNA, 2344 bp, Homo sapiens
caaaggatatgaactcattcttttaaaagaatcagtttctcgtttcattgggtttttttttttctattttttttatgttttcagtttcattgatttctgttctttattatttctttccttctgcttgctttgggtttatattgctcttccttttccagattcttgaggtaggagcttcgattattgaattcagacttccttttttctagtatcaacatttaatgccatatattttattttaatttccattcaggtcagtgtgtgtttaaaacaaaattttcttgaggcttgctctttgacccatggattacttagaagtgtgttgtttaatttctaagtgcttgggtgtttgcctgttgtctagttcgagtccattttggttagaaaaccagtctgtatgatttcagtccttttacatttgttgaggtttgttttatggctcaggatatggtttatcttggtatatattcttgaaaagattgtatattttgctagaaagagatttcaaaaatagtaaatatgaatcaacctgaaggataaaaataaatgatttttctttcctttggcaatagaaatattgttactagttggacaagttatctttattcacagcctgagttatacaaaaaataggaatacatcctttttggtggtttacaaatctaattatattttcatgttaaaagtaagtggtggaggatatgtgaagtgtcatagtatttgccacagaggctttttcccattcaaattgtaattgtgtggaattttttattttgtagttgctttagtaaaaacaaatgatagaaaaagcttgctttaaattaaattgaacaatgcataagagtatagagtagaagaaaatatattttggatcatacttttgacaccacctttttcctctctcacaatacatttggaggatcttttcagatagacgtacatagaatgtcctgtatgccattctttgatggcagcagcacagctctccagatgctgatttaaaaggagtttagccacgtgccatttctttcttctggtgcccagtctcactaacctctcctaatagtctagcattggcccctagagaaattcaaaggtctgccaaggtaagtcagcaaaccagtcaagggccaggaagtcaggaatgtgtgagtagctgagtcaggggtctggaatcagaagtgagggtgagtcaggagcagggcccgggctgactcaggcaggctgaggtggtgacctgtggaatcagctgccttactggtgctccagggcaggggcaggctcaccatgctgaggcctgaaacttcacttctttcagggatcagctaatagatgtggtcaaggaatttggtcccagtcaaccttccctgcttcttctgtgttaggtcatctgtcagaaaatgttaaccaaactttagggccacatgactttgtttctctttgtggaaatgggaatgatatcactgcaaagagtcagggaagaggtcgtggggggaaaggaagagggggtcaaataaatcagcgagaaagagagaaacagttggaaagccagacagatactgggcgcttctgcaagagttataaactgttcttatcaccaaatctggtccattctgtcactcacatgagtccgtccagtcttcctctctcttattcccaaaattttagccttttaactgaagtccctcctcacagctgtggattgattggagagaatgagtgagaacagcttgtcaagggtgaccttcagcttttacgttaggtgactggtgaatattggaggcattgagaaggaacagaggaggtccatgtcttggagtggtaagtgggatgaggacttccattttgtgcatgttgaatctgaccgtgttgagtttgaggcatctgtgggacacccaaagaggggtatctggcacaagagaaaggctaggctgaagctactgattttggttgggcccaacagctgcttgcaatagttgcatgctcctgagggggaggctgtttgcattctgtccttgttttacatttccattgggagtggtgttttagaacttcttacagatgtcacaataattgtagacctggccctaccagccatgcttgaggtattatgtagattatctacttctttgctgctagttttcccagcccagttcaactatttcctgatgcaaatgaagcttctaagtgtacaaacttaaaatacctttattaccagtgcaaccacactaaactctaattgcccagcaactagaaagactaggagtagacagtttattgtatgtgtgcattttgatggagggaagagatgaatatttgcaaattcatattatgaagaacaaga

SEQ ID NO: 61794 - DNA, 666 bp, Homo sapiens
acagcaacagctctgtggttgctgagtccggcaatgctgagaaggatggcagttgcatccacgttgtgtggaagcagcacttcagcaatccaaacagagcagcagaccccaggaatgggagtctgacgcccccgaggccccacatcctgctgtgtttggcggtatggggatggctggggactgatatcccagctggtgcaggcccagggatcttctggcaggtctctgtaagtgcctggtgcatctggtgacttcaaacaaagggcaccagtgacagcgttggtccaacaggaaagaaggcctttggcaagagggcctctttgtttgctcctgtgtgtgtgcaccttgtctgccctgacaggcggaactcactgtttgttttgtggaacaaagaacaggcctcgttagattggagtgggaactgggggcaggtagggggagcagggtggggcgggtggtggcagggttcctgttgtgacagcacactccaggagaagcgtctggcatgtgtctcttggcctcagcaggggaaaaagaataaagacacattctcatgcttcaactttgatcctgcaaagtaaaagtctgcagacaagggtcttgagtggcctgaacctcttcactctctgcttcttatttaacataaataggaaaattattggagct

SEQ ID NO: 61795 - DNA, 793 bp, Homo sapiens
tcaaaactctaaacatatgaacacttattggggaaggtagtgaggatgggagccagtgggggatgtggcctgggagggaaatattgccagatctcatcttcctgagatggcaacaggagatttggaccaaaggctctgggtctgttggggggatggggggaacagcattttcaaccaggtgttagtagtggctgcagaaatgcggttttctgggatctcaggtgggctctttaaagaagagactgatgggtgatgatggaagccttcacagtcctgatgtaatagccgaggtggacagcagggggagctgttggacgcttctggcccaaatgtggcacaggagtagattagtggctcctgtaatccagggccccacccatcagtggtgaagtcccaaagaggactttggacaaaacgaagctttgccttcccagtgttgcccaggtgatctggtgttcctatgttactcttaggtgaactgttgcaatattcgcattgcaacaaattgaattccaacatttattgtgaactgctattttgtgagagacctatgttattcatgcatacctttcaaagggcagtcactatgcacctagtctgcactggcttatgctgagatgagtaaggctcagttctggacccaacgggatcagaaatgtccaccgagcactaaaaaaacaagggatggaatttaaagcactataaaagaggtatagatgaagtgtggcggaggttcatgatgggaacggctgtcattggatggagcaatcagggcagaattcatagaggaaat

SEQ ID NO: 61796 - DNA, 957 bp, Homo sapiens
tctcactctgtcatccaggctggagtgcagtggcacaatcacagctcactgtggcgacacaatcacagcttattgcagcttctacttccccaccctcaagtgatcctcctgcctcagcttcccaagcagctgggactgcaggtgcgcaccgctacacccagataattttttgtagagacccagactggtctcaaactcctggacttaagtgaacctcccacctcagtttcccaaagttctgggattacaggtgtaaatcactgtgcccggcctccagacataatttttaaccattcagaatattcaattcctgaatttcctgttaagaatagctcagacattttaattttcttgtatttttttctcaaggaaatacatagaccttcctcacttaaatgctccggaggtatggctcctcccttagtaaccttctaaacagagtccagagtcccacattgcccaagacaaaggcaggaggagatgttggctaatcctgagctgtggatgacatgtaccaaagacatgtgccaaagacctggaattaccaccctccactgtgatccgcaacttaaaactaactttcaggtccctcctgccataggtggcttcagttccatccctggcctggtcattgcagtatttgcctttgggagggacatgcagctcaagattccacccactcaccactgggagcagcacaagagccagctcagggccacacatgaaagccgttctgcctgcctagaatgaaaagttgtacctttaacctcattttcccaaaatgtttgtacttcatggcaagaaagtagactctatttttagaattcatgtggggaagtctgggggtcttgactctcccttcccccaaatctccaccaatatccagtaacccctaataaacatgctgtctattttaaaacaatgtgcttcaaaattaagccttccaatactatgtcc

SEQ ID NO: 61797 - DNA, 894 bp, Homo sapiens
tgaacagatttcgttacacttttctctgtcggatatactacacttacagctcaattcaaaagtcagaggaaaggagtcaaatgtcttggttttgtccatcctgcatttaatgtgtgttgtgtagcacctgagcctctcagtgtgtctgttatgcattcttgcgactattattaatttttctgtgtaatgttggagcggcagcaccaggcactcggctccccacatgcattttatggaacacacattcagtgtatgtgctacagcccccgagctgcccacacccctgggcctgaggggaatggtgggggaggtgaccgccaaacattcgtgacataatttccaaaaaatgtccagaagtgctgcacattttctcccttcgtgaaaggcacatgtgcctcccaagccattgggttggtattcgttacacatataaacacaagggggtggtgtttgaaagcaggaaaaccatggaatttgcttctcaatcccagaagcaatcttttttgtagcacagtccaggcagcagtctgaggctattctttgtcgttccactgtagtcatattctgcaagactaagaaggagatagtcttgatttattgtatcaaatcggttaatttaatttttaaagacttttcttaaatctgtcccacgctctctaactctcctcttactgcccatgttcaggctctcatcatcttttattttttaccttatcaacttagttatttattaacttacataaataagtttctgttatttattaacttacataagtaagtgtttctgtttaagcatataatccactgagttttgacagtgtttatacccatgaaataaccactacaatcaagatagagagaatttctatcaccccaccaaagattctgtttcag

SEQ ID NO: 61798 - DNA, 2106 bp, Homo sapiens
gggattttcaaattggtgtgttggaaaaggggctgggcttttgagtttgaaatctggtgctgtcacttactggttttgtgccctgggaatatttatttcagttttcatgcctctgtttttctataggcaaagtagaaaattcgaaaaggtcctcaacgagtttgtacagctgctcccactccctcatcacctcttgtgggcctttggaaatgtatgttggaggagacattttggattgttgcaatgacttgggagtgccatagcacctagcaggcagaagccagaaacaccaaatgtcttaacaatgcttgaggcggtgctacaaatgaagtccttctccaaatgcattgagccccaagaaaaatcgctgattctgaggaaccttccaactttaacaatttcaggacgtccctaagctgagctaggaggcaccacgcacaggccggaggcaccacgcacaggccagagtctcccaaatcctgtcccgcactctctcccaccttattaatggccagctcatctttcaagtttcgacttgaaccacttctcagagatatcttcccaggtgcccatcccaacgttactattatatcataatttgattctccctccccccatccccccgccaactctgtaaaccccaagtataacacaggacgttgctatttgttgactgacacatagtgcttggtgaggtcacgctggcgctgaatactttttgtataaaccgacgaacagctgatgaccgcatgaatgctcacacaaggggaaagggcgccaagccaaggagccggcgtcatccgacgtaacttccgccctttaacgctcctgcggacgcccccttctcccagtccgtgtttgtttccggaatttcaataaagctcgattcggctcgaagaagaccccgttcttccgggaaaatggcgactcccgctcgtgccccggagtcaccgccgtccgcggatccggcgctagtagcggggcctgccgaggaagccgagtgcccgccgccgcgccagcctcagcccgcgcagaatgtgctcgctgccccgcggcttcgagccccaagctcccgaggacttggcgcagcggagtttggtggagctgcgggaaatgttgaagcgccaggagagacttttgcgcaacgagtaagctggggtcccgcggagtctccgccaggctccttcagctcgagctccctgggcgctcccctcccctcccgcactctgttcccttccctggaaggtgactttgactcagtcacattcgcttcagtcctacgggcgagtggacggagggcttgctgcggcagagccgtgcctcttcctggccaggcacgtatgcctgcgaggatagctcggattgaacggctacctggcgttgcagggagttagtagcccctggtcggttttatttacccggggactgtggtggttccatgagtctgctttctaaacccttttgtcgcccgcacccctaacccataacagattgtcagcttcatctctggattctaagcttacaggaaccgtaggaaatgggaagagtgggatatgaagaggggtttattaggccgggaaagttcgaccctcattcagctggctggttgaacggattttagcaagggagccacgtaataaaagtgattttgttttttaggcagctttgttcagcagcttgttgcaaaagatggtttgaaggaataaaaagcagaagacagtagaaggatattttcagagagacttcccacgagacacttgtaagaaagtgagctaggaagggattgggagaacttttaagcatggactaatttaaatgcagttgacagagatggctgaagtttccaatctatatggaagaccactagcaaaaataggaaaattcagggagaggaatagatccaaggttgattttacttagggtgtgcagagttgagaggagagcaggacagacatttggttaatcgaaaaccaaacacttaaaagctggagaagtagtcatgaggctcaagaaagagagaaccctggaaaaatacagaaaacaggaatttcagctgtagagtgttgttaatagttgaaattgtggggatgaatgtagtgtcaaaaa

SEQ ID NO: 61799 - DNA, 873 bp, Homo sapiens
atgaagacataagaaaactcaacaaactagtaaccaataacaagattgaagccataataaaaattctcccatcaaaagcctgggaccttgtggcttcactgctgacttctactaaatatttaaaaaacaactaatgccaattctactcaaactcttcaaaaaaaaattgaagaggaagaaatgcttccaaactcattattagtggccagcattaccctgaaaaatacccaaaccagacaaggacacaacaagaaaagaaaactacaggtcaatatcactgatcaacatagatgcaaaaatcttcaacaaaatactagcaaatcaaattcaataacacagtaaaaagttcactctctatggtcaagtggaatttatcccagggacagaaggatggttcaacataggcaaatcaataaacatgattcatcacgttaacagaaccaagaacaaaaaccatgaatcatttcaggaagtactataaaagcagtcagtaaaattcagtgtcccttcatcaaactgggtatagaaaaaacgtagctgaaaataataaaggtcatatgtgacaaacccacagctaacatcatactgaatggggagaaattgaaggcctttcctctaagacctggaaagaatgaccactttcaccactcttatttaacatagtgctggaagtcctgcccagagcaattagacaagagaaagaaataaagggcatccaagttggaaaggaagaagtcaaattatccttgttttaaactgtataatcttgtatattgaaaaatctaaagactatactaaaaaactgctagaactgataaatgaatttggaaaagttgtagaatataaaatcactattaaaaattagtagcattt

SEQ ID NO: 61800 - DNA, 1110 bp, Homo sapiens
gagggtgggacttgaatttctcttgttcaccaggaaatccacaaggcctgacttgctggcattcagcgaatgtttgttgaataaattagtgaccatctgccttgctccttccacccatgggaaatcaccgtttgaaacattcagcatttctgcaacctccatgcatcccaaacagaatttgttactaactgcacatgctggagttgaaaagcactgggcttggactcaaaagacctgggttgaagtcccgctagttatgtgctgtgctagcaaaatgtctacagatgagtcagaaatgcccagaatatgttccttcgttgacagagtgacctgaaagccgggccattcagaatacagaccacaccaaactgagccaaagcagtcatccttctgaagatgttatctccagcatgccctataatggcttatttcactttgtttaattttattccattgtattgttatttttatatgatgggatcctggagggacctcagaacacatcaggggtctccaagaaaggaccaagtttcccccaacagtagggctgccccaaaatgaatttctctaggagatgtttgtgtaagatacatttgcctcatcattatttcttgggaaagaagtcagccagaggggtcatcatatgagctctgagtcacagggtacaggggaggagcaactatcccagactcaggagtcctagttctagtcccaaccagacgtgtgacttgacaaacaaccacttcccacccatgcctgggtttctgcatggagagaatgttaataaaagtggagtgctaatctaatgcctattcccaaggtgaaagtgggcattggtggggttgggggtagttgttgccgaggcagaaggggtaatagtttacaagaccaaagtcaagaaggaccagagctggtgaaatgaggctgttgacctgtccaggaggcactatgaggaacaggttcaaacctccagctgctcagtcccctgggatcatttctgtgcccccaccccccattatttcctatcatagttctctattatttaaaataacacaaaaaaacacaattttaagttaaatattcatgtgattaaattttaaatgtatctct

SEQ ID NO: 61801 - DNA, 1414 bp, Homo sapiens
gagtacagagaccatgcctgtaaccattatgatcaatttcctcttgtcctaaagtgtgttccttttggttaagttctgctccagctgtgagatttctattctagggttcatactgggtctccaagtaatgcccgattgcaaagtgggcgggtgtggagggggctgctgtgtcccggggagaggaaatattttgatttttgagtgtaaatggtgcatacaagttctgcagattgtcctccaggggctgcaagctgtgctttcaggaaacactcaagtgtccgctctggacaggatcagctcagggaggaggggcaggtgcccagctcctgcctgccagatttgggcaagcagcccaggacagaggtgactcccacaccttcacttccccgatacaggcctggtgtggaagctctgattcagcagaggcaaactctttctcaccattgcatttatttctgctttaaacaataaggatataaaagagaatttgggaattaaatccaaaagtatgccagtggacaacagcatatagaggtatttcgtaaagctccatttttaagtaacagaaaccctcccaattagtgattttaacccttttaaaaaattgcttggattaaaataagcttttaagcaaacctggaaccaatatgctgttgtttctcctgtttgtatcaatcttacagctgttgctttgctaggattaatttgcctctgaggggtttcaacactatcctccctggtgtattttcagagcccataatgtcatgtaatcgggaccatgttatttttgtctgaatctctgggagtgatgtaagaggaaaaaggaaactagctaactcccaaccatttgaccaaaggttaaattagtcttggcctttccccagctggacagaatgctgctcaaacatttattccatccagccaggcagagtggaagccctcctcctttcttctttaattgttttccctaagatatccatccccatcatgcccccaaataacatgcccatccttttgccctcctccccatgccccaccaccttcacatcgttcattatagagcatcagcactggagagaagtgtgtagaaaagactcaggaggtagaagtagatcctgatgtgggaactggaaatatgtttttcttgagaaagtcttccagtcagtgagtggctgcttggaggacacactgcttggctccttgcctttgttaccaatgcagatacccagcattgccaggatctcagaaacaccctgatacttccgattgtaatttctacttgaaactgccaagaaatgcaagccaaaaactccacccaagcccagtagcgggtgtccttgtaagacacatagccatgtcaacatttcaccctatcagacttaaacttggtccaagtataggaggtttcattggg

SEQ ID NO: 61802 - DNA, 703 bp, Homo sapiens
ccactttcaaggtgtcactttatctctttcatgtaccaaacataataaatatttaaaaattatagataaaatgctcatttgaaaggtgttgttaacttccatttagtttcaaatagattgcaatgcttttcttcctgtcctttagtagcataccaaatttcaacagtctctttgatatcatggatcaaacaaaaacaaaagtgaccttgcttcatttagttaactcactttcccttaaataaattctccctgaacaaatgtttgggtaaacaaatggtcttcatctttgtacccaaaagatcaatgaactcagatcacagaggacataaaagtcacagagtcaaggaaccccttggcgagcacacatccagtcatgactatgttcaattcagattgctcagtcaaaatggagctgacttaaatttttttcctactgcttatacaattattaattgattagctacttttattattttaactgttaaaaccactcaggtttgtgggaatttgatcaattattctgagattcatctacaaaagatctacctgaataaacatggtcagtctccaaagtctttgcattaagccagaggtatttcaaagtgtttttgagcgtgtatttccatcaagaaatatggcatttaaaaacacacctttcattcactaccaagaacaaaggttttcgtaccaatggcatattctg

SEQ ID NO: 61803 - DNA, 7152 bp, Homo sapiens
ggaaccaacttttctcagtctcttttcctcatctcccacatctaatccatgaaattcttccaattttaagatataaagaactcttggatccctccatttctccactgtcaaactaccacccaattctggaattctgtaatacccccaaatgtatctgcctatgaccattccaagccccctccaatcccctctccacctcacagctcggaggatcttttcaaaactctaatctgatcatgtcgtatttctgcttaaaccaccttaatgacttacacttttagccctaactaccacttacaaggcctagtaaggtctgacccttgcccacacctcagggctcattttgcatgctgtactccttcactctctctggggccaaccacagtaaatttctctcattctttgagaggcatcatgctgtcccctaccccttacccccaaagccaccaaggactttgtacatgcactttcttccccacttcatgtagttaatcccatgcttctttctgatctcagtccacacatgacttccttggagaagccatcagagatctctccaacaaagtcaaatccttttgctatatttgcttatggaaatatggcccccatctttgcagcatacatctcagttgtgattttgtatttatgtgtgtgggattatttcacttacatctgtctgcttcactagactctaggctctgtgaaggacaagaaccctatgtgctcttgttaagtgcagtgcttggcacataatgagtgtgcagtaaatagttgttagatgagtgaatgggaagaccagagaacgctcttgcatgttattagctgtagtcacagtaagaaagtcctgtttctctggtccatccactgggacttggtaatggtgtggtcataggtaactcttctagacaatggtatttatgataacttcatcaggaattaaagccaaagtgctgaggttttgtcctggttctgcagtagtgtggcctcaggcaggttataactttttaaagtctaaattctaaatgtcacctacagatgagaagtctccttctgcctttggcctctcaccagctgctttctccatgtcctctcctccctccctttttgcaaagctaggggagggcctgatgcagagctggcttccctgtgggaggactggaaggaaccacacagcatggatactaattccatgagtccacattggtaatcagaaactaggcctgccttgctatttagaaactaatgctatattctatttcttcagataagccagttttgaaaaacaaggcttgaatatttggcaggacaaggagctactcccaaacacagtttcttgccagcaaggatgtcaatttatcaaattgaaagggtataacctaggagcctcggttaggtgtactggctccctttctcgtttgattagaatgacatacacgctaattgatctctttccggctcagtcatctccatgcagtaaagaatttcaagctgctattgtttatttcctatgtattatgtctaaatatttcatggtgaatgaagaagagtgactattttcaaactggaatgcttcttcagaagaaacccaaactggaatgtttcttcagaagaaacttcagaagtcaccaaaaaggtgactcctccatctttctgattcttggatcctaaagtatcttcagcaagtgaagcccagtttcataaccgaagaggtgactccatctgtcctacagacttgcagtgtgaagcttgcaatggtttctctgtatgttaatttctccatctctaggatggcctatgtggttcttactaacctcagagtggtatcatgaagccactgaaatgataccagaagaaaacaagagtgattaatcttctaggatgataaatctatattttcttcaaattcttcattttgcataaaaacctttttcagaaaagaatgttaacattggatatatctacacctgatttgacagttccaaactacaccccaaccacccacttctgaatgagaagaaaaaaaaatcagaagcctgcaattgtgtaacatgaaaatcttttctggaccagggcccgtcactgtgatttggcaacacaactggcacatctcttttctcatctcttgaaaaaaaccaacagagaaaaaagtaccttgagaataaaggtaatgattaatctgtcaggcacaaaagggattgttttggggatttcgggttctaagtcgcagattcaaacaaatagcagcgaacagggaatgacagttccaccagaagacgattaagccacagcctctaattggaacggcatttgtacagtcagagactcttaccagacatctccaggaatctgtgagccattgtcaaaacgtccattttcatctggctgtgaaagtgaggaccacaacaggtaggtattggtagaaacaggagtcctcagagaagccccaagatgcagcctgagggagcagaaaagggaaaaagcttcaagcagagactggtcttgaagagcagcttagcgaaagaaaccctctctgagttcttgggcacgttcatcttgattgtaagtatttcctgatttcctacattcagacccaataatgcctccctagctgccaggctggtagtggagagttttgtttggtttgttttatttaagttaattgggatcagattcatcttttccaggaagaaacaagttactagaggctgtttgactatttaggggttgtgatattaagttttcaattacctattgcatttacccacaaaagttgatgggaatggaagagaaggagtgagtgaagtgccttctttatttcaggtatttacttatactctaaaatggctttgtgatttaaaagtcagtcgttagtgttttcattgatcaattgatttgtaccctgcttgcttcctccaagcattggggtgactcagccacctggaataagcatcaatagtcaataaatatagttggcaaaaatatacatatggatggcaagaaacatctcagtatgacaagtacttgacaagtattgtgctgtcagatcacttgatttttaagaaattaaaaattgcactaggtagaaatagtgtaccaggcaatagtccagctttagttttgtgtcatttttggtctctatttaaagcaaagtaatctctaaatatctttggagatttacaagacaattacaagaaccttctagatataaacgagggacgacttctaagaacctcttgaggattgcccagagatttactcagctattaacaagagactggaaagtttacttaagtggtctgggctttcattttgctgcacgttctagcattctctgtatcctgaagttttacctggaaccaggccatttgtgaatagaaatgtattatcatgtggcaactattgatttcaactggttttttttatcctgcttaaggatttcctactccaggtataaataatttcattttccttaaagttatagagaatagcccataaactctgtgcattaaaagttctttgcttggggcaaatacataataatttagaagaataagcttggaatgcatcagctaagccaagaatgagaaacaaatgtgaactcaaaaaattgaactagtggaatgtgaagagagagtcataagttttctggtctctgagaaacacattagaccagattcgttacagtattttcagggagttacggacaatttcttgcactcctcatcttcccttggcattcattcctggctgctctgaccacactcactgtcataatgtagcaagacattatgtagtaagacattatgtaagtagttatttctaactaaaataaaagaaataaaagagagaagatgaaagtcagtgattcttatgattcccggtcactgcttactggaaaatctttcttagtgagactgagacccctctgtcatgttacttgacaatctggccccaaagaagcagttgtcaatacagagtgattacagcctcacagtgacgagtgagtcagaaaagtgaagcaaattcagttacaattcttagtgctctgcagaaaacagaggaggaaatgaactacacatctttttttttttttttttgcaaccaaaaagtttaaaaccctctgtatttcttaagaagaacctgtttcataatcccgtgctttctgtgttgaaagtgaaatttgctttcagcagttcactgttcaactggccttgtgtcttccccactatgcaaggtaggggctaaataaagaacatcttgatattgtctgttgaaaaattaaaacttgtatgttctggataaagccagtcatttcctgaaatatttaatttccatttatactatacatttattttctaaagtgaaccctaataaaatctgcaaccttgattatcatcttcagttttgttggagcttgtggggatgtataaacaaaaagttcctgcacaaacacaatttttttaaaccaagaaatctacatggttttgctgaaagtttatccaaagtaattttctgctttattagagaatgtgcattttgccttgtattttctagtaaaaagctttgtacattgataaggcaaagggaaggggaacatcgaaaagatggcagaggatataaaggactcagtctttcaaatatgtgagattgttttttttccgccaaccttgggagtctggttctattttttttccctcctttcaaaaactgctcttatggggagcatctcaaactaatctaacaccatggtataaattacgggtccccaacacatgggccacggactggtacaggtggtccctggtgctaaaaggttgggaacagttggtataaaggactgataaggcctactggtagcattaagagaaaagaaggtccatgaaaaattctttataaactacaactaaaaccaacaacaattaagtcataagccaaaaagctagctctaatttggccttttagtcattgggatacgtaggcctttcacctttactagtgtggggggaaagtttgcaatgcaaaaggctgatctcttccttgggctgaacttcagagaatctctagtcatgtctagtcatttctcacagggactatgctcactcctactactctatatattctcctctctcttcaaacttttcaggattctttgatacagagctcatcttattgaagatgctgaagtgaacaacccagcaagcagctgtatttcctcctgaggtggaaggacagctttccagggctggacttttgagtagataacatactgtgtagtcggacagatgctgaattcttttctcaccctgtcaagcttccgcattagaggtctaacttttggcatctcttagaatggaaaaaaatgcaagtacttctgctaaaagtagtacccttgatctttaccttcagtgccctgaaggaaatagaaagaaactatcctggaacacagactatggaggaaataggggagtgggcagtacaggaaggaggaaggaaggacagggatggttgattgtatgtgagaaatttcagacactgcagtgttcccttcttcctgctcctaccttccaccaggactgggtgagaaatcatccctccttgctggggtcacagagtttgtctctccattttgagaggattctcaatcagacatgctggttatagacactctagggctttaaaattattattacaaagtttgttcagatcttgaagtaggtctattctatcttagggagcttttgagacaaaagaatctatggtcaggatttagagtgaaatcagaaagtttataagccaaattaaaggaaacgtccactttgcagggcagaatccaggacaattttggtctagtacattatttggaatgcccaggtactggcaggagagctctgagataagggtgggcagatatcactggccctttttattggtggagaagctgagctcaggctgatgtaatcatgcatcccgggaatcagcccagagcccagttgccctgccctgggcacacactcgcccttggacttccactgtgctcttcccttgagcagcacagagtgttcgcttgtccaaattctcgttcctgtttgaatgtttcctgaagagagagaaaggagagcgatcaactgcattttgccagatggagagacaagtgtaacacaattaagagacttatcagcccttgaatgaaagagctgggcttggtatcttgactccagtcattccctaataccatcatttgatgagaattaactcctttcatgtgaaagcccaagcgaacttgacaaagtttacagtttaaaatacattagcagtgtcaaaagatgattttacagaacagacgtgatcgtggtggggatattttacaggagatctgctagcagagtcttgggatctcttcaccacctacaaacacattcaaacctcaggtaacaccagggttctgaggtggctcagtgatgtcttcagctctgataaacacattgaccaagcattgcactgtgtttttcctctagtatttctgttttctagcttttcctcaagaccactcttttggttcagagcaaaggacctataggaaagtgggcctcaagagaccccataacttctctgtcttgctttctggctcaacagccacctattctttctctgtttcctccatgcttggttcttctagcttgctattttacaaaaccatccatctctccaagtctagggtgcccaggactgagggtcacatggagctagagctgtcagttggccaacagatgctagatcagaagcccctactgtcagcagtgccctggattctgcctgtgggtggtttgtctgtccaagtcgtgcaccatcctcaggccctcgctcagaaactttggaataagatggtctctgttgcctgactcttgcatcattcaattgagagaacagacacccacagtcttgcagcattttatcaaaagctctttccaccacagcagaacatcagaggatgtctaccgtcagttttacctgcctcttgttattatgatttatgttcaatgctcagtccttcaaggattggtacttctgtacttgggagttctgtccctttaagaacgtctgaggttctaaatctgaacatgcagaagtgctaaacactggggattctcctta

SEQ ID NO: 61804 - DNA, 4247 bp, Homo sapiens
actttgtgtccaaaaaaaaaaaaaaattacccatatatatatatattttttaacttaaagtaaatcaatttttcttctgaacaacacaaaaactttaaaaaattctaactccaatcaaccactctatcttacatgtcattgttgtctaatatttaaatttttccctcattattattgttgttactggtgttttaaaataaatatttttgtttgcttatttaaaaatgcattcctatcatttactggtttatttgctaatcattactgcatacacccactactttctcttgggttctgtctccttattcttgcagttcttcctttagaaaatttttcaggaagggtgtgtgacagatgaactttctcagtctttgtctgaatgtgtctatttcatgctcaaggttgaatgataaattagctgatacattttaggttgataattatttttgcttggcatttttcaggtgtctctgtcatttttccaatgcctctgttattgctgttcacaagtctctgggtctcatttttgtccttaataatctgaatttatctggtaactaataagagtttcactttgtttttttattttgaaatttcactattatgtgcctagaggtgaatttatttctagttcttaactcatttttcatcttcaatttaaagggttataatatttaccaattctggaaaattttcctctttattaccttgcctttcccccagtctgttttctccttttagaactcctactatattggtatgcatgttgactctgtcatttttttatgcctcaaccatttttttcatatttcttctcttattctcttaatccatgctgaattttgtatagttgctgtttcaaatctatctttcagttcaccaattccctatttggttctatctaatcttctgtttaacacgttcattgagtctttagtttcactatcttttcatttctatatgttttatttggttctttttttcttttagtttcttttcttgtgtgcttatttctttcatttccttaactcaccaaagcctaatatatttataatattttaaacctgttctgtcgtctcgagttgcgggggagtgaatcattctgcctattttatctactgactcttattcataaaggatcttttcctttagtgttttatacatctgtattataaattcttcagggagatttatttttccctgtgggaattccacgtggcctaaggtgtggatttgttcttccagagcaggtttgcatttgcttctgctgggttccccaggtataccgccagccagaaatgattgctgtggagtggcaaactgaaaagagaagcctgggggatgcaggtgcctgttgaagagcactctcccaaaagaacggcactctgtgacctttctcccaactgtgaccgtaaatgactaagagacctcgtgcttcctacaaatgaggccagctcttttgacatccttagactttgagtcactagcagctgagggagaattttcctacagacttccccctatcagcaatgaacgtggaggaccaggctcacctgggaaatcttacagtttcaaggcgcttgggagaaaagtccgttctggatcactgatctaagggctgcagactcctggagccaaacttgattctgccaaacaggattctgcttctgattgtgaattttaattttacccagaaaactcactgttttcattgactttcaaaggggaagtattttttttttctactttccagaagtgggtttcgtcagtttttctttagtgacgaatcccattgcaacatgttctcattacttgacgagaaaggaaaacatactaatgagagcagaagttggcccttatttactcatcagccctgtgaaagtgacctaacaacccacagatggttcaaatggctgaagcagttcaaccgtgaagaaattaggtgcccattatacctccagcaggcatctaatttcatgtctggggcaggattgctgagttcactgaaacttctaagcaaagcaagtgatttaagagaaactatgccagcaaagtgtgccggccctgccccttgcccttttctccatctcagtagcttggctggtcatgctaagatgtgagcctagaacagtcagtcaagaccataaacgacttgaaggcttagtccctctcagcgcacatgccttagagtctttctggaaattcaagctttcttatgagagtacctcccgaaaaccctatgcttctatcaacaggtgattggttaaaaaaatgggggtgcatctatgcaagactcctatttacccattaaatagaaggtttacatgctaatacaaaaatactctaagctattcaagtagaaaaagcaggcagaaatggtatgtgttaaataccctcacctgtataaacacatgcacacacacacacacacatatacatgcacacacacagaggcacatgcacactttttgacaacataccaggaagtattgatattagttacctgtggagaataatatttaaaatctggggttggaaggaaacacatttcttatattttatagtatacccttttgaaatttaaaaacttgtacatattcatatgtattttcttcacccccttcctccccatgagagagctcacccagtagagtatgtcttttcaaagcatttttgtagggagttgctcaaaatctgttctgaaaaacactagttccaaaagatgcaaacaagaattaagtgaaaaaaatacatgtggtccttcccaaatatgtttgggaaacactgggttaaaccaaaataagcagttttctcaactgcaggaattatcagagcctttaatgttctctgtaaatctctaagaggggaacagaatgtaaagctgtcttcagctctacttaaccacaaaccccttttttgaggagcatctaatggaactaatgatctgtgaaacatactttgagatttgcagaccctggaaacacatcagtcctcagaactcctccatatgcagagatctcccaggttgagagtgacaagaggcggccttggcactgttgggccctgtgggtagagggagaactgtcctcagcaacccccactcacacacagcccactcagagtcacagttatcctgatgcaaacacaacttaattaataaatgcttcattcatttcttattctggtccttgggatggtgatcaagttcccatccaggtcagcatttgggatgagttgagggatgtgaatgcctggtgaggtcagaaaaggagagcattgttcttttcagcccagtagagatagtggagttcaatcacctctcctttctgagctctgagttggttcttggtgcttttttctacttggagagcactgaggctggccatgttcccattcacctggctctcaaattgcagattcctctctttttatgagcctgccctaatatcgcctcttttcaagtacagctggttcttgggtgattgacctcttcctgatattctgtcaggctgcatgccaccacatattttatttttagccagaagatccaggtttcagtcttggttctttgtgactgtttttgttatgactgagaaagttttattttgcaattggaaaactaactgacaggaaagctgtgcataaatctgtactctgtgctaataaaggaaacaggctgacccacagaggcagcagcagttgtcacaggaggaacactgggatgggaatgaaagaatctggctccagattcagaaactgtcacctattagcaatataggtcttgtatcaagtcactcagactttcagtttttaactggggatgaagtattgggaggactcacagaagtaaagtgcgtgagagtgcctcaccatggcgcaaatgccatgtgaatgtttcctccttcacctattgctggtcaaaatcatgtgcagtcaaaccttggccccagcacgtaccacttatgggaatgtgagagcaattcttttaacttctctaagctttggtttcctagtttgtaaaatggagacagaaagagagccttagtcataggtcattgtgaggactgatgggctaatgcatggaaagtgctcaactcacaaaatttactcaatatagattagttgttattggtattattgttatcttcatatgttcaaaaggctatagtcacataagctgaataggagggaataaacaggtggagtaggatggatgggggacttctctaacacacacctatagcaca

SEQ ID NO: 61805 - DNA, 2229 bp, Homo sapiens
ccagatcccactgcagcagcagcagcaatggcagccagcaagtgtgcatgggccagtggcacacccacaagcttgcacagctgcctgcagtgtctcagaccctgctcagaaagccatcaggcaagtgcaggtgctgggtgcacccacagtctcatgccttagtgggaacagggaagtcctagggaaggaagtgaatgacagttgcatgaggtatgacacaggtcctgttgaatcatgccttcatgtgagtggcacgaaggattggagcagctgccatggtgggcctggccagccaagaaagcagtgctccacactggtgatgacagagtcagaactcaacaaaggtcaaaagtcccctctgcagcctttaagagtgtggttggggccaagtggttttcctggggggccatcagtgaatggcagccagtccaatcagggggacacatggttgggtacggcactctgctatgctgattctgcagaactgaatgctgacaatgactatctcaatacagcatttgccactatgtgccaggcactactctaaatgctgcatgtatattatttgttttaatcctcatagcaatgtcatgaggttcctcgggatttcccagacaaaaaaactagcccagagagggttagtaagttaatcagtgccatagctgctatatggtggagtcagattttgaatctgggccatccaactctggtgtcagtacatttcactatcaaaagcctactgacctgttgttgaatggtcaacaaacaaattaagaaagacctcccaagaggtgaaaatttggaacatcgggaataaaaagatgattctaaaagcttcaaagggaacaaatcaatagaattagaatcagaatagtgtttgtggtctgaactacaacataaaagccaggcaacaatgaagcaatgccttcaaaatgttaaagaagataatttttcagcctagaattttacaacaaggcaaattgaatcaagtatgaaaacagaatggacatttgcagacttgtttagactcagataattgacgttcctttcttaaaagtgcctggaggataggcatcttggttacaaggaaataatcaaggaaaaagaaaacatggcatcccagaaacctaaatccaacctagaaaagctattgagagaagatcccaagttaatcccaagtgtggcagaactagagagccactaatcctcactggtgcagaagagatagtgcttcacgaaggagtgtccaggaaaaagtagacccacaatagaaagggtgatgcaataggtgatatgatgaagcttctggaaagaagatgcaatcaggcaattattaactcaaggaatgaccaaagcctattcaagaaaaaatatggaatcccagtattctaatgggttctggagtgaacaatacaatacttacattgtcataatggtttaaagacctatgattgatataacttaaagtgtggtaaaatttgggtgagaggctgaagagaggtggagatattaaatcttcatctctgataacatttgtaagtttaaatactgcaatatacccacgtatttaaatgcacacgtaactcagagaaaccagctaaaaattcaaagcatgtcccttagcaaagaaccagcagccggtgtgggtttgttcagggaactactgctttgtattataagctttttaacactgtttgatttcttaattacgtaaataattacctcaatttttaaaaaatataaaactcctctgttctaaaaagagcaagcctgcaagagaagttaatgcaattgaaagcacagcctcatgaaccccctaagtttcccttgtagttcacctccttggcacagaccaacccttcatgaactcccctcccttgactcactcatgtctttggtttgtgctctgtctttggctttgagcagctggtatcctttcatttcccattctgacatccgccttccatacaaggtcccaattcaccttttgtcttgaaccttgatagctcaacttttttctttcaccctgcctttttccccaacttctaagacaagtgactcagaaatgtggctttaagcaaacaattatacgaaatataatctgttgtaactactaatttatctctgtgactttggccaaatcacctcacttctcatagtttccttgtctatgaagtaagagattaaatctcgatgatcctaaatcttccatctccactgttctgtgat

SEQ ID NO: 61806 - DNA, 823 bp, Homo sapiens
ttcataaggagcctgagtcccagagcatctggaaattaacgtattattcttgctcatctatgtcagtggttctcaaccaggggcaactttgacaatatttggagatattttggtcaccactcctgagagtcagggtggagaaggtgcgagtgctactggcatccaatggacagaggccagagaagctactaaacatcctacagcacacaggaaaccccctacaacaaaggactactcagcccaaaataacaacagtaccgaggttgagaaaccctggtctatgatgaaatcattagaggagcccactgccctttgggaaaacttatatttgagttgctatgatatggagccctgatttaactccctccacaaagcagcacacaatggagttctcacaccccggatggcagccaggcctgggaactgggccccggcatgcaagtatgtgccggccactgtgtaccatagcaagttttattaaaagaaaagataaacagcaatgcattgtgtaatcagctaataataggtagtgaagcctgttggcttctcaccctcacacccccgctgccacgcctcctgccatctctcactgtcccacagcgattgttgtgcaatgtcactgggcatgtaagaagtccctttgcatccttagccccggccactaaggctccactcacatggtttctagcaggcaaacccgatgtctcttgcaaaccactaagttcctcaaggcgggggccgagtgggggactatgcttcttgttttgtaatcttttaatgtgatggtcagccagctgtggccacaagaggagacaggaaagac

SEQ ID NO: 61807 - DNA, 576 bp, Homo sapiens
catgattttatgggtgaactgggcagttcctccttggctgtttatcttgcttgggctcagccataggctgcatctggctggagacatggctgggctggacattccaagcaggtctcattagcacatctggcagttggtgctggctgatggctgggacacatcagttctcctctacgtggcctctcattcttctgtaggctagagcagcttctttaaatgacagtctcaggacagcattccaaaaggtcaaaagcagaagctgcaaggcttcttaagtcctaacctccaactttataaaatgttgcttctgccttatgctactgaacaaaggaggtcagaaggtcagcctggattcaaaggttggagaaattctgcctcctgatgggggaggaggagcagcgaagtcatgctgctaaggggtgaacaaaaccagttaggaggactttgtggccacatgtgcaatctactatggtctgtcctctgcccacaattatttacatttctctcaaagcaacaacattaggaagttaaaattggttctctctaggaagtagaactggggtatattattcaagg

SEQ ID NO: 61808 - DNA, 3405 bp, Homo sapiens
ggagtaagaaagaatagggacacgttttccttcattctaagtccttctgtaggactctttttaaacatgtacatgttgtataaaaattaacatttctaatatcatataagagtcaatcccttgctctggacaaaaacaataacaacaacaacaaaaaaaaaaaaaaacactaaaaagacagtttcccctatcctcgcttaataaatgctgaatagcatttattgaatatggatcttaagaagtataatatcattaaaccactcagaacccacattcttccgtcatatcctgcccactccatgagactaaggattcagttaaaaaatatgatcatatatgtcaaaaatatttcttaaactgtaaacattttataactcactatacattatctgttgctactggttgtatgttgtgtgcagtgctgtattaagccgtgtggagaccccaaaagaaccagaaaataggttcctaccagcaaggaattggaagtctaagtgaggagacagaatgacacccactacccaattatagtccattacactagactgtagggacccatgcagtcaggggccattactcttcgttcattactgccccaccaggccccacacataataagacctagataaatacatgctaatggaggaatggatcaattacctggcagcctatgattcagagtctggacacaggactgattgcaagtgctagaagcatcggcgagcagagatagaggaggtggtcgcactcagctaaggcactgaggctgggcttcatttccaagttgcagcgtcaaagaagggaagacaaatattccaacccaggggaggccagacaaggaaagatacatggaagtgaggagttcaaggcagcttggatggaagaagagaagtgggaagaaggctgcaggtcccctgagcactatggcagctggacagtggtacggggatggagtggagaaggacaggaggtccttgggcacagggagaaggagggaggggaaaaaccctacagcccagcaggccacagggggaaccctgtcacaaacgcttctgcccttccatgtagaagaaccccaccttttcctcttttattcagtgtccaatccattctagaatcagctgggtgagcaaaggtgagttggagcagtctcccacttaccaggacatcagagccttttacagtgggaccgacagtcagtgacatgaatcactaagggctgtggcgcataccaggaaagccagggccatgagcccaggcacactcagatgcccatcccaattcaacactcttaggtcgagatccttaggcaagctgacttttttaaaactcagtttcgtcacctaagaccagtccctgcctcactagctgggaagatgaaatgaagtctcccaggtaaagcattcagaagggtacatggctcattcccaggactgcatgaaccttcgtgttgtcacggagagccacatcggtgaggctggggaaggctggatggaggtgctggcattacagtgttacagaataagggtatgtggcagaacagggtgaagcaattaactaaatcttcatttgtcacagcaggaaattaataagcaatacctaaactagatgaatccagacttgaaactagatggatccagacttgaaaagaaacagcgtttagattgcagagagggaaagccagggcatcctttgtaggaggcacaggagcaaagcaccagtgcaggaaaacagcgtgttcagggagttgcgaagctttctttttgactcctggagggtgcataggagctatgtcaggaaagtcagagagactctcctggaggtgtcctgaggtgtccacagcaagaaatgcagaccttgttctggagtcagtggagagctgcaaaggttttgagcaggaaaaggagccggtcaaggtgacggcccacggagctctctggcaggcctcaggcagaggctgctgagaatggactatgtggggagcctgtgtggcccaggcctagctcccagagagggtggaaagcggggcgcctttgcaataaatcaatgctgacatgtgctgatgaagacctaggattgagatgtagtgcttgggactttatctctttcacaactggcttagatggggtaacaagagaggagataaagggtcatgttaatgattgcagaagcaacacggttcagggaaacatcgatacacctcatctaatcattcaccaagaaagcatcaaccagggagttgcgtgagaggagtacagctctgcagccctgacaaacgagctggagtccagatgaggcctgggcttggacaaaatgaaaaatggattgttctcaaaatctccttcaagcctcttcagggtccccttgcccagttaccatcacatttaccctcgagtgaccaggccccatggccacacccaaatacaccatgtctccaggtgcagtgtggcgtagatgttagaattcctacagtgctactccctagctgtgaggctttgggtgacttaacctggtcacttgagaccttggcagcaaatggagataaaggtgactcctttatgagtagacttactgtttgggagtccccaggcaggaagctaaagtaagtaaaatagaataacttttattctactgtcttagtctcttcctccaacattaaagtaaaagctagtgaaatcctacaaggcactggattgagagtccctgtaggtccctgacctcaacagctgctggtgtgtgttcaaagagcccatgtatttccctttcatgctgattctaaatacacagatactgtttgctcataatacaaagatatgtcacaatctgtgagaacatctaaacttattttaaaaacttatagtagtgtactagggcgagcgttccagagacttgcaggtgttctcagaccaaattgctgttttctgaagaaattatgtgacatgttgacaccacaaaagcaattccaaaatgaaacctgatttcagtacatctttctgatggtttgaatgtaaaacaggtttataaaattttatttcccttttgaatctggcaatgatctaataggagtgctattattgccttttgatatttttccactgaattttaagccacttacatcatatatgtatgggtatcaaaatagatcttcttatgctttctcattaggaatacaaagttcacgacaacttttcttctcgataaatctaattttggggctagaatttaagtttctattttcctaccaaaggaagtaataatggcactcctgttagatcattgcctattaagtaatgaatgcaaatgttgtaagactatgggaaccatgtttgtcccacacgaaacactagagagtaaaagtgtgttagaggcagcacttgaatagaactgattcttatctgttcaatt

SEQ ID NO: 61809 - DNA, 2747 bp, Homo sapiens
tgggactacaggcgcccgccaccacgtccagctaattttttctatttttagtagagacggggtttcaccgtgttagccaggatgatctcgatctcctgacctcatgatccacccgcctcagcctcccaaagtgctgggattacaggcgtgagccaccgcgcccggccggctttggcattcttaaaagatcctccagggattctgtcgtggaaagggtttaggaaccaccatccgaaagtagttggtggagatgttaattgccccagttcttccttctctctgggtagacactctgcctagacacatccacaaggccacaccacttctgtagattttgaacaagcttcatattagttggtatacagctgttgcctcaagcccccgttctctccaacaacttcacttcctttctctggctccccagcctctcctcaaaacccctcaacccagcaactaaagagttggaagactctgactggccctacgtgctaaaaaggttattaaataccttggaaatcatctctaccagttttaatactcattcccttttcacagtacttcagtgcacgtggacagagtctgaaagaagattttgggcaaaaagcttcctgagcataggtcacacgaagctgaaaatccctacccgacctgtccaccatgctgatactaactggtaaagccaacagcaaattgggacctttgctcagtttttgcaagagacctcttgggactgtgaggtcaaaacgtgttttgttctcaaatataccaagtccatagtcaggtgaactccatgctccatgagttgtccaaaacaaaacaaacaaaaagaaaaaagcaagacacactaagaaaataaagggaaaagaaagacccaggaaatgatctcacacttcccaaccagctccttcttcctgtaatacaaagaacaggcccaataagtctgaggtttgagcaaagcatttctgtcctctctggggcaaacaggagggactgcagctttccatcattagccagagtaaaccacattaaatagaacaatcaagcaacatgcagggaccagctagaagcatgtgtcccctgtaaatctggtcagaaatagtaaatacaggaaacggagacaatatgctgccctattagttcattctctttcataattaacagcagatgaatgtaagcagtgatacaatctttatcttacccaaagcaccttaatcctctgagaccccagctttactgtctgcagaaagtgagtcctttttaactcatttaacagacatcaattgagcaactactatttgccaaaaactctgctaggagctagcgtggaatgtaagcctaagtaagacatgatgttggttcccaggagcccaggagacagacatgcaaacaaataattataacgcactctgggaaaagctgtaacagactctatgcaaggtgcatgggagctcagagcaagcagtaattagtttggctgctgagttaggaaagacctcaaggagaggcagcatctgaaataacatcacagatggatgggtccagataatccctgtggtttatttcaactctgtgttcagattctgttaaaaaaaaaaaaagagagagagagagagagaaagagagagagtacaatagagacacacgctgagagcagtcttgaataggcatgcatgttccttaaagggtcagagcctctctttatgcatcactgagcacccaagacagtggcctgttgatatttgctagatcttgaaaggtatcagactaaggtatgatttggagattatgtcacgacattaaagaatcagccttcagtgaggaaacagtggatcccttcactatgaatcacgcatttctcagaagtctctgattccctgaaatttcccttggaaaattcccaaatgcactagtgaactcttccaaatggcacagttttcgatcatgtcagcctcaccattccagtaagaaaaactgggtgtcccagtaagattttcaatgggaacgtctttcccattgaagacgtggttgggtttcattttttcaccttccctccccctgtttctttttatgggctggtttggagtgataatttattgttttaaaaaagagtaaacctatgatatttctaaatagagactttggaaaaaacctgacaattctgggaatatatgtggaattaatgaaaagttttccctaaagaacagccccctttcaaggcctgctgtctgggagccaaatggaagggagggcagggcaggagagaggaaaaggcattccaaaagcaaactcaggagcagactttggtagaggagaaaagaaatgaattcatcaattctgacccctcccctccccacctaatcatcatggcaggtaggaacttctcccataagtttattggtgcgtttgtctaactatgttcttactgagcatctatacaacccaggaactggaagagaggaatcagatacaaaggcaaaggaaaaggctctcaaagcagcttatgctctatacgcaggtatggatggtccccaacttgtgatggtgctgcttacaatttttcagctttactatggcaagaggcattcagtagaaactatacttcaagtacccatacgaccatcctgtttgtgacttttggtatactattcaatacattacttgagattttcaacgctttattataaaataggctttgtgttagatgattttgcccacctgtagtctgatgtcagtgttctgagcccatt

SEQ ID NO: 61810 - DNA, 5611 bp, Homo sapiens
aaaataacaaatgtcagtgagattgcagagaaaagggaagtcttgtacactattggtgagaatgtaaattagtacaacaattatggaaaacagtacaaaagtgcctcaaaaaactaaaaaatagaaatactgtatgattcagcaatcctactactggatttttacccaaaggaaagaaaatctgtatatcaaagagatatctgcaccttcttgtttatttgcagcactattcacagtggccaatatatggaatcaactgtgttcatcaacagataaataggtaagtaaaacgtgagatacacacacacacacacacacacacacacacacacacacacacacacacacacaatgggatattattcagccataaagaaggatgaaatctcgtcattcacaggaacatggatgagctgggaggacattatgttagggaaaaaatgtcaggcacagaaggataaatattatgtgttctcactcatacgtgggagctaaaaacattgagctcatagaagtagaaagtagaactgtggttctctgagggtaggaagagtaggaggaaggggaaaatagggaaagtttggttaatggacacaaaattacagatagttagaagggtaagttctggtgttctacagcactgtagggtgactgtagttaataaaaatctatggtgtattttcagatagctagaagaaagaattttgaatgttcctaacacaaaaaaatgataatctttgaggtgatggatatgctaattactctgatttgatcagtatacattgtatatatgtacaaaatactcctgtgtccccaataaatatgtacaattattacatgtcaattttatgtgtttaattaactaattaattaattagctttaaaaatgaggaaatggaagctttgagagggtaagcaacttgccccagatcacgcaagtcgggaaggggcaggacctgaagtctaccttcaaccactatcctccttttgccaaaataaaaaaaaagaccggagaggccccagggaactgtagcctgagcctggccctgaatgcccatcctggctcctggcctacagctgccttctcaggcaagttcccctctctgactgtgacccagtttcttaatctgcaaaatggagaaaatgtgacgtccccttcctcgtgcacaaggttgggatgaggaccagatgaatcacagacatagacatctgtcaattgtaaaatattgtttgatgggcctatagtctatgcacttgtgtctgaatgaggagaagatactccctgtggttggcccacgatgatatcaaaggcaaaggtcacaatcttccaatcaatctagcccaacaacccagttaatcaattctacctcagacgtacttccttgtgtttacctttctctgggaacatcagcccagcctagttcccaacccctgccagacctgttctcccccagctgaggccaccagatctgtgcctgcaggccaaccccctccctgctgggctggccctaaccgaatgcccagtgtgggaaattgaatccttatcctgttccaccactttagaactagaaactgccttgttcttggcagaactccgcctcattgccgggactggggtctggccagaggcagaagcctgaaatctgatgctgctccccagctttggacttctgagaatcatccagccccgagaatttctggccaccgaaccctgtccactgtcctatctgcagcctgaggctgactacctgcttagacagtccgcttttcttaaaagcacaaacctacctgctcctgtgtgctgctccccaggctactcatcatccagcagccttagctgggctcccccaccccctgtgtaacacctggacatccaccagtgcctgccccctccaaagcctttttttttttttctacatccttctttcatatgtacacatttcccaagatttcacactgatgtaaattctcttttccggatattctgtcctttggcaatctcacccacttctggggtttcaagtagcagcctaggaggaagaggcccatgaatataagggtcattttcaagttaaaatcaccagagcccaagactaatgggcaggagagggaggagacaaggtgggagttgagaaaaaagctgagccccgaggaagctggcccctccccacagctgctaagagaaagacccaggctcagtcatctctgaatcctcccagccttggctgcactgccacgtatagatgggtacagagtctttgctggatgaatgagtgaataaatgaatggctgcataaacaagttgctacttacctctctggatcctagtgcatttactgaagctgtcctccctcctgaagtggggcatacacgaggccaggagaaggggttaaagccaaccaagtccagggagaaacccctagatttcctgcaggatttgcacaggaacgtgttgcaaggtgtctcctccgagaattcactgagtcccttcaggagacccacagagcatagaatgggcccccagactttggagcagcacccggctcctactgtctccctaggagaccgtgggtcccaccagcttttattttctattcagcaacactattgcctatgtttatggataggactgtgttgagcaagagttgacctttattatcttaattcaatcttcccaaagaccttctgagataggtacttttattttcttcattttacagataaggaaattgaggtttaactatgatcccatagctaataaaagtgacagaaccgggtttttttctttttactgaaatggtattatttcatcagaatttgcccacatgctcaacactgctggaatgtgttattttgaaatctgacaatgaactacagaatggtaaaagcggaagagcctttgagacaaattagtctagcccagagtagggaagaaaaagagagggaggctcagcctgcaggctgcaaaccctcccctccctgtttgtcctgctcctaaaataaaacagaacaaaagacaggaaagtcactagattagagaattcagcatctccctcctaattccctgtgatgtgataattctaagacccacttcctggagcaagaagaagctaagatccctcagcctggctgatgtggttttgaaagtggaagagggcaggaagtgttgtggtcactcccacccagctgtgggcctcttcccagagccctcctcaccagatgctgcaaactcagactgcaaatccagaagcctgcagccttccggggattggctccctgcgaagataaccctgtccttcaacaaaccctcgcttcctatttgcattcctaattggcatcttctattgcttttcctggtgacttcatttttcactcttggctaaaaatgggtctctgatgatttattctatcctgggtgttgacaagctgaagaagttgtgtggggcctgctgccagtaaccctgggtgacgaagcgtgactcaccactccgaggtcagtggggggatggaaggcaggggagtcagctgacaagatctgctgctttgtcaccaggccttctgccctcttccatgaggcagctacactctaggaaatgtgagacgccccagagccctgtgaaggagacaggacaggcagcccacaggtctgtcacatctcaaggctgattctctgttttgtttcccacccccagtgccaaatgctaagctgcgtttcagagacagctctaaaagggaacaagtacccagccttccctgaatcccccagtcatattttcacatacacacaaaggagccttagagatcatttaaatcaatcttctcattttctggaaaagaatttgaggcccagagaggtcaagcaacatgaccaaggtcataaagtgaattagaggtggaactgggaatagaacctgggtcttctgtctcccaggccctctgcactgtctactcaccacactatcaggagaatcagacttgtgctgctgagtgaatggggccaactctctcctccatgaatggaggcaacaagggcaacctttaaggagagatgactgctggaatttcagctctgccctttgttcttctctcagaggggttctgtgtttggcagactgtcccccctctacctgcagggatccctgcagtcctgggggattggggttaagctttctctctcccagaaaacatagatcactctgaaggcagttacaaactgaggatgatccacagattatttcttggctaagacaagaggaagttgtcttaaataaaccagtatgagagtttattgcattccatctgggtgcttgatgatcccatgtccctttttctctctgttgactttctaagtaaacaatttgttagctcagagatgactcaaattcatagaatcagtaaatgagaaaggactacaaagttcccctagtctgaaccccctacactcagccagtaaccacctctacaacatttctagattgacactaccctcagcttgaatgctgagaaggatgaacaactcttcctccctcagtgatagccccttttttgcaggatagacctaagcagtaggcgtcagccattctgtgatgccagttttgccctttaggtcaaaataaagcaagtattttctcttctttgcaccacaacttgtgtctttgctcatgacttacaggacaagctaaaacagacaaaaccattcttgaccctcaaaggctgagtgtcccactggtgggctagacagggctcttactcagttttgtgttaccacatgattaccatgagtctttacaaaacccttgcccacctcccctagagaaattgagtaaggaagaatgatgagtgccaaacctgtccatttgcttcttgccagcaattccggtgaaaggtctgactgaggaagaggctgaacccatctgaggtattctataattagcgtctttcttcctctcccacttaccattaaggtagaccaggatattcatgaaaaattcctcatttgccatttcattccttttggaaaccacatgtgaatttcattcagttaaaaaaagtcaattccttacccgacaccaggtagcattctaaaggatataacagtgaatgaaacagaggaagccctaccctcatgaagcttatgttttaataaggaagactaccatcaactaatagttaaacattataatatcgagaacttatatgtactatgaaggaaaacaaagcaaggagagggcaaaaggtgatggagctgctattggcgaaggcaggcctaggaggagacatcgattgagcagagactggagtggagtgaaggattcctccttggaaatgtctgcaggaagtgctgtaagaggaaataactgcaagaaagccctgaatgttgtgcgaacgggatcaactagaatgagtttcagacgacttttcataggtagatatgattttcaagccaaatttttctgatagctgagaaaattcaacatggcattacctgcctttgaaattctttagcattccagaaatcaggtgggaccatcaggatatgaacaaagtggtcaaacaatcttacctttgtgaaacactgtctcacatgttatcctttttaatgatcacaaca

SEQ ID NO: 61811 - DNA, 1105 bp, Homo sapiens
ggaatgaggcggcatagagccgtcataaaggcagccatctgggatcacgttggacagccctgctcacagtggccatgggaacaacccaactgagttttgtgggggcagggatgagggcaaggcgttggcaatgggggatgtgtggagagttgggtgggggaggcgggaaacagggcatgtgcccacctgtgccaatggcctcagaacggaaatggttttggccacgggaaagccagttgcttccgtctctgagacatcactgactcctgcccaacctcatcttattctgagtttttcttcattattttcaattttgatgaaaaagtaatatttttccaccaattcaggaaaaacaaacatatgactaaaggtcgttttgaatactttgatagtactagtccaactctgatagtgacaaaaatggctttctcttaggaaatggcttgtgtgtctggtggggtgagggcagggcagggagggttcatgcactttgcctctcctctcgaaccagcttgtgacagaaaagctccaacaggtcccagcagggctgtcagttgtggggctgatagacacaggactttggcaccacagagagtgatgcccagaaagaaaagcaagtaaaccggactgtgccccgtgtgaggcatggtaagctacatggggacaggaagcttcttgtcatcattcagatccctttatgttgcctctcattccccacagtgcccagctgcccatgctgggacatgaagagggagatggaagcagctgggtttcagcagccaaaacgatctcagttctgaggccagtagtacatgtggacacacgccctgcttcctgcctcccccacccaactctccacatccccatgctgccaagatcaagcagtctgttttatgtccgtggtagtaaattcatgcaggcatcaagtatttactagattaagaccagcttcattctgcgtctttaaccctgctcttcagaccctgagtactttgcatgacttaacttctgaaacatcagttggggtgggggacgctcctgtgacccaatgtaaggagctgtcaccattcctgctgctctctaaggaatgtcctcagccaagaac

SEQ ID NO: 61812 - DNA, 1765 bp, Homo sapiens
tgagccactgcgcccggcctcatctcttctgcttatgaccttgtgaggcaggcatcccaggtttcattatccccgttgtgtaaagattacgacttacctaaagcactgctggactcaaacccagatcttctgccctcgattccatgtccatctctgtgaccccaggtttggccaagtgtggatcttgctgcatatgaacagcctgccatttccttccttgtgtacacactgcctgtggaaaatggacaagggaagttacatttctatcaagagctgaaacaagcaattttgctttagagatgatatgtaacagaaagaaatagtcctggaagcagggagccctgtatgcatctgcctgtgttctgctcctggctgacccctgagatcgaatcatgctgtttgctaatgtgtggaaagtatgttttgctctctaggagtcctccccagagcctgacagattcggtgataggaatagaactgtggagtgaagatggctctctccaggtgtcactccagttgccatacatgtaaagaaagcctagacactgtgatagctttgtcctcctatccctgaactttgcccagaggcgaagcttcttccccaatccttgctcaaatgccttctttttcctcgaagaatccaggctgttgagcaaagagggagatcctgggagcttcacccaaatcatctggaagtttcttggggtgccagatttgaaataggagctgatagggtcaatccatcaggcaccctgaccctagacatacaggaattcccctctgaggttgaagaattccccctccatcagacccaaaagtgaaaaacaaactttgcaaaggcacgtttataccaactcttctggacggggctgagtagagttttctctggtaccgggcacatgctgctcacagactctctggcccgtggacatggcccctggggtctgagaatgcagatgggggagaggctcaccgaggagctctggatgacctggctccagtgtgtcacctcctggccttggcctcctaaccccagctgggctgagaagaccccaaagagggtctttcccactctcccaacctgttttctctggtgattaatatataacctgagaaaatgaatcacttgtttaaattcagagttagctgggctaagacaggtgacaagaattactcaaaaacaagaaagcaatattgggggtaaagatgctttctatttttcttttctttagttatttttttgttttttgtttgtttgtttaagatagagacaggatcttgttctattgcccaagctggagtgcagtggcatgatcacagcttaccgcagtcttgaccttctgggctcaagccatcctcccacctcagcctcccaagtaactgggactacagctgtgcactgccacactggctaattttttaaaaaattttttatagaaacagggtctcactatgctgcccaggcaggtctcaaactcctgggctcagccatgagccaccacacccagcttgctttcttttttaaatagaaaggaacacataacaacttgattttaaaatcaagaacaggaagcatagactctatactttctttaaaacattgtaaataagtctcctattctttactacttcagttaaatgggcaggaaacaagaaagggaaggatcaggtgagggatgggagaaataaaaaccatgccgaaaaactgcagtaatacataaaaacactaatggctgatacgtatttattgggcactatggtatgc

SEQ ID NO: 61813 - DNA, 3346 bp, Homo sapiens
gtcttctttactgttgattgaggaaaagtaattggcatataaattatatgattatgtcccattataatgtttccattatttctaacttctgctatgtctcgtagtttatctcagagctatcgccattaaatagctgagaaaaggcttgagaacatttgttttaaaaataataataaacatgtgatgtgatggttaatattgaatgtcaaattgattggatcgaaggatgcaaaatacttttcctgggtgtgtctgtgagggtattgccaaaggaaatattagtaaaatttgagtcaatggactgggagaggcagacccaccctcaatctgggtgggcaccatctaatcagctgccagtttggctagaataaagcaggaagaagatgggaaggacttgacttgctgagtcttccagacttcaccattctcccatgctggatgcttcctgccctcaaacatcaaactccaagttcttcagcttttggactcttggacttacaccagtcgcttgccaggagctcttggcctttgtccacagattgaaggctgcaatgtcggcttccctacttttgaggtttgggaactcgagctgacccaccactggcttccttgctcctcaacttgcagacgaccaatcatgggactttaccttgtgatcgtgtgagtcaatactccttaataaattccctttcatatataaatgaaatgcacgatatatgtctttatacgcagagcaagagcatgacacaattccatctttttaagcaactgatacacaaagatctcacagccaatccctactatacttggcaaaactactttttgttgtatggactctgaagtcaaacatcattcaagtctcattccaccacttactacagtatgtatttgggcaattcagtaacctccctgagcctcagtttcccctgggggaaatcatgctacatcataggattcttcctaaagtgtgaatgagatcacatggagattctggcactgtgcaggcactttggacgctggctcctgaattgttaactcctgacttttaggcctgcctaggaaaaatgatgaaccatgtcagcaagataccctgtcttcagaaaaatgatgactcattggcagctcttcagaacttgaaacacatcattgggaatgaagagaataaaggggaattaattccaggtttccggcagccatggatcctgtgtgctgaactcagcaagcctttgtgagatgacgacgtggcatcctgctgcagggaggcttgggccgttgcaatctgaccagtgcccagccgtccctgatacccagggtgaggactgtgcccctgaacaccccatggttggcagcactaggaccaagagacacagccagtgtgctggtgcccccctccccaaactgtccttgcttgttgcaagcagctagttcagttcatggcttgcggggagtctccctcaggagccagcatggtcaccagtcacaaagcctggccagcaccccagcagctggaggaagcagacacagagtagacacttcacgaattctagtctacactccccctcttccccacaaaggggaaaaccctgggcaaactttacggagccaacaatactcactatctacctggtgttcaaagccaacttgaatctttatttccttttgcttcaaagcataatacaaagagtgaaaataggttttccatcctactggaatttctaagatcataaaatgcattgctggttccacagtatctagtcataaaaaagactgctctggttctagggtgttgttgttgtgatgatgattttcccaattgttctacaatctggcagctgaaatcctgataaggagagtccgtgggccaacacagaccaggaaacataaaaataagaagaaaggggatctcaactctttgctccctggctgcataacttgagactctgggaatcagaatattagatcttccagggacctagcgtccttatatccaatctatatcaattagatatgtgaccttgcgtaaggaatatccgaacctcagttttctcatctgtaaaatggggaaaataattcctaccttatttgttaagaaaatcaaaagaggcttgactatgcagagagttgttataagcattttcatgtgataataatttaaccttcataaccccatttgacgggggaataaacaggcagagataggttacagaatttgcccaaggtcacacaacaagttggagacagagctgatgcaaagacacccctggtcaccaggagtgataatcttggatgaataaatacctatttgaaatgcttgaaacacctaattcttccaaatagtctaaaatgtcctctgcaatcttgttttcacccttcctttgtttatcaggtctttttttttttctaacacagataaggaaaaggttaaactccagtccaaccactttccaaatgaggacgttccaggctaactcaaattaacgaggtttacctacttgttttgccatattccctcatggcgcaagaatgtccacacagatcagtgagtgacccaataaaaacttggtcattctcctcatggcaccctggccccaagcaggagtataagaggatagagtcattttcctataacatgatccaaggaaattcatttcatcttggaagtggactaggctgatgtgcagagaaacctgattcagtcccagggaaagccagatacatagggattaaggatttgtggttgttaagagaacagaacttggcctcagatcccctgacttctcctctctctgtcttttactggtgagatacagtttggtaccagttcccaacctcttaaatctcaactgcaaaattaggaaataacagtgtcaaattttattgtttaaagtattattttattataacaccaacaaaagcttgcctttctcaggtaagatatcccagttcctgaagatgaaaagaagaaaacctgattctgggtataaaattctgtttctgtcatcagtgaacttcaacttggtcccctggcctcttcctcttgggatttgcttgctttatccttgtaaaatatctgtttcttctctcctaattaactttcttatcaccatgacactaaagaaaaaggtcattctcaggtcatcaaatgccactctcttgaaatctttatttattcaagaagctctgtaaattaagacagagcaagaactgggcaatgtttaaaaacctaattataaaaccattattactttagatagaggactgcagaccagagtgcaatgtcacccaaaatagaaacgtctttaaagaattgcaaaggaagaggccaggcatggtggctcatgcctgt

SEQ ID NO: 61814 - DNA, 4417 bp, Homo sapiens
caacagacctgcttcactcacagcttccccttctcagctgacagcaaccccattaatctgcttgttcaagccaaaaaacctggaagtcatccttaactcctctctttctcccacatctcacaactcagcagtcagaaaatcctgtgggctctaccttcaaaatatatccaccacccatccaccactccgcagttgccctttaccatgctgggccacgccaccatcacctctcactgggccactgtaatagccttctaacagatctccccactgcaccctggctcacttgcaaaccagagtgatattttaaaactataatacaaatcatatcacccttctgctcagagtcgccccccatgtgtcaatgcataaaagtcaaagtccttacaatgtctccccattcattggcctccttgctattcctggagcacaccaggcatactcctacctcagggcctttgcacagactgcccgaagctctcctccccaagacgtccacaggggcaactccttcacttccttcaaacctttgctgaaagtttaacttcccaatgcaattcactctaaccactctgcttaaaatccctaccttctccccaaccccctgcttttcttgtagtggttcccattacattctaccagtctacctaatttttttttttttttttttgagacggagtctctctgtgtcgcccaggctggagtacaatggcgcgatctcagttcactgcaacctccgcctcccaggttcaagcgattctcctgcctcagcttcctgagtagctgggattacaggcactcacctccacgcccagctaacttttgtatttttagtacagatggggtttcaccatgttggtcaggctggtctcgaactcctgacctcgtgatccgccctcctcgcctcccaaagtgctgtgattacaggagtgagccaccgctcctggccagaaatctcttctttattatgtctactgtccgttatccaactccagaaggtaagaacctccactgatacataaggacttgtataccccacgtgcctgcaacagtgcttggcacctagtaggcataccaaaatatataaatgttgaacaaatgaagaaagttaaagtaaaactagaggtccaaaaatatcacaaaagccatctatggtcgccttttccctacctgattttgctgagtggccttacttttcagtcctctacacagctggaacattaatgaacacagagggggaagaagtgtgtttactctaggatcacctctcaatgggtcacttggcaagggcatctttgcttcttcgtcagctccttttgacacgggggtgaagggttttctgcaccacactttgaccacaagcatcaccaatttcactgaacccaacagaaatttggaccctctgggggctctctgcgtggcagggcccttttctttttctttgggcttaggctgcaatttgaaacaccactttcctgagccagcatcccccttgcagcgctgtcacagggaggcttaggcagccacgtggaagccacctaccccgacctttggcagaatttccaaacacaacacagtagctttaagttgattaatttggaactctgaccttggccccaaaaggtaagaatacataacaaggtattttattctcaaaatgtgtcaggataagaagcacttctgtaaatcgacctttttaaaatagatataattagatttgcagttgggggcagtaaagaaagggtctgaacagtggataacatgttgagaggttaattattaatgggcagtcttccctaacaaagtatctaataggcattgtggtctctttggcttcagaaattaccaagaaagcctggaccccgggtgaaacggagaaatggacacaagtcccctgtgtttctccattctgttggttttatgcatctttatccaatcaagtgcccttggacaaagcctgaaaccaggtaagagcctgacttttctccagagatgggcatgaacttttctttttaaaacgtgtgtcacaaagaatccaggggtttctgactgtatgggacagagcttgcttcagagcgtgccaggtggttctatacacgacctcacaggttcacagggacacgtagccgtttgtaaacagaaatgaaattttagaaaatcatcctcggattaaaagtcttctaagagtgcctgcagctagcagtgaagtctcttgcgtatctgatatggaaacagtcatgctaaaagttattcagcggcaaatgatatgaaagcgattcagatcttcctgagagttaatgtggcatctaatttgcaaccggggagccaggcttgcaatgaaatgctctgtcgggttggggttgtctaattgcctgcctctctcagaagagaggggaatttatgagagttctatttccagtcaggtctaaagtagagatatcattgcacaatttctagactttgttttgctgccaaaattttagtctgaggctgaagaatccaacagccgtcctgcctgttttgtttgtaaattcacaaactagattgatggcgaaagacagatcaaatgccttatcaggaaggtagtagagtggagcccagcttccaggctaagcagtggaccaataaatgacggatcagttaattgaacaatttggccagactagacaggtgtttgggaatttgttttggtactggttactggtcaggagctagtaacgctaaggtagagtctgagatttttcttttctctaagactagccttggagagagctccgacaactttgagaattagaaattccctaacgggatgtacctaaaaatttcagaagcttttttcccctttaagaaaaaggctgttcctttgtatttgactattttacttcataggccagttaataactgagtagcagtattaattattgccattcactaagtattttctgtgccaagcactatactaattatttttgacacatcatctcatttataaagccacatccaaaaatgacccttacataataatttagagccatacaggtaaaattgctggtaatctttattcccttggttcatagtgattttgctaaagggcctttcctgccctttgccccggaatgttgtatttgtttgtttactttttaatgaagtttataacacacttctagaaaagggcctctatcataaatcctcaatgagttctcacaaactgaaccagtaccccaaagccttccttgtgtgccccttgagccttaacatatatgattttttcctttggggagatttttcattaatagaaacacatcagttgctcttttgcgtctggcttctttcgttcgacattatgtttgtgaaagtcaaccatgcagtttcgtggagttgaggctcattcattctcactgctgtagcattccactgcgggaccatgccacacttcctttatccattctactgtggattggccaggactgtttttgcaatggagccatgggaattggaagctgtcagtgctgagatagaggttgaagggagggatggcctcccccaggcttctgggtattgtccagattttccttgagcaatctcattgtcctgatcagcctgcttctttccccggggcctagtttgtgcaaatgctgagagaagtggccactattagcaagagggttcctcagaaaagaggatccaagtcaggaggcctcttgttctcttggaagcagaatctcttggcagaattctttctgcaatgagtgagcccaatctgtgtgcatgtggctggtatgatgtctttctggggaaaccgcagggaagccggtgtcctgtggtggagcccttgtcaggaaagtttctacaccaatggttctcaacaggggcaattttgccctccaggggacacttggcaatgtctggagacatttttggtttttggttgttaagaccagggagagagtgcttcccttccagcatctagtgggtagaggccagggaagctgcttcacatcctacaatgcacaggacagccctcacaacaatgaattgtctggcccaaaacattattagtgcagaggctgagaaaccatgatctatgccaagcttcaactgtcactcatcgagcaccaggaagtactccctcaaggacccttcctctttagcccctcctcccagcctacttcttttgagtatttattattaatgacatcttactaatggagtcactaatgtgctgcacacccagcatgtgccaggcactccacggacattttatctcatcctcaccatatggttgagtaagctggcagttaagtgccttgccggcggtcgcatagctggtcagggcagagcagggagaggtacctgcagcctcaatctgtctactgaggccgcagtgctctgtgtcgagcccacacccagtgatttg

SEQ ID NO: 61815 - DNA, 6146 bp, Homo sapiens
gtccttccgacctgccaccagcacccaactttgcaggttcagccacactcaaaatcactaccccagcagggtctgtcagatttctgagaggcctccacagttacatggaatgtcacccatgactaatatttgagatagagtccggagatgaaactcattcttccaagagtgcgtactattctggaatcagcagagggccagcccccagcattccagggaaattctatctttcccatgcaagagaccctcccatccatggccatccttcctagccctacagctgagcaggtctgtggtcctgctgaaaggtccaccctggagagacgggggacagcagcctgtcctccactctgcttgcctctcacagagacccaggactggaacccatattctttcattctgagctggagagagaaactgcagggctgacggttgaaggcatggggtctgtaagctgacccgaaaacatgaatcgccaaatgagtgcgcagccaaaagccaagagaatctggtacctggctacccacgatggccctctccctgccctcctctccacatcagctgccacagtgctgcgggcatgctgggtcatcacagttggcacagcagggagagaggcagaaagaggctgggccccgagacagggcagaacagtccccatttcatcatgaggggaatgcaaccacccaggcctcagcctgggtgtccctgacagccacgggctccacgtagaacagaggtcacagcgattctcacagccaggaaggtactgtgcgctggcccccaggacagtgaccagtttcgagtggggcgctctcagctgggaaatggggtccaacccaccagggaaaagggctgactaggggccaataggaccctccagatccctgcccagcaggctggacttcagtcccaaggtgataactagaacaagggggccgagcctagtctgtccagcagcgggtggaggagccgcggtaagaaaggcagtcgggtcttacattcaggtacctacttggggcgagaagaccaaatccagtcactccagccctggaggagtcagggcgcccacccggctgccccacagaaggtgcaattcctaaacatggtcacaaagtagcgcagtgacatctcagctgcttcggagttccaggagagggtttctggctcaggagaatggagtttctgggtgactggaagatgaggctgttggctaacttccctttccttcccacttaggggtctatttccagaagcattcctcatttcattttttccccagtggggcttggctaggggtggggaggcatggggaaaaagtgaagagaagagaaggaaatgcatggaatgcaagcggaggcctctttgtctacagcgttttcacctccacttgtgcaggttcatattcagggcctggtgaagtcagttctggcacggctctccagtggactggcagtggcccttaaaaatagttctcaggaagatgtgtaggtggcgacgctgagtagtgtttatgtcccaacatgaagagcaggcctcattgtgtgtgtcctgtgattacaactgtgtgaaaatacatgtgtttgagaaaaaatgctggaagaagatgcatgaaaatgtttatacgtccgttgagtttgtatctgaacttttgtctcttcccctctttatgtaatgttatagtatgtatatggtatattgactttcatgatttaaataatcagaaaataaatttactacgaaatgataaaataaaggagtttgactagatcagtgatcctggaactgtagtgggtaatgaagcacctaaaaggctgctttttttgtttgtttgtttttcctgagacggagtcttgctctgtcgcccaggctggagtgcagtggcacagtcttggctcgcagcaacctctgcctcccgggttcaagcagttctcctgcctcagcctcctgagtagccgcgattacagacacacaacaccacgcccagctattttttgtacttttagtagagatggggtttcaccatgttggccaggctggtctcgaactcttgacttcgtgatctgcccgcctcagcctcccaaagtgctgggattacaggcgtgagccaccgcccccggccagggcttattaaaataagattctggggccctaactacagagttgctgattcagtgagcctggggtagacttggatatttacgtttctcagcagttcccaaatgatgctgctggtgtggggaccacagagaaccactagagaaaaaacaaaagaaccaagacttgaaactaggttactgacttccaggctagggtgcttcctacagaaacaacacgaggctacagggcaaacctcacttcacttctaactttctagggttgaaggggtgagaatcaacatccactgctcctggatactgacttcttccccagtagctacaaccccaaaagtatttaaaaccccaagatatttgtgaaaatgtatttgtccaaaataaaatatctacatgctaaaaagaaagcagtccttgaaatgaacaaaaattcccaagctgagcattacttgtaattggtagaaaaataatcattgcaaaagctaattaaccatccaccctgagcggctccttggcaggcctgaaaatatgatcaggaaaattcttttcctatgagtgaggcattatcaaagcagggcagagcctatgggttatccgttgactaggactgacctttccgtgactgccaaaaactttccagtgacaaatgttccagcttccttgtcccaagagaaactaaagtggtaagaaaacaaactgctttatactgaaacataacaagatcaacagcagctgtgacagcatttattaaactgtccgctgtgtaccaggccccatggtcagtaggaaagtatatccctgagggtacaaaaatgaaaaagcgtacatccactcaccaaggacttcccactgtgccagggtctctagccccttatggggtgtgtgtgggggcagggaggttggagattgggagaggcgcataatttcaacacaatgcaattagtttgtaaataacactacatgcaaaatgttacaagagccctgaggcagcgcaggttagctgagaagcctttacagaggaggtgatatctgagttgaatcttgaagtttccttcaagaagtggaaggacattgtaagcagagggaaaaaaaacatgaaccagccttgcttgactcagaggctggaaaagggagagtgaagttgggaattcttgagattttggggtggccctggatggggtacataaaaagaagtggccagagggaaggacaggaagggccatcctcagaagttttgtcctcatcctggaggcagggcagaccactgatgaggggggttgtttttaaaaggctgcctttcccagatggattgatagacttatctcagcctggctaaaaccctggccactccctgatagagaacaaggttcccagcaggcaagggcaggggtggggcccagcagggaccagttttgcaagctcacctggccctacacccgcaaacactcagcttttcctccaagacaagcctcaaggcttggagcaagtctctttgaagttttcttatgaattgctatgcttaacactaaatcatgggaaagattaacacccatgaaactgaagcaggagcacataacaggagcttaatatgaatcttccatcttaaaaatatcttattctacatctgaaaagagaaccatttggaaattccacgtcatactcacttatagacttaacagcaatttcaactttaaaaattcattcccacctgcattatatgacttgattcttacagtagccctgtaaagaatattgggtaggaattcttattcccattttagagacgtaaacattcaccatccgcggaccatggggaacacagctgacatcaattgcaagtcagtttctgtggtttactgcagcaagggagagctcactccagacttgggcttgtgctggttgagtctaaggaaggggtggaaagcaaggggaattctggattggattctgtcaaaaaggagtccaattcaatgattcggcatcataataatttaatagttatcactaattattatttaatataatcaataaatgatctagcagatgggaagatgaaaacagggctgagctggctttgatacagcaacacaagtcattcctgttagtcagaagagggaaatgtttagtcatgttttttgattttggagtggcctcctccctgtcttgatgcaaacacagatgtggagggtctgtgctgcacatgtttctgttcggtgggcattgtctctgttcacttgtgaatattatggtctggctgacggcagagctggtttttgttgctgtgctgtgttttcgtgtagtctctcccaaagggacttggggaatgcgtttgaggtctcttaatacctatgccctagctgcacagctttgggtgatgccctttacctccttacctctgatctctcaggagtaatagtgtcccttccacactgacattctgggtgtgaatgggactgattagaatggtcatcgtggtgccaggagatctgcagtggtgaccttccctggtatcagctatttaaatattatcaggaaagagaaatgtggaagcaaagttctatccattttaagcatgtgaccttttaccctaactgaaccttaattgactcatttgcctctagcaattcaaagattcccagacacccggaggacaaagatgggattctgtaagaacagcccacgcagtcaatgacccttatgccatttcttgcccggaactgttttattcagggcctgacatgcagcagtgtttgattaagtgctgacaatgaaaataggtatttgatgctgtttggaagaaaactcttacatttcttgaattgaactaagatgtacagaacaacagaaaccattatttttaagaatatttaaatgtgccaagttctttgcctatttatgtcaatgaatccagaaaaacaccctgtgagataggtattatccccacttcacagatggggaaattgtggctcagagtgttgcaaactctccttagaccactcagctaataatttcctctctggtatagctgaaacatgggcttgcctgaagggcagaggcagaagaagcctccaaacctcccaaggtcctgtgattctcattgatgcctacttctagtggttctggtgtccctctcagagcccacatgggtatctgagccttcagagatatctcatttggtttggggggttgtttttggtttttctgagtctcgctctgttgcccaggctggagtgcagtggcgtgatctcagctcactgcaatccccgcttgcagggttcaagcgattctcatgcctcagcttcccaagtagctgggattacaggcatgcaccaccatgtccagctaatttttctgtttttagtttagtcggggtttctccatgttggccaggctggtcttgaactcctgcctcaagtgatctgcccacctcagcctcccaaagtgctgggattacaggcctgaaccactgtgcctggccgagatatcccattttggataggggagcctgggacatattctcaacttccgtgggtctggccactacttatcagaagtttctgctcaccttacacaactgtgagtgatggccaggagcagcctcagtggcccaaggggaaaaacctctggatgaagccctggacccctcacatctcagcctccatcactgcccctggctacccaaagtcaagcccagaaacacagatgtgagcacaaacccaggcagcccatagaaggcacagccctgtgatgtcaagcttaaaaattctgggctacttttaaggtcaccagggatatttcgaaagagctgaagctttttcctccatccaagaatcctctatcttccaggttgtttttatgagctgaagaggaccctccacggctcctcggtgacttagtagtatcaagacaacacctgagaaagctcctttcatgcaaatctctgtctcacgcatgtgaagagaccaccaagcaggctttgtgtgagcaacaaggctgtttatttcacctgggtgcaggcgggctgagtctgaa

SEQ ID NO: 61816 - DNA, 2164 bp, Homo sapiens
acattctcaagggtggggagagaattgcaaagaaccttcttcagggtgggggagattacaaagtacattgatcagttagggtggggcagaaacaaatcacaatggtggagtgtcatcagttaaggctattttcacttcttttgtggatcttcagttgcttcaggccatctgggtgtatacgtgccagtcacaggggctacgatggctcagcttgggctcagaggcctgacagtctccttcctgcctgcgacacaggtctaggaattattccacagttgggcactcttggtgtattattgttcatgccctggcccccacctttgtgccgcatagagggactccccttcctgaggttaatgattgggaaggtgttaaagcaggaagaactgcaagaaggcactcgtgagtgagcctatccactcattcctggaagataaacaaacgaccagtgtggctctccatactcagagggtggtttctggatgtcagagatttcgccacacaccagctctgtgccaggccttgtgctaggaccccaacatggtcactcgatattcacacagtctagcagtctgccaggactgccaggacagaggaccacagactgggtggcctcaacaacagaaatgtattttctcacagttctggaagtgagaagtctgaggtcaaggggtcagcagggtgggtttcttctgaggcctctctccttgtcttctgatggctgcgtctcttctgtctgcacacagtcttctatgtttctgtgtccgatctcctctttttataaagaccccagtcatattggattaaggcccaccccagtgaccttatttcacccaaatcacctctttaaagactctggctccaaaagcagtcacattctgaggtactgagggttagaacttcaatgtatgaatttgagggaacacaaagttcagcccattacacccagcaaacactttgctaggccctgctgtgacccgggtcctgggcttggcactgggcatacagtggaaactgcaaatctctctttgttctatttgagcttcagcaactctccggaaggcttccgcgttagaaaaaaggcttacaaatacacaggaaatttgaaagtgagtagtaagtccacaccaggcccagacagggggcctgtgctgaaaggtgcaggaagcagcagccctgctgagacacacaggagccggctggccggccgctagcagggtgggatggggagtgggggctcagggagcctgggctggggagaggcatcctccctcttcaacagaatgattgggactttctggcagcataagcaataaccggcaggagaccaagaaggcgccgtttagctggctcatgtgtgagtgagtgatgaaactcaccctctggcttggcgccttatggaactatcaactctgcatgggtgtgctcagtgtggaccccaaacctgctccctctggctttgagaggtatttctcccatacaggctggcttcagccagggggttgcctagactcgcccaggcctcagacgaggggaaagggccaaggccggctgccactttctcatcatgtgcctgcctcccttcccacatagaagggtcaagcccaaattagaagggtgggatgatggctggtgcctgaggacagagctggggctaggaggacaaactcctgggctcctcttcatgtctgggctacaagatcctggcataaacaggggctcctggcacagcggaaataaaccatgggtccctgagggagactctgggtgagaaaagagacccagatttggagttgaaagacctgggcctgagtcccagctccatcacttcccagcacgtggccttgaacaaatcactcaaggcctgcagacctcggtcagtcattagtaaagagaagattactattatagagaccccactgggctgttttgagggtgaaatgagaccacgtaagtgaacgcactttgaaactatccattgctggtcacaaaactaacgtgtgtacgcatctatttactaaatagtcatataatactcacccgattcatatgctactcccagtgtttttctctactttttattacaaaagtgttcaactacagaaagaagtttaaaggatacaatgaatttccatattccctccagatagactcaataactgtt

SEQ ID NO: 61817 - DNA, 2473 bp, Homo sapiens
attgtgtttattctccctaaaccagccaagcaatcccatttggtaatcgaaagagcaagtagcactggcttggtcatttccttcacataaacctgactgaactggatatatggtaaggatttccatcttgtacataaacacttgtccacctccgtgattcacacaattccttttccactctatcccgggcccatgtctccatcctgcccctgatgctggctctgcaggcattttctacatggctgtctgtgtacatgccgtgtggttagtcttaaatcaagggctcctagagtgcataggacataccagtttatactttttctcatcaggaatatgtgtagctggaggattaagaaatacattttcatgagctagacaataacaaaaattaaatggcaaaagtccttgctgtccttagtagctagggagctttaaaaataaatacataagcacctgtttccgtttttttactcctacagaagcagggaaattgctggagaaaaaaaaaaaatgtaagtccatatattctgtactgtgtcccttggaagaataaaattttaaatgaggtcatcaggaagtgcttcctaaatgtgaagttcacagactgaactttgaagtttagcaatggacttcccctgagcaaggtcggcttatgctattgttagaccagcagctgagcctcccccaccacgtccttctacctcttgcaattaaagcacagcccaggcaggtttttcttaaacaggatttttctttatgttggtgcatatgctgctgttataatagcagggacattgtcctcattcccagctctttcctccaagtcaaaacatttagaatgacaccacccaaagaataagtcttacttgaggctttgcaacctctaacccttcccacctctaaccttttcccatctttatccccgttatcttgggtgctttcagttttcagagaccagctttccaacagggctaaataacactctatggtttctttccccatcagaaaccaaagaactccctgtttctcagcccttgccagcagaatctggtcacccctctgcccctcaaaattacacatcttatacaactagctcctgtccctgcaccattcctgtcccttgtccttgatcctggtttcccagtggaacaggaaaaaggttttacagagggttttttgccaccatctctttgttcctcaggagatgattaagttgtgcgttaagtggggaaaaagtacattaggtcaaccccaaaatctgccatcgataacatcagagtatgtccatggctttattagttttctagtgaatatttaagagaaaaaggtgctaggtcatagaacattgagaaggctatacatctccccttggctataggtgcaatacattccaagagggagagatggtagtcatgcctcctatttttttaggtgaggtatgtattttgtagttctgctgggacaaaaacagctttcagtcattgaaaaccaaaggcccagtggacatcaggaggagatggcctccctcactgcaagacgacctctgggtcaaagcctagtgaaactttggcttttcccagcaagcaggaagtgacatagacagtgtctttttagagacctcactttggagaatgctcagtgaggggcaaacatttgctggtgacattgtagttctgtcctttgctaagcttgagtgaaaatcttttggagaatcgacttttttctttcttttttttttttgatgtcccttagagagctcacaataaataaataaatcaaaacaaagctaaaagttcataaaaaagtctcaggcatggtccagattttcaggaaaccagcagtttctggaggaagtcccacccgctcctgaaaacagaaaaaataaacgagagagagtccaccagcaaacaggtgtttagtcttctctggagtcatattaagcaatttttacatttatggaaaagcaaacactccccccacatagggtgtggcccacactgggattgaaaatcagcctcgtgctctgcaccgtgttctggtggcttctgcagctgtcacaggaaggaatccacacccgtccccaaggacgcctgcacgggaacagatgcccgctcccttaccccttgggggaaggacagaggtatctgagggattcagccctgggcactcctctcagcttcctccttcacaggcggggccctgggaggccctgagtggggccactgcgttgctatgagatcagaacggtagccagttggtgggtgcagcaggctcacacctagcaagaacctacctctccctttttcctaagaagggaaaacaactctcaaggctcaccctggaggcccaaagggaaggctgtatgggtcccgtactgcagcttccaagcccacggtggttacgtctgagcaccctgtagggctctgctctgaaagtcttttcagctcccaatgagcattgttcaagccgatga

SEQ ID NO: 61818 - DNA, 12903 bp, Homo sapiens
ggtcaggggttcaaaactagcttgggcaacatggtgaaactcggtctgtactaaaaatacaaaagttagctgggtgtggtggtgtgcacctgtagtcccagctactcaggagactgaggcagaaaaatcgcttgaacctgggaggtggaggttgcagtgagccaagactgtgccactgtactccagcctgggcaacagagtgagactctgtctcaaaaatggggagcgaggggggagcccaccacacaacaaaacatatagggcttctcatctaaagtccgaataaaagaataatactatggctggtttgcactggaggaaagaaaagccctatcactgctaccttacttttctgatgttttgggttcctatgtcttatcccctcaggaaccaggggaaaaagaagattctgtgtcaagtgcaccctacatctgtccatgtcaccccccttcttccaatcagaacaactcatttcccccacttgactgctcccctaatctttgcaccttggagcaggatgtgtttattgattgatggatatttacttataattggtacctcttatgaaagccaacagtttttacatctggcttttaacacagactgtgctcttcaatagtcttagtgtagactgaaggtttttcaaattcacatttttagaaaagagttccattaaattccacatgaacaacagaaaaaaatttaaatgggacattacagtgatcaattatagattgtaggacatgactgacatgtagggctgggctgggaggaagagacaaagaccaaatgctcaaccaagggcagaggtgaggtgtagattacgggtcagaaccgtaacataacggatggagtcccaagtgaatccaggaagttggaggaagcaggtaagtacttgggttaggcattcacaggcctaggaagtcagctggggcaggaaggctcagacaaggcaaggggaccaggaagcttggacccgtcctgggaagatagagtccaagagggcagtcatcaccggtcccacactaaaagcatcaaagctctctaatcttctgtcttctctactctctctggtgtgttgtcaaggaaggaataggtacgtgggaaactagggagacaatcatagccctcgatgtctaccgtttctaattaatacagggcagaggaattagatcttttggtagagatctaaaattcctctgaagttctatcaagccccatctcctgatgattcagtgctagttctaaaataggaaaacttacttccaaaaccaacagatgtttgggctgtcatcattatgcctgtactaaactcacttgtgatttcactgtgaagtcctgtctgtgtaatttattaggaatcatttatgtaagattatgtagaaaatgttactagtcgtgagatatctatccatctcaatgatttgacttttacagcaatgcgatgggacgtgctgagggaccatttggtcaactttccacctaatggtggtgtgattagaactcctagcgggtgactcatagagagtgattagaagtaaaaaggttctggaaattcccccacactctttaaggcagcctttgtcaggtgtcttagtttcgtgaaaggtagactgatgttttccatctggtatacaaaacattttctaagtagttatagaaccttgaacaagccacttagctctctgggcctgagttttctcatcttataaaattaaatccatcaatagatcacatgatctctatggcttctttattctaaggatgtatggtaattttaaacacttggttagccatcttgaccaaactagcatcacaggtaagaaacaagctgcgaagaccaaaattcttctctggtttatacactctgggtcagaggcaaccactttctatgttgtttgggctacttttccctaaacacataatggctttgtctgcatcaaaggtcatcttctattttcctgcccattcatatgaccccataagaccttccagcatctcagtcagctgagcattttacctcctgcaaagcacatggtttccttcttctctttgcaggtcatatgaaatgctcacacagtacttactgtaatcacttcgtaaagttgattttcacatatcttcatccagaaaattatcccaactgttatatataactttattctaattgaataattccagttttcaagacacttttcagacacccattgtcttgtctgaatcctcatgacaacctcatttttttatagattatacagcattcctacttatatataatagttataactttttattcctaataaactttggcatgacgtttcatcagattctgatagtttcttttgtttttcattcattgcattcccatccaaatgtttactgaccctgggaaataaatccagtagaccaatgaagcatgaatccaactcacagagggtggttagaactaaaagctgaaatggacttccgtgatcacctgacccactcatccctgaccgtaggctcttgttcacagcggccaaaacgtgcatgtctctcaggggcttcctgcttgtggagcagaacctttgcttgcgggctccttgtgtctgtgagctcctcagaaccgctcttgagctcacagtgcctgatttgcacgtattggtttccgctccgttgcttattctggtcccctcatagaagcaatgttatcctttcttcaaacccgtcctttcccagagagctttgcagccacttttaccgggtttaatgagtcagctgcagagtttatgatccggtactaggccttctgggaagcagctttcctgggcttacgtcaggctgttaaagaccctcctggccttcctgccgacatttgctcggctactttttcctcctaattaatgcctctatcttatcagagtggcccattctcaaatgcagtaaatgagtccttgatgttctatgttttattttggaaacttcccactctgctcatatctgaattggtatttgctcactgttgcgcagtggtttgcctaccaggtatcccttacatcaaatcctgtccgccgcttagaaaaaccacagctaaaagttgtttggcaactcttggtgttcacagggttttcccactgagggtcagggactgcacagcggttgagagcttggactccggggtcagctggaactgcttctaacacaaggaccgctcttaacaaagaactgaggcttcctaaacttcagtttctgggtctgtaaaataataggacccacttcctataaatgttgagaagattaatgggaatgatgcatgtaaaatgctcggtacatgataaaagcccagtgattactcattatcccactcaatgcttggggaaaggcaaagcagctaatattaccccagattatagataagaatactgggttcaaaagagatcacttggcttacccttgtctatactgcacctgcatgaatcatggacctgaacccaggtcacggccacctcccagacccttgctctctctgcttccccagcagcgcctctcagagtgaacacctatgtccatgacagtgattcccaaagtgttgtccccaaaccagcagcatcagcatcacctgggaacttgttagacatgttagggtctcaccccagacctaatgaatcagaaactctgagaatgagggcccacaatctgggttttagcaagatctccagaagattctgatgcacacccgtttgagaaccaaagctccatggaatactaatttgcctttggatctagccctgccgcccactcgagatggatggtccacaaatctcaatgtgattcctaacatgagttaagctgtccaaccctgtgacgttatcaggggatttgtgattaatacatagtgacaccatttaactgtggcagaggttcttacccttggaagctcattagaatcatctagggaacttataacagaaaggcccaccccagaccagttcagatctaaagacagcctggactgacaaccacagaactacagagctgccacccagactccatggaactctgctaggctggtaatatttttaattcattaagggtttatgtgtttaacaacccaggtccagtaaattggctcctttcctccctatgaaccttggacactctggctggtcaagcctccacctcatgcccacttgtttgcacagctactaacgtttatgaagtatttgcttaatgtacctaagctccactgcccagagctatcccacttgatctgaaaacgtcatgatgaggtatggtaagcattaaacattagttcaccatagttctatttttttctaataacttaaacggcttcagggaacattttgtgtgtgtgtgtgtgtgtgtgtgtgtgtgtgtgtgtgtgtacgccttaagagactggatctcactctgttgcccaggctggagtgcagtggcatgatcgtagtttactctaacattgaactcctggcccaagtaatcctcctgcctcagcctcccaaagcactgggatcacaggcatgaaccaccatacccaccctaaggaatatagttttttgagcatgttggagtactcagaactctcagctcagctcttggcccacttgggtctcaaccatttagagtactgattaccaaaggaagagcacaaaggaagaaaatcagcttttctcctcttcctcagtgtgggagaggggatttggcttgggctcaaagccatagtgatgctttctgctccaccccctttcaattaaagatcaccagcttcccaaaaacaggccaccctcattttccaacctggctcaggcagggaagctgagaagcttggggctgcccattcacccagtcaccaggcagatagacaggtaagagaactgggaccttcaggcctgccctcgggaggactggccaccaggctttacagcccagagcagagaaacactgtggccgttgcaaaactccttgagtgaagtgaccctaccctctactaaaaacgtggcccagtggattccagttactaacaaagctcgttgagaagatgcaagaaaggaatggaacaatggctaggacctccccgcggcagcacttcccccaagagaatagaggagctgatgggcacgtcacatttttctcaatgctggatgacattccatcaccttcctcatcttcatggaatttttttttttttttttgagacaaggtctccctttatcacccaaactggagtgcagtggtgcaatcatgcctcactgcagtcttgacctcccaggctcaagggatcttcccacctcagactcctgagtagctgggactacgggtacataccaccacacccggataatttttgtaattttttagagataaggtttcaccacattgcccaagctggtctcaaattcatggcctcaaacagtgcttcgggttcagcctcccaaagtgctgagattacaggcatgagtcaccgcacccagctggaatgcattctttgaattttaaaagactgtaaatgagagatttgttcagagaagagggtgtttcctatgtacaaaaccaaagaccagcttttattttttattaggtattatagtcacaaaggtatgaaagggtatatagtaataagtctaagaaatttttatgaagtttttgaagtaaaaagcatttttataaaattttaaataaaaattttaataaaattactcaattgttaaatgtaacttaaaattactttttcataaaattactcattttataaaacacatttttcctactttgaaaagtagtacatgcttaatacagaattggaaaagacaaaaatacagaaagaattgcatttaactccttttttttttttttttggtagagacgaaatctcgctctgtcacccaggctggagttctgtggcgagatctcggctcaccgcaacctccgcctcccgggtgcacaccattctgctgcctcagcctccccagtagctgggactacaggtgccagccaccacacacagctaatttttatatttttagtagacatgggatttcactctattagcagccaggatggtcttgatctcctgacctcgtgatccgcccaagtcaaaacttcagattttgccaaacaccttgaaagtatgagtagatagaggaagactcgtccttttgtctgcctccttttcatcttcctaatacctaacacctctctaatctttctagaaatgggtaagaaaagcttccataaagaaaggtggagagaattgaagcatggtagtatttttgcaggagaaattataaggtttgaaatttatggaggcctcaggacatacccaatgacctaaggtctaggccagagatggtaagtaggattttttttttcttttctcttttttttttttttttttttgagatgcggtctcactctgtcacccaggctggaatacagtggtgtcatctcggttcactgcaacctctacctcccagattcaagcgattctcctacctcagcctcccgagtagctgggattacaggcactcgccaccatgcctagctaattttttttgtatttttagtagagatgggggggggtggtctcaccatgttggccaagctggtctcgaactcttgacctcaaatgatccaccagccttggcctcccaaagtgctggggttacaggtgtgagccatcacacccagctgataagtagctttaaacacaagtgaggattctattccatcaggaatggctgctttatgcagaagaactctaagattacatcaggctaagggtgacagaatgctgtaatccattagccttatctgtcatggtcatggcagcagcaagaggcagtctgagtgccatacactgcagtaatctaggggtgagctgaatagtgaatggagatttgcctaaaagaaacttctggagtcagtgctccaaaactctgaatcaaccaaatgaatgaattgagccaaatagaaatgcatgactattcaatatttattatgtagagaggcttagaaagggcaggcacctggagttcctccaccctcctcacccaatcacaactgcccttactgccctaccagtccagccacgtgccctttcccacccctctcaatgacccttgggctccccagtgaagctccctgagggcaggggacatagctctttggggccataaaggcattagctcacccttctcagccccttacacatttactgggtacttagatcaggccaagtgtggtggctcatgcctgtaatcccagcactttgggaggccaaggtgggtggatcacctgaggtcaggagttcaagaccagcctgatcaacatcgtgaaaccccatctctacgaaaaatacaaaaaattagccaggcatggtggcacgtgcctgtaatcccagctactcgggaggctgaagcaggacaatcacttgaacctgggaggcagaggttgcaatgagcaaagattgcaccattgcactccaccctgggcaacagagtgacatttggtctcaaaaaaaaaaaaaaaaaaaaaaagaaatcttagcaggattacatctgtaaccccggcactttgggaggccgagggaggtgaatcacatgaggccaggtgttcaagaccagcctgaccaacatggtgaaaccctgtctctaccaaaacatacaaaagttagccaagtgtggtagcatgcgcctgtaatcccaactactcaggaagctgaggcatgcgaatcacttgatcctgggagatggaggttgcagtgagccaagatcctgtcactgcactccagcctgggcaagagagtgagactcttgtctcaaaaaaaaaaaaaaaaaatcttgccccttccctcaaggggctcacagcctgtgggagagggaaaatagatataattatatttaaagaattataaaacaaattgtataaatttaaaattataattaaatcattgtaataatttagatcagaaaaaataaaggcaagtaagtgccaggcatggggctaagcattgtactcacccactgtattccatgttgtcttcacaacggccttatgaggtttgctagtattgcccccattttaccaagaaactgaggcttagagcattcaagctagccaagggctaagccatgactcaaacccaggtgtgtctgactacggctgttactaagaggggaagggaatcatctgaacttgggtttcactcagaaaggggcatggttttgttaactttgaaaacactaccaccctaccctctagcactggcagaggggagctggacgcctggacagctggggagggggaggacggcagccagaagcaacagcctctgcagtcccagcagctgggacctcatgcctcaaccaaggatcagcactgggtattggctcagagtagtgaaggctgctgggggcctgtgtttcctgcatttcctatgtttatgctgccagggtgggttttatgtgaccagagagaagcagggaaaattgctgagaagtcagagatctgccagggaatcagtgatgagccccaggaaatgctttttgtctaaaaatatgccatttccgaaaggaaaacagtcattagagggtgtgagaagccctcgtggtgaggaaagcaaaactgtaagactcaatgggaggccagtggaacaacagagaagcccattacccacccacttcctgtgcgattaacaagacgtttggaggatgaaaggcaagcagacaaaatgacaacccacagacacaactccaggggaaatgtctggggacagcataggaagacgcagcagggaggtaggaggagaaaaaactgctccagttaatatctttctggcatcggctggttcagctatagatttggctaaaattacctgtgtacttactagacgccaggcagttagggggctttgcttaaatcactctcctgcattcttcacacagcacttgatgaaggaggaaagtgagtcttggaggttaagtgacttgtccaaggttacacagctgggaagggagaaagacatggctccatcccaggttccctgatcccaaatctccccctcattgcaatgtaccaagctgcctccaataagatcaagagtcttgacgatccccaagctagtccactcagtccagttttcctgccagactatagctgttttgcattccttatcttgtgttgaagcaaaccaggtaaggaaactccccaccttttttattaatgactcattttcagccaaaacacattgcagccacatcaggtacatgtgcccactcagcaaagacgtactgtgagaaagtaacatctaagttacttggtccaaagcccttctacatcaatcatcaagcaaccaaccctcctttgctgaaatctccaggggactaggccctttggtgggggaagaggggacggtttcttcaggggcatctcacccctgggaagtgcatcctctctgctgggggcagtaaaaaggctttacgtgggccactgtggctcatgcctgtaatcccaacactttgggggcccaagcagggtgattcacttgagcccagaagtttgagaccagccgggcaatataaagagaccccatctccacaaaaaaatacaaaatttagctgggcttgatggtcccacctgtggtcccacttacttacttgggaggctgaggcaagaggatcagaaggtcaaggctgcagtgagccatgattgcaccactgcactcaaacctaggcaacagagctagaccctgtctcaggaaaaaaaaaaaaaaaaaaagaggcttttcacgaatttcacattccaccctccaccatctttgatgtaggtaatttatcagcattttgtagaggaggaaacaaggtctcccctacgttgagcccaaatcagtttgaccttggggaacacagtgagcatccctgcgtggaggtacgcaggatccctgagggtgacaaccttcgaggtcgttccctggcctctctgcccagggtgagcatcctcagagacctcagctctcctctcagcatgcaattctcctccactcatggccctcccagctgcccctggcttctcaaagctactcctgcatggaggcaagtacaactagccaatgagcctcctgacctgccccatcccagagagcaactgctgctaggtcctcgtggattctgggcctctgtccagtgaccaaaggagaggacacatctccagctaccatccctccacctattttctaaggaaaccaatgagttctcaaatgccacctgtggtggccccttctcagccctcaccctgagaggccttccccaagtcagaatttcccacaggggaagttactgtgggcttctctctccttcccccacctcatgtggtcaggaagtccagctggctttttctcctgtctgtctctcaaatgtgtcccctggctcccctccattgccactgccctcttcagtgtctggcctgtgctcccacaacaacaggcttgaagctggctgccctctcccctccatcttccacaccataatccaggtgatccttctaagaggcaaaggtaatcatgtttcttccctgctcaagatctgtcaaaagattctgtggcctccatagaaaaggcagacagcccggccacccaggcccttcaccatctgcctcttgaccatctccagtgtcctgcagtgtcctgaatataccttttccctgcctctgcccaacacactcccgttctttcaacacccaactcaactattaccttctctccatcagatcttccctgaaccaccccccagaaacaaaggtgactgtcccctctggttccccacagccaccccaccacttacccctgtgctcaggcactcctggagcactgcattgcaaccattggctcacacatctgtctctaccagcaaaccactaaaccgtgaataagtggcttcctgagccaggccttgtgcaatgaatggatttgcaacaaagggagccactgagagattacatgagccaagtcatggcaattagtccccatggaagcagcagctcagggcagggtccagacttgggcagacttaactatgcaggacattccattaacaataagcaccactctgagcatttcctatgtgccaggaactacgtgaagctctagattctgtcattagaaaggactgagttaattaatggaaagcaggtagcacagtgcctgacacagtataagcactgaacacacgttagcaagaaaagtgacagatcatttacgggatggttcttacaccaggcagcgtgccaagcacagtccatacattgtctcactcttcatgacaaccttaggaagagagcagtcctgtttgtccccattttacagaaaaagatactgagtcttggctaggctaagcgatctgctcaaagtcttcagctcggaagtagtggatttggtcttccatccccagtccatctgctctggcacccaggttctcagagtctctggtacagcagggtgccaaagtccagttgagaagaaagcaggccaggtttttcaggcacagcctgatgaaatatccaggggaaacacatgggactagcaggcttctttttctgtcccatttagtctaatatcacatttaacacaccatcctctaagggacagaagtcacaggaagccatgcagtctggttcctcctgatttctcctgtgtgccacatagttatgcttccttctgggaaggtgtgagttggagtcagtcccctcctgcatgcagctggggaaactgaagccaacaccattttagttactcacatggagctaagacaatcatacaaaactcaggcatggggtcagcccaccagcagtgtggacctcaccctgccggctgcgttccaaatgacagtggcatggtgccacagaaaaaacgtgaggtgtgcagctggacccccagaagccctgactctgccaggtgctagctctgggacatcttgggcaagccatttggcccgagtctttttccccacctatgaaacaagccagagagctcattcctcacaaggctgtggtcagaatgtgcctctgtacttgagaagctgtaaaatgttcctcagttgctgcccttagtagggagctcagaggaaagctagttttgcctgtgcgtttctgtcggattgccctgtacccagggcacgtcctgctctctgacaacaatcagggtcattctaactcaaatcaaacaacctggtctcagaactggtcttgcaccaccatggtgttaagctgccttcccacttcatccatgtttgctaagccgggtgggatctttcccctacaaactcctataggcggccacatttttcttttaaagatattttcccttcgactatagtccacaggcatcagaggatgaagctagcaggttgtctgtatgtagactttcttccagggaggaaagcagctttgctatctcctacctttttaaacaaaatctgccttgattttgtctgccaagatatgtctttggatggggtaaagcacttctgagggaagctacgtgagccacgttgtagctggagagagaattgaaagaggaagccgagctgagaccaccacagttccggggctggagcccagctttgcagaatgcctgcatagcagtttgaccccaacagatgaggctgttagggacagaaatgaaaagcactgagagaggggaagtgtgggtggagcttatggacattctatgagccaaagcaattttgaagtctaatcatttggagggaaaatatttgtcatgtcattttaaagggtacaaaacaacacagaggaaaatgaaagggttagaaaataattggagcgcttctccctttacccttgtagaagacagctctccggttttcagctccactcattctgtcctccattgga

SEQ ID NO: 61819 - DNA, 615 bp, Homo sapiens
attctagaaatcttttcaaatcagtacagagtgtttctttagtcaagctgcaaagtattccattgagggatatgtccccgttcagttatctagacactagatggacacttgggatgtttccagtattttacaattacagacaatcctgcaatgaatgaccttgcattaatttcatttcgtaagtgtgcagatatagccacagggtagagtcccatgcaggaaatgctgagtaaagagaaaatgcatttgtaactttcatagctgttgccaaatccctctccattggagttgcaccattttgcattcctgccagtgtctccatcaaggtgtgtggtcacactttttaatgtttaccaatctgatggttgagacttgtgtctcagtatatatttactttgtatttttcatcttaggagtgaggttgaggatcttttcatatgtcaaagggccattcatattcctttttctgtgaaacggctcctcatgtccttggttggcccattttttgttctgtgggttgctgtccttggtctccttgatttctaggcattctatagatatcggggatattcgccctttgtgttatgagttgcaattattttttctcactttatt

SEQ ID NO: 61820 - DNA, 3091 bp, Homo sapiens
aagaaggaagttgaggctcctactggttaagcaagcttcccaaggccatacagctaataagtgttaaacaatcaaacacagaactgactggctccaaagccagtgcccgccccactggccactccactaccctgcctctgccattgctccctatggcaacctggaaactgtcgggtacctgcccgtggtctgaagtgggcaggcagcagtcagctgggcctccagatatgggtggtgaagggaggatacaggtccaaaagaatatcttaggggaaatagtgcacatgcccagaaaacttttatagtctcagaacttagatgtgcggagaaatcgaattctggtcctggtttgcttttttagccagttgtgggccttggcagtcactgaacccctccttatttcttcatgaggaaattaacatgcctaggataggaaccgctgtgctgcagaccccagggtcaggcaagtctcaaagaagatgagagtcaccaagcgcctcaggaaagctgaagggcacagggtgcatgctgcagccatgacctcaacctctgtgagtctagaggtgaccatattggccacacataagctcaccttccccctacatttcataatccttccctcccatcagggccagcctttgattaaaattcccaagattatctgaggagctggcggtaccacccaccaatggagttcatctggctgcctttacaccagccaccttatggctgggtgggcactttcctattcttcggccaacacaacactttccaaactgtgtgacagttgtttatttacttgcctctaccataagaccatgagctttttgaaagcatggtctgtcttattcactgttaggtatcacagtgtattcacaatccctgacacatagtaggtgcttaataaatgtgtggttgaatgaataaatgaattaatgaatgaatgaatgaatgaatgggatcagggtgggccttcagtctctaaaagcatacccaagagccagccctctcagccgcaggtccgcacatggggaagccctagggaggttcaaggactagatcaggcccattttctcatcaggcagcccccaaacctctgccccaaagagcacatccaacatgctttcagcccacactccccacccacggtttactgcctgtaatcccagctactcgggaggccgaggcaggagaatcgcttgaactcgagaggcagaggttgcagtgagccgagaccaccccattgcactccagcctgagtgacaagagcaaaactctgtctcaaaaaaaaaaaaaaaagaataaccttgggctgtttggccaagttaatgcttaatgctttcctcatgctgcaagcgtttatctttgcccagattccagctccagggaggggaacattcctgcagaacagccaggcgttcccaggtcacctctgctctcactctcacttttctttttgcatgattaaatccggcctaaaaacacgtctcaggggcacatatctgtcactcataataatcctataaggtaggtactactgttagtcttattatatagttgagacacagagaggttaaataactagcccaaggtcacacagttaataagtagcagagctgggatttaagccaggcaatctggctccagagctcggtgcctttttttttctttgacagggtttggctctgtcacctgagctggagtgcagtggcacaatcactgctcactgcagtctcgacctcgctcaggtgatcctcccacctcaacctcccaagtagctgggactacaggcacgcaccaccatacccagctagagcccaagctcctaaccgcttctgctgtgcagtaacaagccacgctcagggcatgggcccaacttgagtttcttccatccacgggtccagactggaaaggaagcagcaatcttctcttcttttctcactgagtataaggcacccaattcatcttctggcagctgacctggaggacggagtggccctgattttccttttacaggtacaatcactgccaatactaaagcagtgcctgtccctacctgccagggcacccaggatccttgtctccagcagtaacttcatgaggtaggtggctctgggctgagacaggacttgcatattcctagatcccttgactgtgatgtcgaaggtcctctgcccccacccctccttctattccttgtaagcttcacttggcaattgtgtagtttatgtctggtacaggaatgaaggataaggtcaaatgaagctcaaagccaggagctagatagtcatgatatatcaaataaagttttggaacaagaacacaatgggattaatttgccaatcaaaacagcgcttggcaacttgactgtaagccaagatctctcatggcaagagcagctgaagggcctgtgattgtccagctcctggggagcctccctggcctaaccgtggtcagatgccagcatcacagcccccttagctgggtaaggattctcctagtgctacctctgggagagaaagaaaaaaatctagtctgagaatgacaccagcagacagcagctctgccaggtgtttgaagggtgaaggtcatgggactctgtttttactaccctggtcaccccaattgtttcggggtattttccatagacaagaggatgccccagtcagctgtcttccgtgattcaagacccagtctactgtcttctgtgattcaagacctgtttcctcttgtgccgatcagaggccttatttggaggcatcggcctttatgtggcatggaatgtaagccctctgagctttaacagagataggaagagtcctagaacatggcagggaagagggtcggaacctctgtcctccagcacagtagaaggatgctggcttgaatgtcaggagagcccagagtttctacctggatgcatggtttggggcatgtcaggtggcctttctgggtcccagtttcttcaactgtgacataaggaaggtagactagatcatcactaccaataaaaggtccctggtccttggggagcagtggttggagtgggagaagggcatcgcccagctattttccaacacatcgtaaaaga

SEQ ID NO: 61821 - DNA, 3050 bp, Homo sapiens
agaaaaggttacggcgaggttttctagggaaggatcagccctacgtgtttcttcttcctgctagttcactgatgtataataatatccaaaagctaaaaagcacatctctcttcccctctccttgctcctgcgtaacccttacccctgctttcccattagggctggatgccgcgggacctttgtttgagggaagtgcccccagcaatcgtctttctccagatgatgccaattttgtggatgccattcatacctttacccgggagcacatgggcctgagcgtgggcatcaaacagcccataggacactatgacttctatcccaacgggggctccttccagcctggctgccacttcctagagctctacagacatattgcccagcacggcttcaatggtgagaatgaagtcatgggccgggagcaccggcctacatttcaatggggcctctggaattcagcggaatctaccaacatacgggactcagggaagagttcagcaaggataggggcccagggtgtatggtcaccaagcccacccagagagaaggaatgctggagtgggcaagggtgcctgtcccccagcaggccactcctggcaacaggccaacgccacgccctgaggatgaacagagggcaccaacaggaacctccacttctcactccagccccatgtgcccaggcaaaccctctcccggggtaccagctcttctgagagttgagtccggatgcctgtggttattcttccttctctggaagtttcctcgttccagggaccgcctctattctgaaccacatgaggatccacttaataggttgtggcttctcgatgaaggtctcactcttcatcccaccccatcagtttaattgaggaaattactcagactgtcccaatgggaaattcagcttcaaatatgtccttgttatgccctttacctcagggcagacacggaatgtgctgttatctgggttgtgatcccacttctctctcaagtcctaaaaccgaaatattaacatgcacattgataatatgcacaggattaaagaacaaaaatgtcagcagaagcagcacattccacgggcattccaaatttcttgctattataaaatatcaccctgattaagacatgccaatcactccaagccaagtagagccctccacccctacaagccacctcaccctgatcatccaacactcagctgagaacacactctcttgtgatgacaccatcctcgcctctccaatatcagagtgaccttcacactccgcatcatctcattttggctggactcccagccttccaccgcccaggcctgagagagccttctgggaacttgcccttatcattgcttacatccctcccacctcccccactccaacacctcccctccagccaccagcagttcccagctgaccatccagccctcatcccaaacttcaccccacccaacaaagctcagtacagaccatcaggatggtgtatgggctttattttcctggtaaacacatttctgaccaatcattaccatttgctcttttgtgctaaacttcaaagtgacggaaccaaatgtaggtattcagcttgcccaagcttgggctggtttttctcagtcgtcttcacccctgtgtttgaaagggttcctggggtagttctcccagccacagctgcacaggggctcactggataactgcagattcaccttcactacctcctgggtggatgagcttgggtgagttagtggatgtcttggaagctcagttttctcgtcgaaaacagcggcctcaaggagctgcagtgaagatgcaggcagtggaggagcggagggcacgcagcatacacagcctcctagtaggtgcccaaggaatgcagccgctagcgtccaaggactgcagtgactaatcttggcatttagcctccagacaactggggaaatagcttttggcaaagtcacctgtgctgtccctttacagcaagtgtttcacatatcttgtggtggttcctcaacatcccttgagaattatttaccacagattaggttaaaatttggagagttaaaaaaaaaaaaaaaaggtcaaatccttagtagatcaacctcataagcttgttttgggggtgaggcctgtccagatctggttactgggcaatgtccttccaaatccaattcttgtgctggtttcacaggcctgttacctaagggatgcaatggctgctttgggacacaaggtagacattgtcgagaggcctcagcgttctccagaccatcagagtgccacgggattgtctcgtgtatctagttatattaagagaagaggagtcccacgcaagcctgttccagaaaacccaccctccaggcatcagcacctgggcattttaaattatctcatttgagatagaaatatttctataataaattacactaacctgctctcttaatgaatttgatctttccttagtgacttgggtgcctattaaaatgcctactgtaacacgctgtcataaaggagtgctctcaggatcccggcagtgcccgggattttgcctgacactacatgactcagagggtctacttcccttagtttcagtcagttgtcacatcctgctcttgtcaaggggtctgccttgacaagcccacccttgcctgttctgtgtgctactgctaacctcctgtgggatgagaaccaaggtgatcctctgagttgaggctgctttgggttaaggggtgataacgtccttcttgccctgtgttccagccatcacccagaccataaaatgctcccacgagcgatcggtgcaccttttcatcgactccttgctgcacgccggcacgcagagcatggcctacccgtgtggtgacatgaacagcttcagccagggcctgtgcctgagctgcaagaagggccgctgcaacacgctgggctaccacgtccgccaggagccgcggagcaagagcaagaggctcttcctcgtaacgcgagcccagtcccccttcaaaggtgagtgtggagctggggagccttcagaagggcaggatgcagtcccctgtccaaagggct

SEQ ID NO: 61822 - DNA, 509 bp, Homo sapiens
aaaaaaaaaaaaaaaaaaaaaggttatatcattttcctgcataaagccctcccaatgacctcccacgttttttggaaaaagtccaaaataattaccctggccttcaaggctcccagtcaagcccctacttttctccccagtcttgcctcccattactctctgtctgtcactcactaggccattgtccagctccacccacggagtgtccgcccagcctgcattttatttttaatttttatttatttatatatttattggagacaaagtctcactctgtcacccaggctggaatgcagtggtgcaatcacagtcattgcagccttgacctcctggggctcaaacaattctcccagctcatccttccgagtacctgggactacaagtgcacactgccacatccatctaattcctaaatgttttgtagagacaggggtctcactatgttgcccaggtttagcgtgcactttagaaatgcctgaggagctttaaaaactagccctgcctcagcc

SEQ ID NO: 61823 - DNA, 2064 bp, Homo sapiens
gcaaagaaaaaaacagaaacaatacattacatgaaatagatattttctaaattatcaaaggctacagacactcatccaaagcattcctcaaattttttcaatcgttgcttttaggcacaccttgaggtttttaagtttactctggggcaagtcaaaaagcttacctaaaataaagcactttaagcaagaataaaatgatgcagctggtcctagaacacaccggaaataaaaatcgttgtcttcaaaacccgaaacaagaaatgacatgcttttagcaaatttgactttcatgtgcaggggggagggggcactgttttgacaatccactaactacactgtacatctactccacctgaaagtttaacgaaactcttcaagttgggtcacccagggaccgaacttctactctaagagacccaatccagcctacaaatcaaagaacatccccaaatggtttacccttctcccgaccaaaccctttcccctgggcgacagaatgttttcaagaacaccaacacaccctcctgtgatctctctccaaacacaggacacaggaagaaccgaggccactagtctcagataagcgggtgatgactgctgccactccacgggcggcccctctgcagaatggggtcggtcaggaccggcgcgccgggtaaagaacaatacacgagcccagctgcaaacaacacaacttcccacgagtctgcgcggcgggtctcggcggcggagaggacttcggaatccgccaccgggcaggggctgggggaggaatggtgagcaggatgagcgctgaacgaggacggcgagaccgccagcctcgctgcggctgcctgcaccggcgcccgccgagcagactggagggatgcagccaccagcctgggttccaccgctctcaccaggcgacgcggatgccccgacttcgcttctctgggaggcgacccccgcctcccggggccgccagggcggtggggggcggggaaggcctcgccggaggcttgggagcctcctcggcccgccaccgaagggaaagcggtcggggcgcgggggacaatagggagcggggagcgcggcccgccagagtggcgccgctggccggctgggctgactgacgcgcacgccgcgaggcgcgactgggctccgctcggcccggccgccgctccgccgtggtcgcggcgcccccggcgctcgcagtcgtgcctcacctcccatccccgccgcccaggagaggagcagaattaacactctcagcaacaccatcttccgctgccgctgccgccgccgccgcctcctcacgggttaacagcagcacatcgatccggagggagaagctgaaggggcttggtccggagcctccacgggaagccgggacctcccctggcaggagaaacggcgaagcacctccctctcgctccacttcaggggccggcaacgctcctagctcctccaaaacagggacctccctccccctcgttcgtttccttcctcctttccccgctttccttcccttgctcgttccctcttctctccccccctccttcgaaactcagacctccgcctccttcctcaccacgtgacgcgcgggcacccaactggcacgcggagccgcgcccctacctcccgcccctacccgtcccccaggcgcttcaggggcgcgcgcatgcgcgcgggggacggttcccgtgctgctaggcctgccgccgcttcctgtccgccggcggagagctgggattgggcttgggaggcggggtttgtcctggtcccgccccggggcgggagcgctcctacgcggagatagtgctccgctacgtgttagagctgctgaggaccttcccttgggctaaaatggtccgtggaagatgtaagcagggctgctttcgacttcttaacgtcacaagtaacagaggttttttttcttctttttctgcctctcttggtgcaccacagctaccaagtaaacaaaaagtcccaacaagcagtaattatagcggcagctgccccagtgatgcgaacataaatgcaaagaccttcaagcagcaggaaaaaaagacaccatgtccgaga

SEQ ID NO: 61824 - DNA, 2437 bp, Homo sapiens
tataagtatgtattaaaaaatagcaataagaaaaaaaaagacagtaagctccatgaagatataagctccgtgatccactatggcatctccagtgacagacagcatccagcaacttacttggtactaaaatgtattaaaggaatgaatgaaatactactttgcaatcttgtctgccttctctaaccaacagaggtgcaaaaatatcacattctaattatgtatcaggtatttatatgtctgcgaaggaagacctgtctcgttaattttttatccccaacagcctagaaaatgttgaaagaaaaaagatgggggaaaaagcccttttctgtaacaagttagaataggacccacatacattttgttactaacaaaacgtccagcttgtctttcttctttgaaaactgcatggccttaagaggagtccattctaattaggaaaaaagtcaccttttcagaagcaggcgcttcccactccatgcaaagtgaagccaagttagcaaaaccgcaaagacttggctaattcaaatacaagctaatttattattattggcgcaaattagccactttcttttgctacgcatgtcaatgtccacaatcataccgaccctttcctgtagggcgaatgtctcaccagtagctggtgagaagcacagctcttctcagccaaaaccgacagagactggaatttgtgcagtgcagtaatccaaagccgtcgagtagatatgcctgctttaaaatctgcatctcgtaagaaatgccttaattttccatattaggagctgagaaaccaagtcccctgagcccttcagggacaagttcttttccaaatactacaaccacctccaaccacccaacaatgcctcaggccgagggtgggccacacgcgacccagcgctaaagggtcacagccaagctgtccgcctcctgccttccctttaaagaagccgcacacaagggagctgcccgggagttcaacttccggccacatagtgagaggatgttttcctactggagctgagccgcgggggcgcgccccccggccgcgccctcctagccacgccctccacgcccggccttccgagagcgagctcggtcggacgcacggaaagggctgggccacgtgggcggctgctgagtggttcgccttcgcctctcagcgcgcagtcaggcggaggcaagctcagagcgcacggacagagcggtagcgcgcgcccgcgcgcgttcttagtactctccccggtgacgtgcctgaccgaggccgcgccagggcgctgttgctgccaatacagctgtcatggcgtccaaggcgctggctgcggagaagtggccgcggtctccatagagctgggggcgggcggcccggtatggagagcagccccgagagcctgcagccgctagaacacggggtggcggccgggccagcgtcagggacaggttcttcgcaggaagggctacaggagaccaggctcgccgctggtgatggtcctggggtatgggcggcggagaccagcggcgggaatgggctgggggcggcggccgccaggaggagcctcccggactcggcttctcccgcgggctctcctgaggttcccggaccctgcagctcctccgcgggtttggacttgaaggacagtggtttggagagtcctgctgccgccgaggcgcctctgagagggcagtacaaggtgaccgcctccccggagacagccgtggccggagtgggtcatgagttgggtaccgccggagacgcgggagcccgcccggatctcgccggcacctgccaagcagaactgaccgccgccggctccgaagagcccagcagcgccggcggcctcagcagcagttgcagcgacccgagccctcctggggaatctccgagcctggactctctggagtcgttctctaacctgcattcttttcccagtagctgcgagttcaatagtgaggagggagcggagaacagggtccctgaggaggaggagggcgcggcggtgttgcccggggctgttcctctgtgcaaggaggaggagggggaggagaccgctcaggtgctggcggcctccaaggaacgcttcccgggacaatctgtgtatcacatcaagtggatccagtggaaggaagagaacacacccatcatcacccagaatgagaacggaccctgccccttgctggccatcctcaatgttttgctcctggcctggaaggtacattctgcagctttctacttcctacagcttttggggtggaggaaaacggggtgagggagctgctgcatgtcaggtgatggcttcctttctttcctcattcatcagtccccttcttacatgaaattcattccaagacttccatgttgaaggaatattcctttatacatatatcgaaaagaattgcccctaacctcagtcttctcttgtagtgtttaagagttcaacattca

SEQ ID NO: 61825 - DNA, 2872 bp, Homo sapiens
ggaggtataatggcataaatgcaaattaagttcaccaagtcaaacaaagtactaaacataaaggttatagaattttaatatactaaagaaaacagcaaggaggcaaggtaaaagatttggtaggaattccatcaaaactctgccaattgtggggcaaggtagacatgtgttaaactgtattttattcaggtcttcacactatgaagcatcattacacaacttgactttgtaattttttccggaagcaataaagaactgttctcactttctaatcagcttcagccgaatcttaagggctacaagtcacccaaagcctggcaacagtaacttttcttccttgacccaagaaggcagactgccagagggaaatagcaaagagtagcactatataaacagggcaagaggcacaagagcagaggcaagttatataaccaaaatatattttaaaacatgttcataactcgtaacaacctttgcctttagttggtttcttgtttggagtatcagttgaaacagttaattcaatattatctggatcgcctccttcctcttcaatagcctacattagaaagagaagttaatatgctacacaatctatctaaacttattttataaaaacgaaatgaaaaaaaatttagcaaacctcaagcctcaagacattagaattgccagtcatttcatcaaccgacttcaaaaatgagcaattaaactacacgaaagagtgagagaaactttcaggggaaaaaaatcattaggtatcaaaatcgcaaggagttttaaattctaccgtgtcaagataattaaatatcacatcatactggccaaaaatccaaatatgttctattgcagaaaagttgctagctactaaagtaaataactaaaaagagttttcctagtttctgtaatgcaaacttactgctcctctgctacaattccaacgctcactcaaaccagaaagctaatcaggaaagaaaaagtaattattgcgctgatgcaaaaactaaaagcctagtggaaaacaaaaactctgtcacccacccatcaactcccactaccaattccccctcaagatggggaagaaacggttgggcacaattaaacggtaacttcgcagaagtcaccaaagtaaccattccctctgaggccaagaaatgcacacgctcaccatggctaaaggctggggagccagcgcctcccaggtctccgcgatcgcccttgggaggccgcgccggccggccgcaaccctcgcagcctggcggggacgtcccggggaggcggaggcacgctgggctgcggtggccggtccctcgcaggcccggcccggcccggggcgcggggcgggggcaccgcggaagggtccccgtcctccacgctcgcgggagccgcccctggcctccctaccatgccgttccgcaggtcccagcggctgcgggcagccggaggctgcggcggaagcggggcgccgaggcgcggcctaagttccccttcccggtcctttccggtcctcgccgggcctcacctgcttgagtcgggagatgagcacggtcttgactccggtgatgtctaagttccgccgcttcagctcggacttcagatcgatgacccgcagatcggtgatctttttaccttccgcctgacccgaggcggccgaggctgccaccgcaccggtagcggcagccatcttagaagagcagcgcgctgccgaggcagcgagtgggctgcagggcggcggcagcagcgccaacttccacccaggcctcggcggccgccggcgccgcgcagcgctgcgcacaatgagccgctggcccctcccccggtccgccaccctagcgcaacctgcagcagcagccgccagcacccggatgacggccgcgcgtgcgcgttggcgcagggaccggcagcggcgcgctcggtcgagcgggccgcggccacttgggcggtgcgctcccttgtgtggactgggaggtcgggcacgtcctaccgcagcaacgtccgccgcgccgccgttctctcgtcgcttcgttagccattttcttgcaacgtcttgagtcttgagcaacaacgatgtgcgggcactgaatgacatagtgcgcgcgttactcaacacaaaccgagggggcgcgtgcgcgcgctgaacctctcaaggaaatactttatcagttctgctgaataatcgaaaaattgtcgccggtgtgcaccaacgaactaggttccccgagttccattcaaaagacctcaaagcagttctagggctgttagtccaaagaataggaagggctggcctttgacacatggctcattggctgtctcaggagaaaacatcatcgccctgcccatggcagcttaggttattctagggctgcccttcctcacttgaaaaacaggaaaacttctttcttgttggcctcaggtttgctatcctccccggtagacctgatggctcaacacgaaattgttcaatgaaagagaaaactagcttataagtacttgttgccgttatcatatactgtgttcactattttgccccccaaaatttgggattccaagaacagtgagcatcttcttatggaggatcggcctgtacaagtgagtacctatttgtaattttaccttgtattattcattatcaaagtgcaagcattgataaaataaaacgattctataaattccataaggtgattatgatgcacaattaactatactgtatttcctggttttacaacttaaattcctgagatctgactcactttaggttactttttctgattggctcaaaaaaaaggaagactggacattataaaagaatacctgacattagggtagttctttacagtttataaggcactttgacgtacagtaacccccttaatcc

SEQ ID NO: 61826 - DNA, 2115 bp, Homo sapiens
aatgatacggaaaatatgagtgaacaaaaaaagtattgaaaaagatgagttgatggcaaagggagggaattaatgtttagtgaacacttaattggcaagtaatgttcagagcattatataaattgtctcatttaatctaacaagaaccttttgaggtaaatacgttatcccaatttatagaggaggaaactaagatttataaggatctcatcaatcagagaactcttaagtggcaccactggactttgaaaggaagtctgcctgatggactctgaagctcatcctctctctatcctcctaatgcatataatgacgcatttgttatctactgacttttataaaataaacaaggaggcttatgcgattgtacagcccgagttcgcaggagatatgtgaccacttttgatctgattccggaagcaaattcactttaacagtgaggtgccgtgatctttatgtcattagcgcatatgatatgggtatcatttgttgtgaaagacactaacccatgatgtttttgtttacgtatatctgtaaatgtatcaattctgtagttggttaatttttagttacgaaaaaatgaaccaagatgtagtcaagatttggcttaaatgttgaacgcataatcaccaaagaaaattaaataatgagctttgtgacacctttcagttcgccaacagactgataaaaccagtacaaagggggagggccgggaccgagggggcgggacggtgagaaacgggaatcgagcaagcgcagaaacaaacagatgttaatggaggcgtgaaggctactgcgctctcactttccgaactgtcgtaaagagccctagtgtcgtgctctcctcggtaggggaggaattggttaggcggcggcggcggcgaagcggcggcggcggctgtaggggagcagcggcagtggcggcgacggcgaggaggtgttcggtttgcgcagcgtagaaacgcccgcagcttcagagaaggagttcttgtgggaccaaattaggcattctgaacccacgccggcttagctgggccgagtccaggcgctgccgcacgtacagttttggtggcggtgacagacactgttcttgactctaggggcctattaggccgacgtctgaggcgcagatcgctggctctcgacgcattactctttacgccttacatttctgtcttccttcctgggtcagtgattcccggaccctggaagagaagagggtggctaatgattaaggtgaggggaacggggggggaggggatccattggaggccgcgcgtgcgcgcaacgggggaggggccggcctggaggggagaaagaggaagggctgcggccgcggaaggctggggtcggtgaccggccggttatctctggctcggtggtgacttagggtctgggtctccgcagacgatttgtgtttgggcaaggcattcgtctaccgacacacccacagcctacagtgagggagtgtgggtgaggggatttctctcccacttccgactctccctagagtctcaggatgggggctgaggaccgaggcgtgggagtgcgatttgacaatggagtgatgaaggtaacccggacccggggagttggagggcgctaagtcagccctgacggctagggagtcgcctgctgctgctgtgatcaaggaaacgtagtccgcggaacagctgaaatacagacgcgtcagattttgtatggagttggcttgttggtcatttaaaaagaaactgatgtttttactattgtccttcgataatttatcagagtcagtgtcagtgctatagtgggaatatctgttcagtgcagcagaaatagatttgttacaacagttcttaaataggttatagtagatagatctttacagatgggtatttctcaacctaagttttgattattcaaaaaataccagaaagtatgaggtattcatttaatttgttcgtgtgtgtgttgtggggtgactccattgtgttgttgtaagctttcctgtttcttgatttatgtgcggcattaatttagaattctcttgaatggtaagatgccagctgacatagactacgttttgtaggatttcctgtagcttttgaatgtgacttaatctaaactttattt

SEQ ID NO: 61827 - DNA, 847 bp, Homo sapiens
taataaagacatacccaagactgggtaatttataaaggaaaggggtttaattggctcacagttccacatggctggggaggcctcacaattatggcagaaggtgaatgaagagcaaagtcacgtcttacatggcagcaggcaagagagagattgtgcaggggaactcccatttataaaaccatcagaccttgtgagacttactcactaccatgagaacatggtatgtgggaaactgcccccatgaattatgtccacctggccctgtccatgacacgtgggaattattataagtcaaggtgagatttgggtagggatacagccagaccatatcattctgcccctgccgcttccaaatcccatgtcctcatatttcaaaaccaatcatgccttcccaacagtcccccaaagtcttaactcatttcagtatttactcaaaagtccacagtccaaagtctcatctgagacaaggcaagtcccttctgcatatgagcctgtaaaattagaagcaagttagttcctagatgcaatgagggtacagatgttgggtaattatacccgttaatatttcattccacataacttatgcaaatttctgagctggtttgaatttctccccagaaaatgggtttccttttttatcacattgtcaggctgcaaattttgcaaatttttatgctctgcttcctctcgaatggtttgctcttagaaattacttttgcatataccctaaatcatctctctcaagttcaaggttccacagacctctaaggcagaggcaaaatgctgccagtctctttgcatagcaagagtggcccatttactccagttcccaagaagttccttgtct

SEQ ID NO: 61828 - DNA, 1886 bp, Homo sapiens
aattcttactgtttacatattacccactttcagtcctcctacaggaaaggggcttggtaatccacaggagaaaaagaggtcgaaggaaccacagcacaattggataggaaggcgtagaatggcagtacgcgcaaaccatgggggtggggcggggcggtgaatggagttcactggaagcaagaggccagtgtcaggggaaaggagcttggtcctttcatggccagcttactgaagagcagccaaagagtttcccttggacgtaaagtcagaaccctttacagtgttttttggacaaataatagccatttgggtggaacacttggtcattatcattacctcagatgtttgttttcagacatccacacatcatagccatgcttcttgcccactcctgtgatagttgggatcaaggataaaccctgacaagcagtggtttaaacaatagacggttttcatctccgtcactcaacagctcatgcaaaggcaattcagggccaacgtgccagttccatagtgcctgggaacaaacacctcctacttacctttaaaggtacagccagcaatctaaaaccccaaaaagcacttatgaaaagctgctcaaaagagctcttccaagtcattttgaattaataaagtctaagcctcctggcaccctagcccaggtgtaagaacccggctgcattaggtagagtgcatgcaaaagaccagagtaaaacaagaagctccactttttggcctttggggtgaggaatgaaacgccttcctgttttggttgtttgctcaaagctttctttggcatgtctggtcatgcctggtggcctggctgaactgtggcaggatggtgattattcaacagggctaaatgagcccaacacaagtcaccttgagtggtttaatgggcttagatttattaggagtttcattactattataacgaaaaaagcaagcaggccaaaacttcaaggtcaattatcagcatgaatctagaaatgagaagagatgtgtttggacactttgactttaaccaacaactccaaaatcccctcccttcaatgatccaggcattggagctaggcagaccaccttcacccaggccagggtctcagctcattctgctctccttagcccacgctcctgaacctgaaaacaaagctttcgtgtttatttattctaaaaagtcagacttatctttggacttcacccctgacttattcctatgctgcaattccttacagatgtttgacgctgtaagctgtgttgaaagacctcttcctagtctctggtttggatctgcccttgtttttttattcctctgtctttgcggcttactgttgtattgctgaaaacactagaaaatctgttttactctcttcaccaatatatcttttcacagaaatgttagttacaaaacaccaaggaaagtcctgaaggagttttgttttttttttttaaagctgaaaaggcaatttccaaggatagccctgcctttatttaagcttttataaaagtctttcctgattatgaaatatatgctgcttttaggaaactggaagatacggaggcgaatcaagaagaaaataaaccttgcccagaattctaccactcagagaaaccagtggcaccagtttcagaaccttcttaacttctctgagaaagcccggacgcagatgcaggcctcagcagtgacgtgtccagctcaaagaagcttcacctgacccgcagatgcaaagacccactctcctctcttgtgtcccaggaatatcctttaaatcacgctgggaacacttatagtaaggcacatgtttactcagctgtctgttcccccttccagaatgagaggagcttcctgaggcagtgactgtgcctcatccaccttcgaataccag

SEQ ID NO: 61829 - DNA, 2534 bp, Homo sapiens
actacagacaaatgacaccagacgcctggctaatttttatatttttttgtagagatggggtttcgccatgttgcccaggctggtctcaaactctgcggcttacaggtgtgagccaccccaactggagttagtaagcagaattttattttattattttttttcaagatggagtctcactctgtcactcaggctggagtacagtggcacgatctcagctcactgcaacctcctcatcccaggctcaagcgattctcccacctcagtctccctagtatctgggattagaggcgtgcgccaccatgcccagctaatttttgtaaataagcagaattttaaaagcacttaaggcaggagtatccaatcttttggcttccctgggccacactggaagaagaagaattgtcttgggccacacataaaatacactaacacaaacgatagctgaagagcttaaaaaaaattgcaaaaaaatctcataatgttttaagaaagtttacgaatttgctttgggccacactgaaagctgtcctaggccgcatgtggcccatggcctgcagcccacaggttggacaagcttgacttaaacccagccaggattcagagccatgtcagactagagggattatgaaatgtggctacagacacctaatgctggcaattaccagtaatcttcccccaaattcaatgcaaatgacaaagttcaccaaaaatgttcaaacatgaactactaaattatgaagggaatgaaaaaatagggacctacagaaaaggaattcatctgactaaacagtgaaaacatgtttattatacttactgcaatcccatggaagctcaaaagttttatgatatggagctctattatatagagttataaataaagcaagataaagcagctaacctgcttgctactcagacacattaaccaggctgtgacatcagtagctgttgcaaaaccactgcttatcgaccgaaatccataaccacagcatagtctcatatcttccacgcccactgataaggatcttcttcatacctgataatgacgcactggttctctctgtcaatgatcatgtttctgtacatattatctgcaagggcatagatatgtggtgggttttcatactgtgcctagaaaagcaaaaaataataatacataaataataataaaaatttaaaaataaaaacaaaatcatggtcagataggcaatacactcaatttcttttcctgaatttggaaacgaatcgtgcactatagttccaatgcctatcattacatcttaaaggttgcatgatacaagaattcataaaacttcctaggtcatcaaggttacaccctcacaaaattaagacggaatttggaagcagtctcccgtaggcatatccatgattcagccttccggatgtgccccgtgtctttagacactccaacaccccacccttccacccatacacgcctctgcaggtgacagtccatttctaaatgtttctgtagacacttgggcaacaggtctttggagaggcctgccaaacacctagatctgacttctaccagaattctaaactcttacataattttttctaagaggccacgttgtagattctggggcctcagagggaattaggtgagattatctatggatcagaaaaaatacttaaatctttccataagaagagggcaagaaggtgtggttctttaaagggataagctagtttggccagtttgtttcatctctattggaaaaaaaaatcctaccacgctaagatattctcctgggtttgtgatttcatcttatgggatatcttagctatgcacaaatatcaaactaaatacattttccatgcttaataaattatcaggctgacttcagccctgctttatacaatttcttgacacctacctttaccacaacctcaaaaattactaaaaagagaaatactttgttgagtatatatggagaaagaacactcctagcctgtaatcactccaagctacttggtaggctgaggcagaagagttgtttaaccctaggacttggagtctagtctccacacacacacacaaatttaattagctgggtgtggtagcacatgcctgcagtcctagctacttgggaggctgaggtgggaggacagcttgagtccaggagttggaggacgcagtgagctacaattgtgggaataatagcgtccaagctgcaagtctcacagtgtaaatgacggatgggaaagcaatttgaaaagacagagtgatatacaaaggtgaagcttaacgtacttaatccatctttggattaatttacttaatccatttcattgtgcagtgacttactgtagaaaagggggcctggctgagaagttgctgctcactgccatgctctggaagatgagagtttggtggggaggggttaggatgagggggctttgtatccgatacccagtgttcttcccatgctgtaggcagggggctcatagggggagctacccagtgagggctgcaagctatgcctaggactggtcacctaaagaaccctatg

SEQ ID NO: 61830 - DNA, 3668 bp, Homo sapiens
tttgacacagagttttgcatgtccatgactaactctcacaatagttccaccaggatatctttacatagttgcatcaaacaaaattcctatagaacttaagcaaatatcacagttccctgttgataatgaagtcaacccatatttgaatcaaatttccattctgcattttttaaagccccataaaaaatggcatccggcaagctaaaattgaaacataaagaacaactgaagaacgtcaagcattttcaatagtccatcttcacttctcacatttcctttagtaaacattaaaatgcagaaaaactggcaacatttttaagtcttttaagtgcagactcaaatgtctctgctttgcagtcaggatgcattattgatagaactctttgcaaaccaggacttcctctaggaagagcagaggtttcagataccacgtgcatgactagagcatgtcaaagggacgatattatagattaaagtagatgaatactggctgcatctttactttgtgaaatgccaggagaataaccgggcatcatctttgccctttgcacagcctgaaccaagtgatataaacatacaaaacctcattctgaaacggtgaaaacaatgtgagcacacagcatctgttcggactttcagatagctcttctcaagccaggaataaagccacaagttcagtttttatttttattttttataatagagatggggtctccctgtgttgccaggatggtctggaactcctgccttagccttccaaagtgctgggattacacacgtgagccactgcacccagcataaagccacaatttaactgtggacactgtaatatcacttagaaatgtccaaagcagccaataaaggatacaaaaatgtagtcatccatgtatctcttcttcagattctccacgatggagttctctgtgatcttggacagtagcaccatgtcgtccacaccactgtgcttgacattgtggctttgccagtggtactggtagacacctttgcttccctgggaacataaaacatacaattactaggatagtttgttttcccctgtagtaacaaagacaaaatgctgttaatttcccaaatattcttaaaataaaatgtagcagaaagagcagtgcagagaaagattctgcaatcaataagatgaggattcaagttccagctttgctacctacagactaagttaagtggggaaaagctacctaagctcatgtgtccctgaagtgacacaaagtgacttctcttttctcatttgtaaaatgggagacagacccatttcacaacgctgctgtaaggattaaataaaataatatgtgtgaagtgctaaacagtgtcaggaatacagcacaacacacggttgacagtctcggatgagactatccttcaaccatactgttgtgttgaatttgtcggtgaaaataagcaacgacatagaaactttctagtcttgttttgcaaactacatgacagaatccagaaatggaaagaatatgtatcacacaaaggctatgtcacacggtcataatttctcaagtcatctaaattactttcccttcataaacttatcactgtcatacgtgtaatactggctttccatattcaaaagataggctacatttttatgactgatcactgctccaataacgaggatgtggacaggacagacgaaacgagatcacggaacatgcccaggaggggaaggcctcatccccgcatggcccccttgggtagatgaagctgtggccctcatctacgtctgggatttttcagcttcacaccaggggcggcctctgaacactctgtgggctgcagggcttcctttcatttggcatttctgtagtggggtcccccatgtgttcagctacgtgacaagttcttatggcacacttggggagcttaaagtcctatgaagacacctagataatgatggaacaaagtgactcatgagcacttggggagctgagcacttgggcagttcaaagtcccttgaaggacacctagataatgatggaataaagtgattcatgcgtcaataacagtcaacataaacacacacaaaatgggtgttccaggagtggaggttaggccactttgtcctgggagaggcagaagaaatgacttcccagaaaaggagccatttgaagtaggtctaagatatttagaatttgccggaggagaccagaggaggaaggacattcattataatctatgccggaggagaccagaggaggaaggacattcattataatctacacttatcagcaaaaaagctaataaatatgaagtaatggcaaatattacatgacaatattggaagatcctcccttaccttcaaatgcttgcattctactgggagtgtcgccagtgggtaagtgcagtgggcactgcactgggtgagactcgcccctgccccctccctgctcactgctcgggggacttcgaatgaagaagagaaaaattctaaataagggtatctagaaaggccaactgctcagacatcaaaactaggatgaaaaaagggaaaaggaggctttttgagaggagaagatgacaagaaacaagatggaagccattccaaattttattttaaaaatttattaaatggtttacttttttttcgatgggaaacacagatcctttgctaagagcaagttctaagaagctctgggaaaagccatcttttaaaatcagccaagaaggagctaccacaggaaaagtgtacagtgtcatgggctcctgctctggaaagggattctggaaggcctgccacccatgctgtcttgcagaaggaaactctctatatctggcattctcagaaccacatacagcatcaattctacaaaattacctcagacctcaccactccttcttcctcttgtggcaaagcagaaagagaaaaaagcactggccacagcatgactcactagatttccattgaatgcccatggtctacttccagccagataattcccagtgattcctcctctcctcacctccccaccttttccagctttctgggcacccacggttactctgcacagaaaactagggtcccagagtaaccaacctgcagattggttggttggtttttaacccccatagacatctaaaaatggaagcagagttgaataaaacacaagggctgttaataagtacttattcaacttctataaaggacaagaaacagagaagctctgtgtcatggtgcgtatgtttgtattgatccgaagaaactgccttcctagcgtaacccaagtttgtctcagtatcaaacccattggtctttctctgtctcactgcacagagacacattcctgactgccccacctcagaggctgtttcctcctttttctcatggtagttatttcctagcagaaaagcactcacggtagagttcattgattctcatagttccaagtatcactcgatactgaagattcctagccccagtctctaatgctcaaagaggactcattttccagtctgctgtctatataacaaggtgacagtggttacaatatgcaaaggaattagttatttgatttgtggagggtgttctacttactactgcaagcaatcctaggagagaggggttaacattcccatgccatataggaggaaactgagatctcccgactagtaagtagcaaaagcca

SEQ ID NO: 61831 - DNA, 842 bp, Homo sapiens
acagctaattcttattacataccaagcactgctctaagcattttacatataacttatctaatccttacaacttcacgaggcaggaaactgagtgaagcacagagaagttaagtaacttgctcagctcccacagctgggcttcaaacccaggcagtctgcttcagatctttgcccttaaacattgtacctactgcctctcataataaagtaacagcagttggaaacagcaataattctaaagttcatagtaactgctttattgcatgtttactatgtgtcacgtatcaacttctttcatctgcccaatgacaccaccaagtacttgtattatccttttttttacagaagaaaaagaagtaccacgtggtaaacagaatacctggtacaaagccctgcaagctaggagctcacggagcagcctggctctgcacagccttgcataatgcagaggaagttccgtgccctggagtcagccttgggatgatgtctgccccctgccatgtccccaccagggtggtgcctggggcatgggagtgcccaatctttactagctgggtgaataaattccaggctacactgactcacctcacaacatgtttgctgtaggtacacggcagcactgtggcagcagctatcgtggggcaaataggagtcctgggcccagagtctgctccaaggaagaaataagtttccaaggcgttcctatttgcccccaactcaggagatcaaagggaagagatattgcccctaaacacagttctccttctcttaaccatgtaagtagtccagttaagagtaacagatatttgaggttggatgattactattttatttttattttt

SEQ ID NO: 61832 - DNA, 1973 bp, Homo sapiens
gcttcaaaggcagatatccctcattctctgaggtccaaaatcaggaactaaatagatctgtataaaatttttgataaatcacctcttatctggaatctcactacttcctattccaaatagatttggacaaaggagcattccttattcccaaatgtcctacccaaaccccattgaacttggaaataaacagctttggatagtgagagatagctgtgcttggtcacgtcatgccatataccacaaaatgtcctggaaatgccagtatctttgccctcccgctttcaattgtcaatggcagccacaggaactcaagggagaacacaggccttcttggctcccttgcccctgtcgtttcagcccccacaggacgggggtttgactcttcctaacagccagggtttctcttgccctcaggggagctcctccctaccagtcagtgaggttcaaattccttagcctagctcatagcccactctccttgccagtgctatttcccacaatgcctcatgctcctgccaccagtctgcctggggctctttgcatggaacatctgacctctgcatcttagtccatgatgttctcaccacctggaccaaatatcctgcatgttcaatctagtccatccttgaagaccccatgcaaatgctacctctttaaagcctgcaagttcccagattatcggtaatcttgtctgtcctctgacccccactgttggcttatttatatctcctctccctccctttctcaactgtaagtgacctgaggatggggcatgcctcatctctgaactctccttgtcctaataaagagccatgcacataagtggctttataaatgcctgttcaatgaagtaatgaatgagacaaaatcactaaaagttgagtcatcctaggaggcttcagggagatcagatttgagttaggactgaaaaaagcttaagcactgaattgggagagaggaggaaaaaaaaggcattcctgagagggaaacaaggagagtaaaggcatggacgagggtaacaacatcgcttgtgtttgcactgagcttttcaccacgtgaaaaccccctaaaaagaccaactggactagaaaggcggatttgtgttgaggaaacggtagcctcggttaagtaggaaaatagagctgaccgaaggagggccaggaaggcaaggctgagtacttggcactacagacaggaaacaggcagccaagatggaatctccatcagagggtgcagcccaggtcatgcagaaaaactgtcttctttccagagggaaagggaccaactactgtagtcagatccccatccagcgagagaaaataatgccacctcgcatttgctcccagtgtttcacaacttagccgttaatcatcccaggagagtcctaaaacaactctgccaggagggcggagagcaggtataattatctcggtgttacagcgtggaaaggctggcaaaattcccctcctgctttggaggaccccaaaggagtggaagagacggggaaggactgatgtgcaaatttccggtccagctcatctgctttggagaacttacctctgtgtatctgtctagtgtaacaatggctatgtcacttactgcggggttattattaagctgagctgtgagtccctctgtgtgctcaatctcgcctacttagacctaaagagggggcaggaggagggaaccagaaccagcagtggagctagactgcttttaacccagagacagagaaaaaacaaacagctctttaaaaacacaatttctaagcatactaaaaggtagcaattccagcctaaaagcctgtcagcttagcaatgcaccaccctaaagaaagggcaaaattatcaaggcatagaaaagcaagagacatcacgctgtggataaaggaccctgctctatgccaacttctaagtaagacgaggaattacagtaatccagcccacagcaatttcccattttaactgatgctt

SEQ ID NO: 61833 - DNA, 771 bp, Homo sapiens
aggttgcagtgagccaagattgtgccactgcactccagcctgggtggcagagcaagactctgtctcaaaaaaagaaaatgtcaatgacacattttattcaacttgaagtagtaataatgggtactaaactcttccattttatcaaacctcaatagacagaaacctttcagagccttcctctccactggttctaatggatggtgtggaatgatacacagtgcttggatacagattttatgtgtaacaagagatgttttcctgttcctggttttctaaccaaatatttgactgaccttctggtttccaaatggagacagaaatgtaagatagcttggttatttgacgtacaaaacctttgacctaactgactccatactgtagaattggtatttctcaacttcactaccccgatattcacagtagtccagcctcctattgactgccttcatccagaacacagcccctcccaagagacacaaaagggcagctctgggcatgttaggctcccatcccagacattcttcatgttgattcatctgtgtttctctcctaatagggttgttcagtcacccagtttccttctcgttcctatagtcaacttccaattaaaaggtctccctactaagaattttaaaaattcagtccatgtatggtggctccagcctgtaatcccagcagttttgcggccaaggcctgaagactgcttgagcccaggagttaaagaccagcctagacaatatagcgagataccttctctacaaaattttatat

SEQ ID NO: 61834 - DNA, 1595 bp, Homo sapiens
accttctttaaattacccagcgagttagggaggaggatgatgagaaatcatcctcatccttgccaagaattttttcaaataagcaaactatcctgcccaaattcagtgaatgcattactaattaatttcgttctgtgatgtctgttctacatgatgatgatataactttctgcaaaacaaaaactgaggcactctacatctgccatccatccctccccaaactaggagatatgaaagtttgaggctgagcaggtcaagcagggatgtgtctgttttcttgaaccatttctaaccttactcaattatttccaactgaagcatttccttaacaggcaacatgcaactctttcaaagacaatctattaaaagactggagagaaatgatatcatttccctaaaatttagtgagccaggacttgaacaggtttgttagaaaaacactaatgcggtaactctattattgcctctaactttagggcgatgtggtagtcagaaaggaggggtggctagaacagagcctcagccacaaccaggttgtggtgcgttacatagtcccaatggtggtatctaaggcattttataattttcttattaattgtcaatacatcaccacttgaatgaaaagagaatggaagctattcttacttcattttttaacaaatgaaactgaagtacagttaagtaatttgttctactcagttccaggaaacaatgtggggaggagggcctccttccctgatcaccaggcaggctcctgcctttcctcagggtggaagagatccactgctgctgtctgctgactcaccttcacactccagctagaggatacactgactcacagtttcattaccttctattcaccatgactgtagtcgtagacactcagaaatgggagttccaagaactgagcaggagaaggaaaagaatgtagatgaaattgaaaaggataaagggtacagcctctatcattgaataaaccagaaaagacacaggagaatgtagtgtctgccctcagagactacatgcattactgagaggaaagtggggagaggaggcctgatccacagctaaccataattccccaatatgaactgccagataaccagggaatgtcgagagtgtacaggaatgtgggaaggccaaagggaaagatggtgaattctgaaaaatataaagaaatgtaaattatctctgatctcaagaggcttacagtctacttgggctgtaagagactgtgtgaaaacagataacaatgcaagatgacatagtttagtcacaaataaataactctatggtaagggccacaatttggagaagggaatgatctccacgagttaaatcagaggcttccaggaaatgagtctttatttgttgttgttgttgtttgtttggttggttggttttttgttttttgtcttttttgagacggagtctcgctctgtcacccaggctggcgtgcagtggcgcgatctcggctcaatgcaagctccgcctcccaggttcacgccattctccagcctcagcctccagagtagctgggactacaggcgtccaccaccacgcccagctaatttttttgtgtatttttagtagac

SEQ ID NO: 61835 - DNA, 3285 bp, Homo sapiens
tgaattaagcatggtatcacaggtttcggaaaaggcaacctagagtatatttcagtccattcagcatgaaaaatgagtttaactgaggggaagttaatttcctcaaggtaccactcaagtacttaaattcagtaagattctttaagttcttgacataaacacattgatttttttaagaaatattgacccacggaaaatgattacagcaattctcaagtaccaggactatcacactgcttcaagggaccaggtgcccagtgaggtagcttcacccaaacacatgcccaatgggaatggttctctgctggggtgagggaaggggtccaaaagtaacgtagagtagactgacttcttaaaccttaaaactagaagaggaaatgtatagacaaagtgttctcttagatggggcaaaagtgacttaattttggactatgtaaaaagaaaaggctttggccgaggatgccttgaaaggtttctcgttgatgtttgtttgtaatcattctttggaataaacagcacggggcaagggggcttctgagctttgtgtgcaggtttcgatgggcctctgctgcacttccctcaggctgctcaccgggatatcgattttttaattagtgttgtgctggttatcattttgacttggcttctcttccacagccattagaaaacaacagcaaaccagaagaggacgagataatccacctaagcaggactacttgaaaagaagcaagtgtggaaactatgaagccttgtaatagatttttttttttttgatgaactgccgatctcttcaaaatagagtccttgctttcgtgccccgcaaagaaaagtacaccacgccaaagcccaagggaggtggctaaggttatacagggagggaggggagtgtagctggactggggagttggaatagcagaaaagtcacaagtcaaagaggcggccccttccacacattcccaaagtgccaaagggaaaacagcaacaaactcgaaactcgcgagggcgtcttcccgtgcgaagcgtcccctggatccccgaaaagccccgatcccctcgcgcttgggaaggggtggggtcctcttcaggaggtgtttacttggcgtccggggcgcggagaccctcggggccggcgcccggcacaggtccggggcggcgtggttgccgcccgcgcccgagtctccctggctcttgacagcccgccggccgccaggtgctcgccctacctggcgcccccgcctgcctttgtgcggcccgcgccgcccctcgccaaggcgggccagggaccgcccccgcccgcgtgccgctgccaggcgggacagctgcgggcgctgccgggcagcggagcggcggcggggaggagagggagtcggcgcgagggtgcccggggcggggcgggcacggccgcggggagggcaggggacgccgccagcggctgcggcgcgagtctccgagcacctcccctgccggctgcgccccccacgtcccagcaggaggaggggaccccctcccgcgccgtgcccctcgcagccgatgcgcccacaccctggcttccgacagctggcagccatagcaacccggccacagaaagtttcgcgacgcagaaaccgacttggaataaagttttccttggcccctcgctcgctctcccccggcccgggtttacggaaagcggcaggaaatcagagctcgcgacgtgccggctcccgcgtccaccttctccacccctggccccggcagcgcgcccaaggtgggtgcaccacgccggggtttcctgccccgtccccgggtccggcgtcctaggacgcggcgcggccaactcaccatggtgactcgcgccgcggtcgcgtcttcgccgggtcccgctgccggggaactggggctggaacgcagtcttctgggcgaacttcaaaagttggttcccctcgccaaaaacaggctcccgacacccaagcactcacaggagccaatgggaacccagaggggactccatccaggcgggattggcggtgctaggtgagggcgagacggcggcgacttagcaggcggggcgcatgctgcggagggcaagagtccactcgtactcgccggtcgccgccggcccaggtgagtccgatgcgctcggagcgtccgcctcgctcccctgcctcactcctctttcttcggccacttaatccgtactcctctggctgagtctcggctcgggccgggcaatctgtccataaatggagaactcagctcaggcctgaccaatcagggtttgttttcgtagcgtcactcctcagggaaaccgtagtagccaacaagcttggagctgctggagtttccaaagatctctggatcctgtagtcctcctcccgcgccagccaccgaagaacgctgcggacccagctcgctcctggtagcaagacccgaactgtaaggaacaaaaccctcgtgaaagaggagcaaacctttcacttcgctgcgttttaagacgaaagttagggtgggtttcgcttccaagttgaaggggcatgattttcccagaacttttttttaagaaggaaatattttatcagcataaaacatcagagtcgtggcagcagcccaaaggaaatcctttttctttcctacgtctggattgtgagcaaagtcaaaaatatcatttccccacccctccttttacctgaatttccttggaaaacaaaggaagacttccggctgctttttcttttcttttttctgtttttcttttctttctctttcctttctttcttgtttcttttttgcacgttttgatggcagaaaagttgttgcacgtgcagtgggcagagggaaggagagaggagagataggtgggaagaaaccccatccaacctcagccaacacatctgctgaaaacaatcagaactgtaaaaatgcattattccagactgtcgaatatccaaggagaagattggggtggggcggggtggggggaagcagaatcttaaaatcaaggtagggagtttgattttattgttctggaggctgaggaagtaaatttggtgagtcttaacaggctgccttcctggaatctgtagaagataaaattggtaaacttcagggcatagagaaactatgaagcataatgatattatgatactttctgaaatttggttgaggcagggcgctgtggctcacgcctacaatcccagcactttgggaggctgaggttggtggatcacgtgaggtcaggagtttgagaccagcctggccaccaacacggtgaaaccccttctctactaaaaatacaaaaattagccc

SEQ ID NO: 61836 - DNA, 927 bp, Homo sapiens
ggcatggtggcgtgcacctgtagtcccagctacctaggaggctgaggcagagaatagctggaacccgggaggtagaggttgcagtgagttgagattgcaccattgcactccagcctgggcaacaagagcgaaactccatgtccaaaaaaaagaagaagaagaagaaattactagtacagaagaaagtttcagaaaactgaggcttaaagaggttaagctaacttatccaaggttacagagttagtagagctagctgaattcagtccacacaaataacttagctcttaaccttaagtaaaccttatcctcctctgtgcctcccacactcacctctggcttcctccctgggatgagtgaggcaagaaggagaatatgagctgtggactacgagaaaaaaaccagagtgactgaaggagaaggaactcctggtccttcctggtgacccagagccaacagagaaatgggtaactcattaaccagagaacagtcccacatcctgtgtgtgaaagaaagaaacattttaaaagttagaaaatgcatttgaacaatgttgtatttaaaccaagctcaagcaacagatgtttctttacttttctttgagacagtgtcttgctctgttggctccttcacccaggctattgtgcagtggctgatctcggcttactgatcttggctgaattccacctgctgagttcaagtaactctcctgcctcagcctcctgaatagctgggattacaggcatgcgtcaccacacccagctaatttttgtatttttagtagagacgggtttcaccatgttggtcaggctggtctcgaactcctggcctcaaatgatccttttgcctcggcctcccaaagtgctgggattacagaggtgagccaccgcgccaggcccagatgtttctttagtatagattttacaccag

SEQ ID NO: 61837 - DNA, 1357 bp, Homo sapiens
cccttctcctccccctccccttctcctcccctccccctcccctcccctccccctttcttctttccctcccctccccctttcttctttccctccccttcccctttcctctttccctccccttcccctttcctctttccttcctttcttttctctcctctctctttctctttctctctctctctctttcttttcctctttaatctcttttctcttttcttctttaatctcttttctcttccactccaggccatgtgaagtgcatccaggagggctgtctagagcaagggggaactttgagtgcagagaggatgtggagctctaaggaggaacctacaggctgtccctgtctttcagcaaattgcatccagtctgagcttcactttgcaaccctgattagaaaccagtttgatcacactgggtctttcaaccgtttgtctgtggctagagttcataacttcatctttgttaagagcccactacctagaacatttatttaatgttagagctcaaaacaccctacctcccctctcctcatcttctttagtgccttcagtctttttcaaaccctagctccagcctaataagtaacacattaactgggttttcctatttatctatcctctcgcattacttctctgagtcagagcctcttctctctaagtcacgggaactgcccttgctacttgtgacctgccctttactcagcagtttttgttctgggaagccctgggattctgctaatacctatcactgtaggtgctgaagggaaacagatgaagaacatgacctcaaggagcttcctgtcaatgagaagaccaagctgacgcctggcaaaggtaaatgccaccataacaaattaagtaaaagtgtgcattagctaatttgtaaattcagcttaagatgaatcctgcttcttgggcccttctctgacgctggtgttgggactgtaggattcctcgagcctccgtcaaggttaacatcaaatcccactggcttctctcagcaccaccttgatgaccctagcttagtttctctgtttcccatgactggaactcttagacctttccacaaacatacaaggatttataattcaaagctcaagcgatgaagttgaagcttttggcccataggaagcctgaactagtgattaggagaaaaagattgaggagtctgagtgggaagagttagctatttgaaagacagcattatagtagtagtcattgtaggaaaactcaggactgggttggacttacttatattatgttgctttatattttggttactgagggaggtgaaggtcatcctttcagttcttgggatgtctaaatagcttcatgactcctgggctgttggataa

SEQ ID NO: 61838 - DNA, 1113 bp, Homo sapiens
ggtagataaaaactccacagagtaggaatacagaatcgtgcatcgtgtcccatttgacaaatttttgagtttatctagaaaatagccctgcgttaaacgtttgttaaaagtgctgatttcaatgttcttacattctttaaaaattccttgttaagtgttctaatcttttagatgtggtatcagccacagaaatttattgttcccttcttgttttgcagttcagaaaattagaagtcaaattcggaagtaactcgtcctagcattttttgattaaaccaccaagtttaaaattcgttccttttgtcggagttcgcacgaagaaagttggaaggcagacttcaaacaacaagctacaaagcacaggaatgagacatttaaaaaatgctctccgaaattcggcaaaactcacagggcgctagtggatgctttaagacattcacctggctgaaaatacggtggtgggctgaagacctcccctaggtgggttctgtgggcgccccgtgaacgacgagcctcccgccacgggacgcgaccatcaccgccgcctcgccgcccttctccggtgccggccgcggggccttgccggcaacggtcggtaacgggcagatcccaggagcgaagggccctcagagactaccccaccaacgcactccgactccgggggggcggcagggagcgcggccctgcttccctccctaaccctgccctccctaacccactacctgtggggaaggcgcttccctccgcggagcggacagaagccgccacgagcccggcaggaggttcctacttctccgaccacctctccagccgccgcagaaaccgcagaactgagctgacgacccggaagtgctcgcggaacctggaagtgacaccccgcccgagggacgggaggccccgcccagccctgctctcgcccgccactcaagccttgtcagggaagggcgtggagagggaaggaggggcgtcgggctggagcttgaagccttaaagtggtggacaggcgctctgctcgagtaattcaccaggtttactaaatcgttcctaagggaattataatttttagagactaatcttctccattgttagatgcacaatttaagaaatgtaggg

SEQ ID NO: 61839 - DNA, 2252 bp, Homo sapiens
gggcttgtaatgcctgaagaccataatagcactgacttatgataatctagttcaagttccgtttgcagaagtggatctgtcatacttccggtctaagcccagcagtattaggctgcactagagaatatgaagactaggaatagagtttagagaaaatgtaaaccaaaaagaactaagaatatgtgcaaaatgatcaagaaactagtctgcaggggtaacttaattgggtaaggtcagttgtaactttgaggaaacatccatttacaaattacagaatttgtttctacaattgcagagattcctataaaatgttagaaaaactacatttaattgaaaatacgaaatcaggtattaggtgaaatagagatcctaatcaagagaaggtgagaatgaaaaaagcaacactaaaatgcaatcacatagtttattcaattaaataaataggaggcaccgtaactatcttgatgcaacaccggaaaagctgtttcgtcaaagagctcacaagacacagacaagtaactctccagcggcatgaaatgcatccagaaatccaaaccattttgccaggtatttaaacagaaagggttgtgtctagattcacgcggggactcggcttttgacgtacacactctgtatttggtttagcgtactagggaagatctattaaagccctgattacttatgctgcttccgtgtctattccccgcggttacgaggcataccagaagtccaagtttctttgttctgtaccaggacggacgctggtcataaatactgaaccatcgtagcccagccacttcacccacaccagggtaaaagggtgggggagcggaggaggggcaaggttccatcccgagcacaactaccagaaacggaaaagcgacggggtggggggccaaactgccaaatacaaacaggacccaagccaagggcggggacctaagcagggcggggatccaggaagcacctcccgagcaggttctatggctccccctaccaagggtaactctctgggtttcctctccccggacgtcgtgggcacgcgcccgacagactttcgcccctaggccggttcccagtccagctccggagccaccgtgccgagttctcccaggccgcactcaccccggaggaagccttggccccctcgtcctcttcgcccctccaggccggcgacgtggggctgacggccaggtcgcaaaaagcagggccgagcggagcccgctcccctcggtcggcggtggagaccccggcccaatcccccggccgcagcggtacggcgtcggcggcagcagctgacccggacacagtgagaagccccggcggaagtgataacatcccgacctcctccgggcgcggcagccggcggtggaggcggcgggggcgtggcggcggcggaggcgtggcgtcttcttgaaacccacacagcatccccccaaccccctcagacgtcacgggctagcgctcgcgcctgcactcgcggggtcggccttccttgcctgtgggcggacccgtcgcgtcgactccttattggtggcgttactacgcctcaaggcgtttcttccctctttgctgttcgcagggacgctgcctggtagtttcagttacttttgttttctttctgcctgcctttattgatcattacagtaggtgaaattatcgatatcaataataatattgtaatacaataggtgcaattatcaatatcaatattattacaacaggtgcaattatcagtatcattacaataggtgcaattatcagcgatcaataatgtgaattataaaatggatgaaataaggggaggaggtcgggcgcggtggtttacgcttgtaatcccagcactttgggagggcgaggcgggtggattaccggaggtcaagagctcgagaccagcctggccaacatggtgacacctcgtctctactaaacaaacaaaaattagctgggcgtggtggcgcgcgtctgtaatcccaactactcaggaggcgagggcggaggcggaggcggagttggagtttgcagtgagccgagatcgtgccattgcactccagcttgggcaacagagcaaaaactccgtctcaaataaaaggaaaaaggaaaaaaaaaaaaaaagaaaaagaaaaaaaagaaataaggcgaggaaaaatatccgaggcatcattttggggagttaggcctcagaagcgaccttagagtttggtaatatttgagtgtgaaaagctttacagcagtgcttctcttcactgggg

SEQ ID NO: 61840 - DNA, 909 bp, Homo sapiens
ctacagtgaaccagtcaaagaaattgttccagagagaatttgtgcttcccaatttcagaaaatcaaattggactgtacacaattacacatcaccgttgtgtgatgcttccacatcccagagtgtgcaagagagaagtagcaatatacatttctaggaaatacttccatccggctgggcgcagtggctcacgcttgtaatcccggcactttgggaggcctgaggttgagagtttgagaccagtctgaccaacatggaaaaaccctgtctctactaaaaatacaaaaaaattagccgggcatgctggtgcatgcctgtattcccagctactcgggatgctgaggcaggagaatcgcttgaacctgggagacagaggttgcggtgagctaagattgtgccattgcacttcagcctgggcaacaagagtggaactccatttcaaaaaaataaaaaagaaatacttccatatacaattagattatagccattcaagggaaaaactaggcttagttgtcagaggattttattgcacagaactttagagattcaactcattcaaagaaatagctaggttataatttgcagtgaagtgagactgagcgttcagatatggacatagtcgtgtttgctgaggaggagggggtgtgcatttcatccaacagaagttgagaaaggctgacactagcttaaatgactcatcaaaaccaatagtgtgaagaaattgtttttttttttttttttttttgagacagggtctcactctgtcacccaggctggagtgcaatggcacaatctcagctcactgcaacctccgcctcccaggttcaagcaattctcctgcatcagcctcccgagtagctgggactacaggcacgccactgcgtcaggctaatttttgtatttttagtgga

SEQ ID NO: 61841 - DNA, 2211 bp, Homo sapiens
gaagtagtaacgcatgtattataatctctgtgtagcagataaagaaactgtgacaccaagtggtcaactcggttggccaagtttctagttaatcaatggcagaggtagaagcaattttccaatttctggatcatttctctgcattttaactaagttctgcaaaaaaccagcattggcttaaagaagaatacaccaggcgtggcccacacagaccttagttagcatcttcactcagaccactgcgggcatgaagcatttcttactctacagccagccgcttacctctgagccatcacctcacagctgggccaataaacagcagagcgtccaggcctcaggcctcacccagctaggtgtgggtgaccctgcaggtcttgcgcctgattgccaattcccgtagatgcccttggtttttagtgtaattgatgtgtcataggcttcatcctgtgatttgttacagcctcattgattaacgggggtttggcagagcccagtgtttttctgctgctttctctggcaggagtgtttgttcagcaaacaagaaggaagcaggtagggatgaaagtacagagactgtcttcccttgtatctcttcccctccgggcatcactgaatcagccagggttggattaacctaatgaggtttggtgatgtgggttccatcacgaccggttcctttagtgccccaggggagctgtcgtgccccttttagctttataaggaactagaggcttaaaagaatttatgaaaagttgtgggtatagaagacctacctgggtttcctagaaaaaacaaaacacaataaaatataatgcagcctgttgacaaaatgaatcaatggcaaccgaagtcagaatagtttatctctgggggtgggtactgacagggaagaaggcatagaaatgggccttccatgatggaaacattgcatatcatgagctgggtggtagttatctctgtatgtgcatatttatatagatgtaagattaagatttagacactttactccgcgtatattatgatcttattaagtttcttattcttaaaatacagcctgttgtaatggcaggaacaccatgttcagggccaccttcttattgttcacattttagttctcgtcacttcttcagtgaggcctttactgaccgtggctagagtagcccaccctcccctctgcactctatccaattatctgagttgttttcttcattgcacttatcatcatctgaaaacggcgtatttactgacgtatttattggctatctctcaccactagcatgtagattctgtgacggcagagtttctgatggccttatttcctgtgggatccccagcaggagacacgtgctgattttctgactgactgcggcggagacacgtgagctggtgtgaggactcagttatgggacaagtgttaccaaaatgagatcacgagatcataggacgctcatggtcaggacttaggactgtggtcaaagacaagagtgagagtgaagcaggccaaagtccaacatactggccagcaaaccaagtggaggtcacagttaggcacgagtggtcaccaggccagctgtgagggcagctcagacctgccaggccaacgctgccctctccagccaaggcacggccctgctggcaggtcagcttagaggtctgagcctgcctcctgaggtaagaacagaccagtggttctcaaccaggagcaattttactttccagaggatagctgacaatatctgaagacatttttagttatcacaactgggggaggaggctactggcatttactgatgagaggccagggatgctgctagacatcctacaatgcactgtacagtccccaaccctccatagacaagaatcagcaaggccaaaatatcagtagtgcccagggtaagaaaccttggactcgagggtagggcagaccccacttgaagaagggagaaatcgcgatctgtgctttcaaagtgtataaacactgtgctcttatgcttttggaggcaaaggacactattttctttctttctttctttctttttctttctttctttctttctttctttctttctttctttctttctttctttcttctttctttctttctttctttctttctttctttctttctttctctttctttctttcttctctctctctctctccttccttccttccttcctctctctttctttctttctttctttcttggcc

SEQ ID NO: 61842 - DNA, 978 bp, Homo sapiens
ttttggacccaggagaccaaacacaaacttgcagatgggccgagaggcgcgtgggagttgtcctcgcccccacatcaaggaaggccggggccacctgagccgaaccatcccctccctgaggccccgaaaccccctcctatttgaccggcgggggaaaccctgtcaccccctcttcgccgagaaaagcgcgtcttccctccgcccagatcggcggagccccgaactctgcgcagtttcaagactagagaaactgcctcagatgtttccaggaacagatcccccccacaccccctccccgcgagggctgcaacagcgcaggggagggccggatctctttacgtcttggaaatctgcagcaaaaaggagccactaatcttcctaccccactcgcctccgcccatccggcaggggctgggccgaccacagcttcccggggttgcggccctgcctcctaggcttctgcggagattttgttgttgtttggggttttgtttccttccagaggctccaggcgctgggagttaggaaagaggctgccaagctgagaaagcgacgctcgtcctcacacagcaaaacaaaactaaaagtaaccttgtattgtttacaaagcgcccagtaatatgtaaacagtgaacttgaatctgtcttgctaggcggacgaacgggcaaagcccacattataagtacctgttgtaatgtgaatgtttactcttcatttctggccaggtttagaaagggagggaagtggggatgggaaagttaattgggatgttaactttccgatgacttagagacctttttagctatttattttattgttgggaaaaaaaaaaaaaaaaaagaaggaaagaaaatgaaataagcccaaaccaagaaagcatcaagggcaacccgggaagaacttagataagctgactggtaacatgaagggatgtcaccggatagctctcccacggacaagtctttctgtttgctacc

SEQ ID NO: 61843 - DNA, 820 bp, Homo sapiens
aacgttttctcaagctcacatggtgagattgagatgtctgtgaaatagccaaatggaaagttacaaggagcctagagtcatatgcagtcccacaagtttaaatataaaaatagaggttctaaagctgatttgatctggagaaaatctgctttcctaatcattttctgtgagtttctactcagaagagaacttttcctttgaagttttttctatctaactgaaaggtaagtaagttgcgtaagtaacagcgctatgaagtggcagagccccaggctgaaacctgggcttgtgctgccaggatctgccctctgaccgctgagtaaagaataaagggtttggagcaccaaccctaggcctgaattccagtcctatgactggaactgtgttggctgtaacgctcccatttctccagagaagctgatggttattgcccaacactgcacaagagtcaggaagagagctgccatacaactgaccggaaatgaaccctcactgggtctctctcttctgtgaaggaaaacttgcccatcaagccagttcttttgcattccttctggaggtcaaaatcccctcccttgcaaaaaccagctctattttattaacctttctttaatgacatttacatattttacctcaccctctctaattcagcaaaccctccctctcactccattctgttctcaaagagttttctagtccttagcaaaaataacagatttgctgtttcagttcccacaatgcacatgtgtttattaggtcctgccttaaagcaaattcaaaccttttctatgatcattttttcacaagcgtcagggatcta

SEQ ID NO: 61844 - DNA, 716 bp, Homo sapiens
gagcccaggaaagatgatgagtctgcaataagaaggaatcttcttgcaaccaaagagaattatgccaccaaaatccatataatggtaattagctatattgcaatggaatgtaaaaacagaattctcctaaacaagatcaggaatgggaagtcttttatttttttttttattatttttttttaaatgctattcttgctctttctcacctaggagaaatgtttaactaagatttcaaagcctagcctggctgcactgctccggagtttggcagctgttggactttggtgtctgtgtgccagttatttgctctgccagcaatgtgttaggataatcacccactgaaggatttcaacacattacatttccccagaagcctttgtctaacaaggtaatttatgacctgttcaggaatctggtctttacaaaacaataaattcacacttgtgctggacttcaaagctgccattatgagcctggtagcagaaggcatcccgcagctgagagccaggtcaacagataagtgagtttttaacgatctctttcaggcaggccagaaagggggcaaagccaatagccactgcaacatttggccattctggttgcaaaattcaacactggaagtgagtccttttcactcactctctacagaaattgggatcagtggaattttggaagggtcggcaaggaaccaggtgttccccatgggaaggtcagtt

SEQ ID NO: 61845 - DNA, 1029 bp, Homo sapiens
accgactttatcaaaagtgggaaaatcagaataggattaagaacaagagatcttttccaaaaaattgtattgaccatgcagtgggctctacccttttttgttttctgtgtttgtgtgtgtgtgtgtgtgtgtgtgtgtgtgtgtgtgtgtgtgcgcgcgcgcgcgcgcacgtttgtttttgtataccccatctgaccacaacagctgttgggtttgtggcacttcactccagactaaaagataagtttgtctgtacctggcctctcaaaaacgtcatttggaaagttgtttcctaatatgaggggttgggggaagggagcagcggaagacgaggagagggtgccccctttctgtaacttcccagctacagcagagacagacaaatctcacactgtaagccgagacaggctggggattatctggctcactcctgatttaatacatgaagaaatgaagcctcagagaagcccagagcttgccctaagccagacagctgaaccgaaacaggaccaacccgctctcctgactctgccctatggttttttccctctcctttaagatgcctcaacctcgagtgaaagtgaaactgcaacttctattaaatcatgctttttaatcatctctgagcaccacgactttttacacggtttcccctcctaggtaattatctaagtgaaatctttcattctgtcctggcatgaggagcccagaaaaatgagcccccaagagttggctcactggcagcatgccctgcaaagcttctctggtttgctaagaagcacttcagagccccaaactcatctttctcatgtcacaaaagagtgactgctcctgcaggaatgtcacaagtacaaaacaaaggaactcgggatcatcagtagagttcagtgttaagaacatgaacttggaaccaaactggagttgggaaaaacttttctttggcccggtttcctcttcttaacaccaaataaacgatagtacctatttcatactgttgttgttaagtgagataataaataagaaaatgcc

SEQ ID NO: 61846 - DNA, 1305 bp, Homo sapiens
aagggtaacagcctttgttgcaggtgaatccaacccagagacaatcatcctgactgtcctatggccccacaggtggtcccagacaccttcgacccagcaggctaaccactgagcacctttaaccctatagactttatttggtggagataggaattgattgatttatgtatctctgagggagagtccctcaaaacttctagtatcaaacccagaattacattataaaatacgtcaaaagtacattaatgacccaccttatctggctcttccagttaaatgcttacttacattcagcctccggttatgctacacactttctcataccctgttcaatagtccccgccccacgttcccttctttaagagccatattctctgttgaagaaatgataaatgaatataaaatcaagtatgctaaaggattgatggatcaccccttccaattatttttttttttcctgaggacaaatcttaatgccaagaccaatgtcaaggggggagtttccggcagagagaccgatggatgggggaagagaggacaaggttgttatctggtctttggacttgcgtagcacattctttgtgccaaacaaacaacttgtgtcatcatctctgaattcatcagtggcaggcagattatttataataaggtgaggcaggcaaggggttgcagcaaatgttctaagtaggagcaaagagtcaccagcaatgatggaaagacagcagaggtccttggataaagtgatgggatactccaagcaccagggcagggcccaccctttaagaaattgctgtccctattgtgcaaacactcctccaagagggaactgagcagagcaggacagggaatgacaggaggggttctggggcatggggagaagggtgatgcaagaacagggcttccaagtagctgggagatgaggtcagctcccggggcatagcagtctcagccccaacatgaccggggttatgagagggggaaaaagcatgagccccaggcacagctcaccccttccccgaggggtaaggaggccaacagagtctcgggagcagcaggaggcgcagctgagtcaacattccatgcccaggccgggatgaaatgagggagggccaggactgaatttctatgtggagttctggaggccttggccaaaggaagaaataaacaacacacaggctaggaagaaggctaacataccttaccttactctgtgtctgtcactatgagaagccaggtgtcaattacatggaaacctcatattacaacagaaatggctgccccccctcccacgctagtgcacacctg

SEQ ID NO: 61847 - DNA, 603 bp, Homo sapiens
aagggaatgccacggggaggtgttgctgacagcaaggtgccagtagaaacctgggggtcatgggtcccataaatcattcaccatatttttcaagcacagagaatatttgcagtttaaaatgatggctggatccaaaaccacaaaatcagcctcctggagtttcctcctcctctctgcgggtggaaaccccaagtcagctcaagcgcctggcattccatggaaaatgtgtgtctttattgtccatggcaaggcaccaacagccgttctgaacaggatgctgactcacatctgccgagacacactgactgcacaaagaaaatggatttcatttgtgtttgatgaaggtctcgggagagtgggggttgacttggaaaacaaaggaaaactgtccagatcctctccttacctagattatggggaagaccacgacttgacttgactaagattactgagcataccagtatcaaagctgagaagaaatcatctttactaaaagaaggtcagaggcatgccacaaagagaggacaatgccacagagttatgggtgtgtacacgtggacgtagttcatttattataataatagtaaccttttgccgggcgcg

SEQ ID NO: 61848 - DNA, 8362 bp, Homo sapiens
aataaaaagaaataaaatacagtgcttgcttcttcactccatcaaatcccctagcaatgcaaagtcattttgcatatgatctattattcgctggaaggaacagttggctttgcgattcactgtttgttaaaacattagtttaatatagcatatttgactaatgagaatgtgtcagtgtgctgctatccttgaaagcaggaaaaggaagtcttggcagtgctactgtaggttacaaacactggtaatacgcaaggaattaatcaacgaacccataccaagcatacgctgagcctgcactatattaaaggatacaaaagacacttataaaactgtgaaatgcagacttccaccctgcaggacctttgagctctcttcccttcgtgcctctgtgacacactgagagtctagtccagggtcacccagtgaattaagtagctgaggcagggccaaaacccagatccccagactcctgggccaatgccctttcaacctcaccacaatggttctttattccaagtgattaagacacagagagaaagatcacagccatcagagcgggattagttaagggcttaacagggaggtgctgtctgcctaggctgagaagggtgaatcaccatgggaggttccagccaagaagcaagggggaaggcctggggagaggggaagaggaataatgccccagggtggcagaagaacaagactacaggctggaaaatgagccacgtccagtggggtgccctgtggggaacctaaaatataagtctctgaatggtgcaaagttaagcttgcctatggaaatactggggaacctatgagccaaaatgattgggactcagtactcatatttatctattcaccaaaacatttgctctggaggcagaattttcttactgaaaacaactactctgacttcagtgtacttactgttttgaatgaaaataaaaaataaagcctacatgctgtatgagacaatttcacctctactcactcctcatcaccgtataaaactcataaatccattaaaaacagaaccactactccttttctggcagacttctctaaagaacatgaaaatggcagtttgcaccactctttccaacacttcaacctcacccagcttgccgactggtttcaactctccaacaagaaaaaaaaaaaaaaatcagcaaattcaatctgttgatgagtacatctacatacacatcagtgccgtgccttccattcccagggagggcagggtcactagacaacatcattaaaatgaccctttatcagagaacgtttttctgtttaaggaaataaactagaggtacagggagactcactgataagagccatacccacctcaaactggtttaaaatcattcactacttgggtaggaaaacaggtcacttggccccaccctaatgaaaagaacagtttcttctgccttgaaaaggctgataaatgagactgtgaatgcctggctaaaaaagctcacagtgcaaggctgatcattaatgaaatcagtgcagttattgagaaacaagtcatttacatttaacataaggactatattatttaggttggtgcaaaaataactgccattacttttaatggcaaaaaccacaattaacttttgtaccaacctaataatttaagggtttgtccttattaaaaaaaaaaaaactctatagattttattgtattctattgcttcactacgaaagtgcagttacaaacaaaaaaaggacaagtgaagcagttttaactttactcccaaaaagaagagtaaaagtttacaaaaaggttaaaacaaacaaacaaaagaaaacttaaaagtcaacacttcaaatagtaaaaacacattctactgaactaaattaagaaccagttccaaaaagcccaaatgttaatctgaacaaacaaaaacatactgcaacagggctggtctgcacaggcaaatctgagtctaatccagaagttttgtggacacacccacttcacagtttaaacgtggagtgttgatgcgttaccgcaaaacagattcttagcaaccatggtgaatcaatcagggactggtgattcaaatgaagattttaaagcaaaaatgggtagaggtgggagtgtggagagttgggttctccatcaaagctcttactgtacacagtcctggacacacagtctacaggccacactggaattttaaactaaaaaaaaaaaaaaaaaaaaatgtactgggtgaggagaggggttcccactgtactccatcctccacccacctactgcatctttatttatcagaacctttttgaaagcagatattcttctccttggttttatggtcttgattaatgactgagtcacagggccaactcattccccagaattcctggaattcggcccagtgacctcgatcaaactgagcaggagggacacacagcacttgctccagcttgtctcttctgtggcctgatctgaatcaatatttgtttgctccctactgacttgttgcagcttcatgctctcacagcctctctctgctggtatcctgatctggggttggagtgggtggaaagagaccggcaggaagaatgatgtcacttggcatgaagcactttcagggttgggaaatccaggccttcaagtctgcaactcaatttcagtgttttatggcccacatattgtattttcaacagggcctggccgcctacagaaaaaagtctaatgtcagcattcaagaccttccacactgtggacttacctacctttccttaaatatcttctatacacacacacatgcatacacgcatcctgcacagaagagttaactggactgttaactcttctccaaacacgctcagcactttctaagttccctccaccaggaacctcaatcttaattagctgacatctgaatgagtctttaggatacaggaaatcataaatgccgcctttctcacacacccctccttgccctgtgcttctgcagctttttgtgtgtctgtgcaacattagagttacatgtgtaaagtctgtcttccgtattatccgcccacagggtttccaacttaactccctcctgtttcctcataggtctgagcacagtgcctggcacacgataggcattcaatttcatcttgggatggtttacacacactgggtctttctatattagaaagtctttttttcttcttttccaacacactctccttcctcaattttctctctccctcagactggacatttcgaatgcagttccagttccgtgcattcagagttggaggcttaaatcaccaacttctgcaaatcttagcaaagcccagcaggtcgcttcagggcagcctcttatcaacatatagccatgccccccacctctgtgctgtcagggatacttggaccctagctctgtccataggaccacatgggaacgtaacctacaactcctagcaagaaggcagcaaagaggcaggatgtacgagtggccttaggactctgatttcctctgagctgtgagtgtatagcctgggtgtggcagggagacaaaggacatggacaaagggctccataacacagtcactccctagaataagaaatttctacaccacacctggggtaaaactcaggccacttgggtgctaccgacctgtccagttgagctcagctggattaaaagcttcagggtgggccaggcatagtggctcacgcctgtaatcccagcagtttgggaagccgagacaggcggatcacttgagctcaacagttccagaccagcctggccaacatgatgaaaccctgtctctactaaaaatacaaagattagcccggcatggtggtaggcacctgtaatcccagctactcgggagggtgaggctggagaatcacttgaacctgggaggcggaggctacagtgaggagagatcgtgcgactacactccaggctgggtgacagagccaggctccatctcaaaagaaaaaaaaaagaaaaaaaaaaacagcttcagggtgtaccctagaagggagatttggaagtcatctggtagaaccacccagaaggacaaatatgggcatctcctgacccctactgctgacctgtccctggagaaagtagatgaggactgcctctggcaacagcagaagaaaaaagataccaggcagtgaatgggtggaaagaatttttttgaaggactggaatttcctctggtgtggcctacaactagaatagggtgtggcaccagggcaagtgaagaggattctcatgtgaaaaaaaagaggaacattccatttctatttaattctcacaattgaatctggaaggcagcttaagacaccataattttaagcaaaacttccccgaggtaggtaaaatgtgaagtttaggtctgtggaacagctggattaaaggggaaatgaactcccaccaagtttagaaactagtattaatttgggaaaatataaagtttaaaatccaacaattcacttattttgtctcttttccttctctctccgccagatttaaggtctaaagagcagggattttatttttggcgggggtctgttttgttcactgctgtatccctagtgctcataactatgagtggaacacagtaggtaattaatattttgtggaataaatggttgtttaaagcagcccactagagcctgagactccttttgtgacaatcccgctctcctttaatgaaaaatgtctccgcaggctccaggctctgcacaagcgaagggtgagaacaaaggctccagacaatgcattagtgccagattctaggcccagtggtgtaggaagagcctacagccctcaaaatcaatagcaattatagaagcacatctactttgccaggaaaactacttaaatcagaaattagccaggaaactaacggccatgactgcgagcctaatgtcaatcaataccatagtttaatagctcaaagacacaagatgctaaatattgagactccagtgcaagactgagctcctaatcaaagtcagtgagtcagcaatatttcctgggcatttaccacaggcagtctagttggcactgcgggaaattacaaaatctaaacggtctccaaatcacaaacctccaattgtaaaaatgcacatacatgtcacatccttccactgcagatgcaagggacatttttggacaaacccttgacctttagataatcgacagacttggaagaagggaagaaattactaagcaggactgtgttaacactcctggcccttgcccatcaagggcacctctgctgccccagtcttaccaaaaatcttccttaatattgcctgaatattgctgctttacattctataaattatagatctgtttaggtgaacgagggttttttattattattatgtatttattttttgagactgggtcttgctatgttgctcacattggccttggactcaagagatccactagcttgagcagctgggactacaggcccacgaccacgcccagtatcgttgttttttaaataacaagactcctctcggttgctgaggctcttaggaccaccaaccattcctaacttaatgaatatcgattcaatctgctagtctctagctggatgcaggtccgccgaaatgggaaggaggaaggaatgcagcgtaactggaccggcctggatggctgttgtaatgcgtcacggaagagccagaagagcgtctctaaggaggtggaaggtggaaaaaagaaagtggaacaggggcaaagacataattttccaattaaaataatttactcagtgtcaaccttaaagctaaaaaaagttccagaaaaatatttcagtgatttagtcttcctacacacacattgcccctcactaccctccacctccccaccaccaatcccataatcaggcagtgcatgttaaaaaggtctttcagggctagcctgggaacgtcagcaccttctgcaacactgtttcagtgggaaagtgcattctgcattccaagtcaccaagttccagacaggcacagtagcacacacgtgtgaacagaatccatcagtacagtctggggcccaggcctttgcacaccaacaacttaaggttcttggtaatggcccagcgtgcacccatgaggccactgctcttttacacacgcactcagaacacccacagctttaaaacggcaatcttactacaaaaatgacactttgcatttgcacagcactttgttttttgtgtactttacacatttattacctaatgactgtgttttttgaaatctccaataactctgggtggtggtaagaataggcatccttaagccaccttcccagatgaggaaacttatctgtgttcccctccttcttctcaacagccggctgatggaacccaagccctccacaccagcagtggggccagctgcacagagcggccagaagggagaggccccggggccacgcccttctctctactctcagttcctgactcattgtcacatcatggcgagtaacaggacaaccctccccacagaatcatgggggacactaccttcctgaggccaatgtgttcaaccaagcgggaaactctccgggtagagtgaaatccgaagttgctatgctacaagataacctagagcaaggggaataactgacgttttaatgtcttcttttatggggggctgaggggtgcctactcacactcccccctctcgtcttcccccgctacttccctcctgctggtcggttcaactccacaagcgcgcgtttgtttcgagtacagtaacttagagcagatggggggcactttctagagggcagtggaaagcccacttgctactgctgcgccggggacctgcggctccctgggcggccacgccctgcctcggcggcgcctggcgcgtctggaatgcggggcctccctccgcccctctccccacgccgcctcgccccgctcccgctagggcttcttagagaagcccgaccccccaccacctctgccctgcaccctcccggcccgagggccggtggcccctcacccctgccccaaacaccttgtccctgagccccctccccaaagactctccagtgccggccgtcccttcagccccctgcccccgacggcctccggggccagttgccggggcctccctgccaggccgtacccttcttcccagcgtctccacaccccgctagctggcggcccatcgcgggcgggcagggcgcgccccgcttacctgggccgtgcgccgagagctgagagcgtccccaaatgctgagcagagccggctggcctgggtggggcttttatacccgccacatcctccctaggcgaggcgaggcccgccccgccccgccccgcctcccccttacacggcccgctcccaccccaagtcaggggtgactcaccccggcccgccggcccgcagggaccgcgccctggaacgctcccgagccgcgccacgcgggagcggccccagcgcccctggccctgccctccgagaaagcccggccgaggctgccccgaggcccacagggaccccgtttcttcctcctttcctcattttacttcttaagtgccacgtcgagctctcagcctcggcttgggttaataaattaacaagactttagtagtagactctgggcttgattaagtgtttttttttttttttttttttttttggcgttaatgcaatggaggaaagaattgttccaagaaacataaatctggactcccctgagctggggctgttggcatccagcgccccattaccgtctgcaaacatgtcagcttaacctctggccgccagttcccggggggcgcccggggagggagggagattcgccctgtgctgcaaagcctggcccgccccggcctccgagggccaggaagccccgagcctgggctgggaggccaaagccgggagccaggatcccacctcagtcccgcccagggtggcgcccctgtccctagcacggctgtgctccgcttctctccgcgcctggggcatctctgcgcggcctcgtagcaggcagtcctgagcggggtggggcccatagctttgaacccggagtttcgtgtgtgtgtgtgtgtgtgtgtgtgtgtgtgtgtgtgtgtgtgtgtgtgtgtttcgaacccggagtttcaacaaagaactttcctctccttctttcatgactgctggggtgtgtgtgtgcgtgtgtggtgtgtgtgtgtgtgtgtgtgtgtttcttgcagccgtttagccaactcccttgctcggtgttgctgttactcgcttttcttccgagagagagagagagagagagagagagagagtttcttgcagcacagagagagagagagagagtgagatagagagtttcttgcagccagttagccaactcccttgctcggttttgct

SEQ ID NO: 61849 - DNA, 692 bp, Homo sapiens
cacagagtactcttggtatggacaaaccacaatgtctattttgtttggaggcatttccagggaaaaatctgcagtgacttcaatgtctctttctcagctgtaacagacatttttgacctcagttcattctctgagacagccagaattctctttctgagacataattctgattatatgacccctctccagaaactcttcccagcagggctctgacctacctgggcagcctcattcccccacatcttcactcttcaccgctccatgtgccactgctggacaggccaggctcattcatgctttgtaccttcctccatcctgttttcctgctggaatgccctttcctgctttcctcagtggtgaactttgcctcatccatcaagcctcagagtaaatattattttctactgcagagcaaaggctttcccaagcccttcaggcagatttgactacttctcttggcattttaaaaatatacctctcctcttgcaattgtcacctcgcattgttattttttaatttgttggtctcagcaactaggcaggagcttcttggggacaggcatttggatgtttcctctttgcattgacattatcttacccagtacctgttactatcagatttttctccataaacgcattaccttgcctttgttcatacttaaactcacctggcaaaaattaaaatgtatagta

SEQ ID NO: 61850 - DNA, 2724 bp, Homo sapiens
ttctatggctggaagaacacaaatgcaagtaggagggaagcaaggagggaggggacaggctgcagctggggctggggtggcatccattgcctctgtgaccatgatgctgggagattgggtgaggttggaatgaatcgctggcatgcatactaaatcatctctgccatttcttcaaacaatgcaaaaaagagaagaataggaaggagaaggaggaggaaaggaagaagacagtggaagagaacattgtgagggaggataccgtgacattgtgatacagagagcagtgaagggagaggtttatactcctgactacagcataatgacattttttcacatctaaattttagtttttactttctgagccagttaatataaaaatacatacataaataaattttagtttcttagcatctggagaacagaatattttggcccagatcatctgtaaattccttgctagctcttacatttgtaagaccctgctaaaacagtctcaaattctgtaagactcagttaaaacaatcactgagagattcataaaccaactttattactcaggtagtagaattttagttcaactacttaacattttggcatctggttttcctggggtttttggtaagaaggcctgattgctttctaatagggtggggtctcagaattgtgttagaagcaaaaggcaaacagatgggtaagctgctctaatcagctcaagctggaaaaacaaacaaacaaaaaaaccaaaaaaacctcttttctcttaaaatgagaggttggtcttccccaaattccaatgctccactccctgatttggagatgaatcagatgacttcactggtcttccccttctctgatttctatgattcatcagctaaagcaactagggagggggaagaagaacccttccagtattcaggttatattgcagcttaaaaggaaggaatctaaggaaaaactgttagaattgtaaaataatgaagaaacaaacttataatactcctaactaagacatatttttaaagaggactccctattctggtaattatcaattacatggacttggctgtttatcaattgttttataaatatttttctatgaaatcagtaaaaaagaaaaaagaacgcatcgtagagataaaaaccttgtttcaggctggacgtggtggctcacgcctgcaatcccaacactttggaaggccaaggtgggagaattgcttgaggccaggagtttgagcccagcctgggcaaaaaggcaagatcccattgttacaaaaaaaaaaaaaattagttgggtatggcagtgcacatctgtagtcccagctactcaggaggctgaagcaggaggatagcttgagcctatgagtttgaggctgcggtgaactatgattcccaccactgcactcccccatggatgacagagtaagatcctgtctctaagaagaaaaaaaaaaaaagataaaaagaaatctaattggttttgaccatctgaaaaagctgccagtatctacctgattataataatcaaggaacccccaagagtcattcaatttaacaaacattgagtatccactaaatgccaagccaggcagggctacacagcacatataataggaagaaacatcaaactccaccttaaggactagtggaagttaatatgtaatgataatttgacaaatgcatcagatatgaaatctaagtgccaggagaatacaataagagaatgactaattctgtcaaggaacagttcaccattagagaaaggaagtaagccattccatcttggccaatgcattaaagttgctcatagttagttgaagccattgcacaaccatgaaagaggaaatgtaacataaaccaatgtattctctatcagcaggaagtggcaatgtagagaggtgtgactgtttatttttaaacaaaccatccagtataaaaacaggtgaagagaattagtcattagagaaggtaggtatttgattaatgccaccattgtgaagatagttttggaaaccctctgcttaagtatttccctcaaagctgaaggcaaattctggtcacttgagaggagttttgaggaagagctagcagtcattctggaccagggctggtgattaagaggggaaaacatagtagcagaagaggatactgatttgatcaggccctcatttgataacactgttcagtgaactcagcaagatttattttctggttgtaaaaaatatttaatcattctgatatgagggctgaagtggatatctatcagtccaatcaagattttggacttcctgaaatactcaatattcaaaatcatgtgatattatttaaaagtaataatttggtgagggtaaaaatgttcaaaaatgtagtgaactgaaatggaatattcaatgataacatgaataatgtacttatacagcaaaaaagagtttaaaaatccagtattcccacaagcaagggaatagctaagtgtgatgtggtttccaatgaatgacatcagccctatgtaagtctccacaggaacaggctaacatctgccatcccctttctcttccaaaacctgtggtattcttgtgggcattctggataactggaacaagctgaaacatgaacccagacaacaaaagagttaagaaggtacagacaggccgggcgcggtggctcacgcctgtaatcccagcactttgggaggccgaggcgggtggatcacaaggtcaagagatcgag

SEQ ID NO: 61851 - DNA, 620 bp, Homo sapiens
ttcacaaatgctacccctgcttttaagaagtcaccttatccaaattaaagtatatgaacacaacttccttatcttattcataatccatctctatttttgctattcagttattgtaatctacattttaaataagagactttagaagtgcatcaaaaactatacttcttggcctgtacactataacttccaccacagttaactgttcctataacctggctccaaattacacaacaatccacagaggaagggaaactaaagagaaagatggacatctgctgactcattcttcattcctccatttgttaatatttattaactaccatgtgccagcctatgccaggtactggaaatacaacactaagcatagtaccatctccaactccaggacattataatcaagtgcattagacaagtcaatgaagaagaaagaaaagtagatatgtacatcaacacaatgggactatggagaacttaggtttccaaagtgaacacaccaaatacatgactgaagagaatcctaagaacataatgatcagggattaagggaaagaaagagaagaaagagaaaatatccatagcagtggttctcaatcatgacagttttaatgtccccagggcat

SEQ ID NO: 61852 - DNA, 2539 bp, Homo sapiens
catttgatatagatttcaatataacaaaaagcatgtctattcttaaagagggtcttttttattacttgtatggaaatgggccaaggttcttggactcaagaaaattccagtatctctccttcacaggagaccaacaataaatacctgagggaattatacctaaaaataatttgagtgctgaactgtgttgttccactataggagtggaagtacagtcagccataactctagcattccgtatgtgaagatgaggatagggtaaattctgagaccctaaacttgtattttctgtttcctccaaatctctctatgccagaaatctattttcttatgtcaaccatcagccccactacactcctcttcagtggattacaaagtggctacaactcaccaattcagtcctggttcacttatgaccatcttggagctcatcttcctagatttctgcttcactctagctcacagttcacagctgcctggctgcgaaggctccaagaggcaggatccctccagaacttactcagctgagtaaaaacaaaaggccaagatcaaaagcaagtgattggctaggccaggtgctattaggtgaggaagaatctctccctaaacatctaccctcaacagactgtggcacctaaaacagaatacagcagacccaaggttctttgtagcagagcagcaatgacgatacaggacgagcccttttccatttaatctacgccgggagtgttactctcaggacactcactatggaaataagagctgaaacagaacggtgttctcattgcttacatactaggccacttgatggcatggaacgggaagtcaactcagttttccattcccttactgccaaaataaatcttttgttttcccgaccatgctttgttatggggcagattctggcaggcactttatgacaaaagctacctcgatatcaggaatcttaggcctttcacaaagaacctcacatttgagaagacttgaggtcaacttaagtgacatttcacaagatcacttacagacatcatcaggactacaaatcaggcttgatctctcatgttcagtacttctcctgtgaccccaggcagactgataaagtgacctgcgagaacctaatcaaatttaggagtcggtctctcgacaccgaacgggcccgaccggctcccacttaatctacctctcacacttcgacccagtgtggagctgggggggaatagtcgaggaaggcaaaagaaacggctgagggaaaggggacgcaaagagaggggaaacaaggttccagaaaagcaggtaaaagggcaagcaaagcaggggtaggagccgcgcagagccaggagcaaagggtcctggcccggccgccatgttccctcctcccgcccctgcatgagcacgcccgctggcccggcagcgccctcccgtccgcgtctgggctgcaacacagcctttccgcccacctcatggtccgcggcggctcttgcccaggccgcagccacacaccacacacgctccaccccactcctcacattgtcgcgcgcgcccaaaaaagaccatatttaaaggatgtggccgcgccgactcggccctgcgtgatgacgtctcagcgacatagtgggcggggccttgcgtcttgacggctgctcccctcctttcctcccgccacaagcgctcgctgtggttctggcagcgaagtgcgagactgggctcgccaggcggaagtggttggagactgcgtgttttcctagaaagtcctcgaccttcgtcggggagaggaggggagtgataaattggaaggcggacaagcgacaagtgcggtactggaaagacccaaacatacttggttgtgacctcaggcaagtttcctgacttccgtaacccaaactcctcatatgtaaaatggagatgaaattgttactgctgcatcatacggttttttggaaaggattaaatgaaacaaaggaagaagctgtgctctgcacagtacctggcacatagtagggcctcattaagtgctccttcacctccgctccactccccatccagttttagctgtgagttcaaacactagttttgttctcatccattacggaaagatttattgaccgtaaacagagtactttgtgcttggtgctgggtacacatggactaagactgaatactgatttttccagtgctttggatctctggcaatctaagacatttacattaaatacaatagaaagtaataaactacataagaaaggtgtatagattgaggttagagggagaggaatagctagtgtgagggacaaaacgcagttttgaatagtattgagtacttacatgtcagttgctgcactgagcacctgccgtgtgagctcatttgaagaatgtgggtatgtggaatgaagagaaagggcgttctagacagaccagcacaagtgtcaaaagacaaaaatttgacacatctaaagatctcagttggccttattgcgattctggaatcaggcaacacttcattccataaaatggaatgagtgtcccaatgagtggaacagag

SEQ ID NO: 61853 - DNA, 394 bp, Homo sapiens
acattttagactgatttagaatattgttagaaattatgttaatgtaaaaaatatgctacaggaaaccataggtagtttattttgcctggaatgcaaggtctctgaagagtagtagaggaaaaggggttggaaaaactggttgaagctagaacacgtaagattttataagccagactaaggaagtttgactttattgcataagaaataaaatgctaggaaacaaacaaacaaaaaagcttacataatgacacaatcagaactggctggctgtgcttcaggaaagttcacctggcaacctacggaattcattgaagggaggaggccagttaggagacagtgtttgtgaatgcttaaaaaaatcaaccactacaatgcctggcactgtgcagatagc

SEQ ID NO: 61854 - DNA, 449 bp, Homo sapiens
tgctggaaatggtagtgatttgaaggaaaaaagataacccacttctccctcttccccactccttcttgcctggaaaatatgtttctatttccggcctttactcctgatatttgtaagtgaatctgggtagtgattgtggaacctcggcttacacatctcaaaacacccatctgtgcaggtcactggactttgctgacctattttctgctgtttctttctgttacacaaatctcccccacttgaaagagcaatagtccctctactttccaatgaagcacagacagcagagagatttctcactctctgtaaatgcaaaagcttttggaatgtctggcatttcaggtgagtgtttaggaaaaaacggatctcatcctgggtgtctctcccatctttatttcatgctttctcttcttataaacccacaactgtggacaaggggatctgtgttc

SEQ ID NO: 61855 - DNA, 846 bp, Homo sapiens
aaaataagctctggataggacagtggtgctctgctggaaaatggataggacaatgcttatgtctcctgctgttacctctgcccctgtgcacctttctgttctgccagagacaagggttgccccacccacagaaaggtggaacagccaggcatcctgagggtagtgatgccaaaagaagcccaaagtcctctcctacctgggagaaacttcagcacctccatgaggcagcatggcagtgaaggctttctctgctctctactgctgatgtagttaagggaaacaagaaagaaatttgcatgatctattctcaagacccaaacctccctgtttgcataccccggctcagtgtggtgtcagaatgattctaaggaaggaagaagccccttttctctgacaaggcactggggaagtctagtcgagatctcactggggaaagcaggacttgctgctgctatgggaggcaggaagcaggccaggcacagatcctggaacacatcagaccaaagtccaggacctcctctcctttggctcgaagggccttgacccagagctcactcacctgagagcttctttcacttttcttgtaatatacatttatcttgaatctaagcactgttgttgtattatcaaactgtcaggatggttttatatgttttcctagtacaagtaaaaaagattagttgctttgcaaggacggaacagggagttgttgatgacaaagtgaagtaggtaaaagttgactgaatagttttgatatttttcatatggatttcagtttagatggttttgcgctaaaaaaaaaaaaaaaaaaactcaatattatggcatttcctggagtttaaaata

SEQ ID NO: 61856 - DNA, 1154 bp, Homo sapiens
agccaatggctataaagcaagaaaacaatcctgtaaaggctgatacttggccttcatgatacggagttacagctttgtacgtgtacttgaagtataaatgccttcagtttccctactgtaaggtcataggtccagtttacctctgtgaagtggtggtacaaaggaactgagaataaacaaaatgtttagtaaatgacagagtggaaaattccaaagtcgagtctagagaatattttcagtactgagagtatatgatttacaaaaaaaaaattactggaatcctcctgccctttggtaagctttttattgaagtgcaacatgcaaagagaaacagacacaaatgataaatgtaagctttatgaattttcacaggcaatactcccagatcaagaaaaaaaaatgtccctttggttttttaaaatagttttccatgcctgggtcaaaatcaccgaataatgcaaaacttagcttataaaatttattgtttaaagttcagttagccagaaaatgctaaaagtttaataaaatacaatgcctaaacatgagccattttattttacttcaaagagaataattatcttacacttctgtttcccaaattggaaagttagaagttttgttttctttttaaccacgaatgggcatgtagttatttctctcaccctttaaacggccagggtttcctcagctgcaccttcccaacaccctctccaagaacagagcgtggcttgccttgctttccttcctcttcactcccatccttcccccacatcaccactgtgagttgttctgaaatggggccatctcattctcctcagccctcctaattttgggtagatccatagaagacaggaggtgctttttctcatgggcagcgtggctgtgggccattgcacaacctctgtttatacagtgagtatgcttcagcctatccctttaactggctaataaaactatgctgggagcaacgtatcccagtgttctgagactgatttggctctgggggcaccaacttctctcttagttataacagtcagaagcaagaccctggaaatgcagaatgtgccaaaacacatttgctcccactcaatggacagccttttgataggaaaccaaatggaatgcaagacctgaatgccccctatttgataata

SEQ ID NO: 61857 - DNA, 641 bp, Homo sapiens
ggaactgattagctgatagaaggacctatagcaattaagggtagagacagggaataaggaaagtaggaggcatttgtttgcctctcccaagtctcaaacaagaaactagagcatgtttctgttttaatagaaacactttcatagaacggtagagatggaaaagatcttggtgactaccaagtccaaccctttaactttaaaaacagggaaagtgaacaactgaggtttaacctgacaattattgcatcgcagatctgggacaataacccatatcttcatcttcccccaccctatgtaggggggtttccactactcaacattgttttgctacactgcggacagggtgactcatgtacaaagtgagggtgttgggcttcagaggtttctcaaccagaattatctgagttatctttaaaaatgtagcaatacttgagctctacaccttgggaccagtaaaatcagaaatctgtaagagcacagcctgggcttatatatcttttaaaaactctttagatagattaatacgcagaccaggttgggagcagatgacctgtgaggtctattgcaaaatgttcaccatcagttgggaaaattttttgattcagttccctgatgttgacccatgaggccataagcatttc

SEQ ID NO: 61858 - DNA, 3113 bp, Homo sapiens
aatattaaaacgtactttccttttttttggtgggtcgttactgttcattaggggagaaagcagtttaaaatgtctcagcctctcgcctttcctccaatcaacacaaagtatattagacaaagtggataaagactggcattgacatcttccaaatagcaaaatcaattttataatttaaagacaaaaaatgctttaactgcagagggcatttaagacgtttcacacttacagggctaatgaaatgcaggactagcataaaagttttttgggggggtgggggagaatagattttttaacataagaagtcgataagaaatcttaataatttttcctcccaaataattttaagtgcttaagagcgcggatcacgggaggtttcctctcttttacttatatgaattacatattctaaaaatgattaaatcccattcccctcaagccacaggggaaaagagaaaatttgctgtgggcacattatatagaaagatttcatctcaagcagctcatcttaacgtccagtacgtttcggcctgttaataattaataaaagagatgccacccaatctctagtgaagaaaggcaaagctcggtgatccgaaagtaaacccagcgcagataccgaactggtgtccttcattccagattgcaacacaaccccaaactagcaaacgtttaacaggcgcttggcacccgcaccggtggctaggacccgcaggacagtctgggtctgcacaattgctgcgcattagggaagccgcgtccgccgcaaacagatggggctctaaatccccaagcctggcggccgggcctgcgaagcagctcgggcagattatccacggcgaggaacctgcgggcgcacaagcgggcggcgggcggcgggcggcgtgctgcgggctgagtttctccggagctgtttgcaaccgtcccaagagcgagtctcggtttctccggcagcacgggcgacttcctgaacacctccaaactttagctttcccatcagaaagttccctgacttgccacggtttctctccttctcacctgagaggacctagagccagtcctccctccaaccaaatccccctcccctcccgcccccggcccggctacggagtcctgatgagggcggaaggccgggccgcccggcaggattggccgcgactaacccgcgcccgtcggccctcaccacggtctaacctccgcccctgcccgcggatcccgtgggctgccgagttcctccccacctccatccaccagccaaagtgtcaagcggggtgcgccgcggctccctgggccgcccagagcgtcttggcacgctcgaggcgcccgtctcgctccggcccgcgcgctttcggaagtggccgcggcgggacacagcgcgggacacagcgcggacctgcggcacttgcccggccggcggccgctgaggcgctcggggacgcaggggcagggcgcaaggcctggggcgctgaccagtccccggggatgacatcgcgacaacgcgcacgcacggccctgcccggccgcggcgcctccccgacctaggccggagctgtcccgggtgcgggccctggggaccggccgcgggcgtccccggcttcctctgaactccgcagaccctccccttcctttccgaagcgcggcgactcccggcaaactttcttttgggagacccgcccggtgccaagcggacccaagagactgacaggagccggagggggcagcagagggggatccaccccgtgcgcctttgccccccaatcggaggcaggccgatcccgtggccgggctcaggtggcgccgcggcggtggcccagaaggccctggcagggcccccgcgccgagccccgggcagtacgtgcgttcgggcaggcgcgcccacccctccccctgcgcgccctcctccccgccccccggagccgccagcccacccggccccggcggggcgcccgggctcacctttcatcgctgcgatcacaaaatacatcatttaagccgcggtgcggagagcgcagggagagcggatggtccgaccccggagccccctctgccgccgccgcgccgccgccgcccgagccacagcagcagctgccgcagctgcccgcccgccgagagccatcccgagccataagaggctccatgtgaccggctgacatcacggccgccgctctgtttacaccgcgcccctccgcttcctcccggggcgggaggcgggaggcgggaggcgggaggcaggcgcgccccagcgccgcgccccgccccgcccccgcgggcaggtgagtagcagcggcggctctgctggcccaccccggccgggcctgccctcccgcgccccgggccctcgcccgggcgcccgccttcccctcgccttcgggatcacctgtggccgccggtcgcttttctgcacgcagcgccccgcggaacgcgcctctgaccactttctgcccccactcggtggggcaagaggctcgcaacccgacgccactctcccgctggcttgccggagcactcgggggcgataaatgcgccagctcgttggtggaaaagacaggtttggtctggggagctacggtcacccgcatttcctagagtgccccagctctaatcggaaggtacggcccacttctgggccgtggagaacgaagccactgggaccgtccggggagtggagtaagctcctccgaagtctttctggagagactcggcctgggcgggggaactccgcccacccaacccttggcaacccttggatattggcagttataccaataaccaaggtcctggtctacacctgtcccccccaacccccttccccgcgtccaagaccactgatacctgcaaggaaagccggaaattgtatgtgaatcacctaaatgaactccagttgccagctgatttgagccgctaaattcccaggctcttccatatctctccagagaacccatctacaagtaggaaaagctatcgttttcataccctaaaaatgaaacactgtggtaattctgacagaaaataaagacctctgaaggtgaactttgtacattttaacatgcgactaagacttaattccctctaaactttgaagcttaattcttcttactgtccttacggaactg

SEQ ID NO: 61859 - DNA, 1078 bp, Homo sapiens
agcaaggataattctagcatatttttttctccatgtaagtgagttgctcttgcccctgagttgggccacaatttaaaacacaagcaaataatcagcaccgtagaaaacaaggattcatacactccctccccagccccctttcaaggcaaaattgagtcttccaaacatttatacagcgctctgatttagaaggtcaataaagttcgttgtccttcagtcaagccatggctttataaaagtttgatttcagataaattcattctaatacagctttttttcttaaagatttttcccccaaaaaaaactacaaagaaaagaaattataaaaatgtgaacccaagacctacccatgttaactcagctgtccagccatagcaaagtggacaagagtttcaaatgaatcagccatacccactgtaatgtttacaattatgaaattaaatcacaccacgttcctatgatgcaactatatctcccaatgaggcaacgcccctcagttacactgacaccatcattcacatttggttattgatttcccttgtgctaacgactaatgccaagctatcctataagcaggtcccaggtacaattttctttcttttgtatcgttaaaggatggaaaaccatcggagactgcatcctcggaagtatgttcttccctactcaatgcaagtgaacccagatatacaactcggatgattcacaatgctactttaaaacagtatcctgctttagaaaacaatgttttcaaaagaaccaaatctattagctctagcgtgccttgtgagacatctgactccaaggtgaataatctgacatcactagtaatcagtatttatttccagatcatttcaaatgaaatcagtcattgggaacaacatgtaacatgacatctgctcctgcagttataagtagaatcattcattctatagatatgtccccaatagaaatataatctcaagtacttatctgaaatatttacacatttattcaacaaagacatttccagaataatgtaatactgaccttgccctttggagatgtacttcattcacttcctacaactaatgagcaacag

SEQ ID NO: 61860 - DNA, 2787 bp, Homo sapiens
agcagaaaacatccttttcatttcacagatggggaaactgaggctcaggaaagtttaattggcataataagacatttctctgtggaaagttatattaaactggaagtacactcatggcaaatctttaaaaacactagtgtagatgtaccctcaaaagagtaaatactcaaaaaagttttactccttggagcataccactcagcagtcagctctgtaaataatttaaacctatgggagtgccctcagccatatttaaaccaggaagactcatcctgagtttgggtgaaagatgtactcagatgctgatgcaaacacacagaaaccacagtccctactactagaagagcatattgaattgaatctagaatgttccggaatattctagaacatagtattctgccaggaatccagctgaccgaattacccacacttgcccaccttaggccttcattcgcagcaggcatgtgtgcctgggtttgttaccagcagccattttctcacccttaaatgagggatgggtctccccttttctttttctcattttcctagaggttacaagattcctgtttttctcaccaggaggagaggtcagcctcagtgagctcatagcagtcatacattgccagtgtttttcctcaagtggaaggagaaaggccttcagaaaaaaaatcgtatgcaaacctagtgctaccaccagcagtagctctgaatcgagatttttgggagaattaggcttactaaagataaactacaataagtctcaaggaagcaaataattctgattctaatgaggaatccaagaataaaggcagctcttaaggtaactagatctggagtcaagctgacctgagcttgcgtgtatagcccattttcctgcttctaggttgagagaccttgaacaagttacttaacttttctagtcctgaatttcttggtttttaaaattgtatacaatcatgatgacacttaaaagactgttgtgaaaattaaaggaaataaggatgtatgaagagctttacaaattgggaagtgtgacacaaatgactttggtaaggggtgagcaactcacatagtattagtttaaccaaactgaattaccatgtgatagtgaaagctatgccattgctactcatgatgtccctcagtttcatactgactcatggcctaggactctggttttcagaccaagtactctgactagaaaatatcctcatatttgatggaagacagcatgagacggagaaccaagttccttaaagtaagtgtactctattctagatcccaagctccattcgctttactctctaaagtctagagaaagagcctggtatggtggtgggtacccgtaatcccagctactcgggtgactgaggcaggaggatagcttgagcccaagagttcaagtccagcctgggcaacacagtgacacccagtcttaaatttaaaaaaataaacaaaaggaagctgcctactcactagcaagtggctgcattatccaagtgggctgctgatcagcacaggcaaggactttggtccccactaccgaagggcatcgaaccaagtccagctgttgtgcaggttttgattcacttccaaatgactgggaagaacaccaagatccttccccagagattcacaaacagaccacgagcagggtaatgctctctacagagatagggacttgatagaattgtggtgaatgacggggtggaaccaagtttctaaacctaaaatacacatacaccctgcgcccaaagtgaacacggtggatgacttgggcaaataatttagcttctctgggtcttagttttcttatatgcagaatgaggtagtcagtgacattttttttcttccagacaggttctcagtgtgttgcctgaactggagtgcagcggcaccatcatagctcgctgcagccttgacctcccaggctcaagccatcctctcacctcagcctccctagtagctggaactacaggcatgtggcaccatgcccagagaatttttactttttttgtagagatgggggtcttgccatgttgttcaggctgatcttgaatgcctggcctcaagcaatcctcctgcatcagcctctcaaagtgctggattaaaggcgtaagccaccttgcccagccaacatgatttcttaatttcccttccagttcatcaaccaatggctccttgccctgcttctaagctatcaagccaaaccacatctttccaagcaacaggctgtcagatctatttctcactgtaagaaatccaatgtggctcataatcaaaggtaaccccctgaaacttttttcttcttgcctttaacaaccaaagaagaaaaaagacagtgcccacaaaaggttatataagtaaaagatgcacttttcttgggagatctttaaaaattatctgggctagagaaaaatggcaccttttgataaagctgtaagactccttctattttacccagatacacatacacacacacacacacacacacacacacggcaggtgtatttccagatttccaggtaatgcttgagcacaatttctaacttaacaatatgacagaagttttaaattgccaattaaacccctaaaactaagagggctaaaaggccccaaaatattcggtccaaagcaaagttgagcttctaatacagcaaaaatgcttgactctctttaactggccatgcttcaaagtaaagcaaaggaaatgtcatgaaaatatcacagatttagccctgccatggttatcagtagggaagtttcattatagtcatcccagaacag

SEQ ID NO: 61861 - DNA, 1326 bp, Homo sapiens
ctgcatttctaatacatcaatctgttatttgtttctagcctgcttttattgtttcattttatctgctatttgcactcagacttgacttgcagacaaccatgggcagcacagttgggtataaaagagagttatttaatggtgttatttaaggtgtgcaccttagccatgcagtttacaaaagcaaatctctgtgaagtacaaagcatcagagagcaaaacaacagtcactgacatctcttcagaggagagaaagaagctgagtcactgagcctgcaattcaagagaaggcaaatatatcacagaacaaagaataaacctccaccctgggtcacaggacatctgcctcagagatgttcaccaacacagaaagatttgttgcttatgataaaagacatctgtgacaagacatactgaacaaaggattatttgacccctaactaaacatagctgctgtataaaaggttgtttttttatataatattgccaaacactatttctgtagctcttttaagaagagggagaacagcaagtgttattaaatctgtggtagacatcattctaaactgtacctgggaaagcatatgacacctccatcgtaactgcctaatttgctacttagggatagaaactaatgctacttaattgaaataaaaccagatgcgctgctgagagcctaccacctttagaattatgctaagcatcacagggaaaaaaggaaaaaaaaaaaaccaagttgcacttcggcctccagaagagacaaggtaaacagaaggtgagttcaaaaatgtttgtatttagagaactccatgtgaattggaatgtggcaggagaagctttcatagaagagatgaactttgctcagtgggtaaaatttcacaaggcagtttggcaggaaacacaagcaaagcagcacaatggattcaaggctcagtggttttgaagataaaattcaatccctcacttccatttgggatgaaatattgggaagcagcaaaagtgtcaccagcaggaaggtcaactcaccattggagacagacttattgacttgactggccaagcccaatttaatcctccatccccaattctaaacacacagtagactagatgtacccatgcccttcacaacacacgtttcagctgttacctctcccaattatcttgcttacctgtcaactttaaggcgtcatctagggatcaagcagatgccttcagaagccaggactgagtctaggggaggggctgaacaggttacagggctgggggattctcactagggatgtcagttcactgctggctaagagtggggcccagattcagtcttctcct

SEQ ID NO: 61862 - DNA, 1834 bp, Homo sapiens
aatctgattttcatggaggccttgtacttctcgtgctctttttcccatgttaactttagcttttttcctctcctgaaagaaacactcagcttgcccctgggtcttaactgacaatccaaaacagaggaggaagaaagagaggttccatccaaagaaagagatttgtccatctcccctggacaccaacctctcttctcctcacctgactcctctcttctattagaaaggagagaaagggagcgggggaaactggaaaggggacttgagattatcactcccttttttttagcttcagttttttttaagttactatcagtccatggcaacaaaggcctctgaattctttctgtctgtggctcaatggtttaattatcaaaggattctataaaccccaacaacgtgtgggctacccagttcgttaccccccgcacttcagaagaaaaatcacctcacacaaaaacagccaaataaagttgcacagtccgagaaggcccatcaagcgagaactgaaacagtacatgaactctgcctgtccatttaaattgcaaaagctccagctcattcgcagacacagaattcggtctggcaaaaccattcacagtcctggatgtgaactggagcctacgacattaaaggcaccaaggacaatgccagtgaggctgtgtccaaagctggactatctccatgaaatggttctctctgagcaggcagaggtaaataacagtaattccttcgagagtgtgcatgccagaaatgaagagcttgaagtttatgtggaggagctgttgaaaccaccccaggaagactttttctctcagcacaaattataataaaaaaatctcagtggcactctgagctgtaaatctcttaggttaacttttaaaaaaatgtgacattgttaggtacatacgcaggaccaaatgaggtatttcttttaactgttctgctcttcatagagcctctctctctctctcacagctttggtggttttatgaccatactgaaggagctagcagaatcctgttgctaccaatagagggtgggttggttaacctaacagactgacccaaaaggttgggcaaaccccagtgagaaagcagctgtggcactttttgaggctgtgcaattggttcacctgtatttcccgtgtggtgttgaaacaattgcaaaatataagcctaggcattcttcttgggcagtggcaatgctgtggtttagagtgaatggacatcccatgctccaagtcagtgataaaccgcttgagttatccccaaatcctctccaaatgcttcaagcagctaatgttacaacactgaccattaacaaataatgtgggacaggaagagaaagttcagtgaaccaatgactcaaattcaattcccagccagaaacttcatggtgcacagaggacagtgtcctaaggaacagtggctcttgcttaatatgaccttcaggctttctttaccttgcaggggctgcgtgcgctcccaggcttctccttccctcaaaggagaaagactgtttactctgttcatatgatctctgatgataagagactcaacaggccatgggcttcaggggttctttcttgatgctatgaaaaccaagatcaggggaaagtgagatgggtctatgcctccttgggtaagagcttctagagaatggaataaagcagaggatagggtcagacagactgaaaattctcagagggttgtgttccagggcagagactgctgttggctcctccctgtctggccctggaaatgtagaggtttacacctgggccattagtaaatgccccataattcctcatagcagatctagttccccaacc

SEQ ID NO: 61863 - DNA, 2198 bp, Homo sapiens
tggctttcacaggtgttaccttcctgcatcctctcggcaccaggttgagcttggtgtcgctatcccttcttatagatgaagaaactgaggctcagaaacagtaaacaatctgcccagggaggaggaacagagctgaggaacaaaaacaggcctctaagctcctctaccaaaactgcatagaccactctgtaaaacactccaagtaaggatgggactttatttctcacccctatgactccatgtctaggtagaagcagaagagtttgggaagagatccgacaacatgtgtgaggagatagggaagctgtatgcatttaacctatctccagggtccccatcacttgagagaagggccatcaataaggaggtggagaaggatcatccgagctaggctgagtcttctttgacttgctaaaaaaaaaatggggagggagaaggcaatgggctagtatgggaaagaataaagaagagagagggcagacatcaggaaagaacatcaggcagagagaagcgtcttagagcagtaatcacaaccaaaattttgcgcaccaacaaaagcccattgacgctcagacacctctgactttccccatttccttcccgatggcacaaatggaagctctgatttcctctttccttttccttctggctgatgcatcctgacaaatacagtatgtaaagcgcagggacgtgtgaaaggaaagtgtggcgacggttgttttccatctcccaataatagcgtttcaatttggtacctaaataaacaatctattttagtggctcccctttgatatctccaatgttcccttctgttatttctggcagttcccaatcctgtgatgtgattagagaggatgattacacttacataacagcatcaaattaatttgccgccgagaacaacagcggtaggaaatcattggagttctcaaattgctccccccacccccacccgcctcgagtttatttaagtgacatcaagggattagagcgaagtcggtcagtagagcactgctgggaaaacaaccaaaacatcgactctgaccttgtaaacgaaagaggaacagagcaaataatgaatagcgctggtcccaggcctggtgcaggggccattggatgaatcagcctcccaaacacacatttccgtctgtctgtgggagaaagaaacaaactgtacctttcagtgcagattagattcattttcctggggctatgtccagccatccagggactgtcaaaaccaaagatatttgagattttgcttatgtttctttgctttgctttttggccccttttcaaaacaacaagaagaatgtaaaagttgacttgaatttttttactctgtgagccctgaacaaaagtccagaaaaataaagcagaggcaaatattattgcttctggttttctaaaagatatgacaataacagctcagaaaactgtagcccatgattccaccaaaggttagaggttcagaacagggagcagcacgtggatggcgtagaaaagggacccctttaagtcctactcgcagtttagttctgacacgaaccttcaacagttacttcaactctctgagccttggttttcttacccaagatagcagatattaccgtctttcatctctgttacagggtgggtgttcacccatccgttcattctgttaatccatccattcaacaagtatttatcgaacaccaattctgtctcaggaactctgctggtaactgggaataccaatggacgtggtcagccctaggagcttatgtcctagcggaacagggaaataaaaacagccagtgtgctctgagggcctgcatgggcaggcactgacctctccacccttcatcccttatcacatgtgaatttcacaaccaccatgcatgcgtaggtatctctgtctattttacagatgaggaaattgagcccagatgtgttaaataacactacgccaaatcacactaggaagcaatgagattgaaatccaaacctaggttttcagaatataaagccatgctatatccctttatattttttggaacctgacaagctctgaagcactctgcaaatacaaggaactactttaagtgtgtttgcacaagctgttcatatactagacagacatcacaaatgcatgaatttctattgctttagtccagtgattacagcacttgattctttttaaagcaaatccacttcta

SEQ ID NO: 61864 - DNA, 1083 bp, Homo sapiens
agccatgggaagtgccagcaaaccctctcaccctaacaggcagcatggtagcggggaggggacacaggcttaagtatcagacagatccaggtctgaaagccagaccttgctacttattagctgtgcaatattgggtaagttacttcccctctctgacccctaatttccttctaaaaaggaatgatatatccccactctaaagtggaggcaagcatgtgtaacttacagggactttgtgaaaatgggataagttatataatgagctaacaaaggcatctagttattgctcaataaaggacttttttttttttttttaaactcaaggacagtgtattatggcgtgggctgattattcatgctcacaatgagaaccttgagtcatgccgagagggctgacatatagctgtgtcctcagtgagagggcagggaccttccctttaacctaccccaggatcccaatacctcaggcctccgtgccctcgtgctggtctctggaactacactcagactctctatctctctttgaaagctacttgcagctaactattcttctgtaagttatccaataaactaatttatcttaaggtgtcagtgttcaataatagcaaagttttcatgggaatcagttagcaagggggaaccgctataaaccaacagtgatgtttcagcaaaggtgacagactgatgaggaattcacttggggtctgggggccttcttggcgtcctctcaattagactttgtaagcagtttcctttttatggctagcctgaaacattacaatatggagtcgagacacttcatggggcccaagcactggctgttgctgtctggcacgtctttataagagttagatgttgatacacatccactcaaaacacaatagctcctcttctgatcgattcatatttatttatttaattaatttataaactgcattggtccaaaaacattgcgggggagatgagtcactaaggtaaacaagttcagatgccgaaaaatcccaccaccaagatactaagtatatcacatgctacatgccaagatgcactgaaaaatcaaaatcatttatttttctttgtctt

SEQ ID NO: 61865 - DNA, 1246 bp, Homo sapiens
aacttcatcttctttcatccttctgtagtatctcccagggaagatctcatagaagtaactgcatataccagtttcaaacaccctcaatatgaagagcatggaactctgcattcagctacctgggcatgtcaaaagcacatcatgcaataagccaatgtttagtatatggtccaacatggacgtggtaccttcacagctcttatctgattgaaatgcatagatgtggataggaaatgacatgcttactaattttctgagaggaaaaaggggaaatccagtatagtgactgagtgaaaagttagtaataaaaggtaagtgacccagacagggagtttcctgagcaagcataacccagcagtttttagccacacttctttcatggctttctcttcaagttaggttgacagatatctgatccaatgcttggccatctactgaaaccacctcttaccattccaccaggtaaggacgtcagcaaaaagccttttcaccacaagtagcaacctactttccaaaacaactccccgcacttcaaactaaaccaacgactaagtaaacccagattaaatagagctttatcaggatggagtttgagtaatctctaaatcaacaaattccagggaatgtgtgtacagaatatccattatacaaatgtcagaccacaaagtcaaactctttgttgagatgctgttaaggccttccctaatacagccaatatagcagagtgggagaagcagggtcatgctagcttctattccagagcctgtttttccttatgcaaaggccagtaaagcaaattttctgcagaattattttagttgttcctaaaaagaacaagatagcctttcctcattagtctgaatagacagctccttttctgagttgctttaattgctgtgggttaagcttcactatcacacatcctcacaaccataatacaactggcatcatttggcgctttttgacttggttaagtacaaactacaaagtccaagatgggaaaggtcatttattgtctgccagatgggatgtttcaaaaggaaatgatttagtcacatcattaggagaaaagggaagaattaaaatgtatgctcacatacagatttcggtacgcacacaaaatgatcagcacaggaaaacataaacagtagcccaacagcacacaagttacagcacacaagttacacagacttccttaaatggtatcttctacattgatgttgaaaaatgtggattgctattttaa

SEQ ID NO: 61866 - DNA, 1854 bp, Homo sapiens
gcatagtttatataccacaaaatccacacattataagcatccaatttaatgatatttaatgatttttagtaaatgtatagagtagtacaaccattaccataatttagttttagaaacaagttcaatttgaaaaaaatagtgctttgaaaaggtatcactgcttgcccattatagcactatagggtttattcttactgataatctgcctaaagtaggctccacaaaacactgggtaagggcagccacgctttggaggacttcctctttccctggcttctgagtgattatgtgctgggattcaggagtgagctcagagctcaccacctcgtgctcaggctcagggaggggcccttggtgtggacatggaaatccctgccatgtccatagcctctatgctcaccacctggaaagttacagagagctcccagttacacctctggtttctagagccagtagagcaagcctgtgatcagcccctccaccccagcctcctacagccacctctcccaggaaagcctagaggaaattggccaacgtcttggtattccattctggttgccaagtgcccttattgtttttgcatttctaagagactgtcagtacaacttcccccgtgactgccacgtgacaggctgtgctgtcctttatctcagggcaccaaatgacttacttcattccaggtctttctgtttcactgtgagtcaggtggaaaacagaaaggtggccctattttaagggaaatgttaaaacaaagacaatgctgtgctttgctggcatttgttagcagcagacacggttaaagaatggctatgggcaaatatttggatgactatagaatctgcttaaatactatggatttactgtatagggtgtcaaagtaacaactgtagagttagagtctattaaagggggtctcaacaaaaaatatttatgcccttatatgcatgctgctttgtcttttgaaaattatctttcctgttttttccatctcatagttccctccaaacaattgaccactccttttgccatgtcactgcttcctatggaactcagtccggtggattaagtgtttctgttaatgtctgtctccctttcacactgacttttgtatgaaagggaccgtgcctcttcacctctgtaactctagtgtataccatggtgtctggcaatagatgatctgcactccattgactgggaagaggctgtgaaaacaaagacgggtgcacgttcagagcaaatatttcctgctttggctgtgctaatttgctgtactttacacagtcagggaatgatgtgtgatcatttgttgaattaagaaattgttttggactcaagaagcaccaaatgtaaactgcaatgtcagactgcgagagaaagggtgggaggctttggggaaagggctttcccaaagtgcttgcccatggggaggtgagggggaatgcaggctcctagccacagagaatgaattcattaagtccaccaccatgctttgtgagaaccaggcagccactcctccttacatacaaccccagtcagatctatagccatgacaagaaatacaaaggtgtgctttctatttgtggtttatggaattgccttcgggatttgacttttatctaccatgtccactgttctgcctccaagacctatcacagtacttggcacacagaacgcagtaaatatttgtgatgcaaatgaatatttcatagtccagctggcttctttcccatgttttttttctttaactgtgcactaaaaccacagtgtcccggaataaattttctattgaacatctcacttgactgggaagtaatctgtgaatgtgataaagaaatggagagcaaatccttggaa

SEQ ID NO: 61867 - DNA, 2241 bp, Homo sapiens
agagacatgggggtgtttctttccctgattaacccattatttcactcaccaacatgtcacatctcaaattgactggaaggaaagaaaggtttaaaatccactgggtggggcactggagggggaggtgaggagtgatggagacaaggcagttctgccgactttacacttttcccagggctgttcctgtatgtgtcgtttgactgattgggtcaaattacacaagatctagctagatattcagattccctccaatgcgtctgtgttgtgtaatcctccctgccttgtaaaggaacagatctgattggccagggattgcacaggtggcaacttcactgagattcacaatgcattggaaacaagggaagagaccctggtattctatgacaaacgtgcagacagtctaaaacatcaggacaacattttctatgtgatttagctggtatttctgagctggaataattaaacagagatctatccacttgactaaaagaggaagcagtcgatgaggaagtcagtccctagctccctttgccccgaaatatgccaattctgaatatttcgcatcagcttcctcttaataaatagcttaccactcatccatccctcgaaaatatcattagaattgcctggatatatatatatttttaaataccaatgcccaggccacatcacattcaattaaatcagaaaaggtgataggtgagtatgacactcaggcatcaggcatcagtattttttaaagcccctcttgacccccaggtgattctgacatgcagctaagtttaaggtcaagtgttagagatcagggtagaaactcaggagttaactgcacggtgagccctgatctgtatcacacactcagggcctaatcagaacatgctgatgtttcgcttagcatacattgcttattgcaactagaatatttctcaaccaacatccttcttaataaagtctaatttgggccagttctacactgttagtgttgacagggaaattccccatcgcactggtgatgggagggggtggtgctttcaaatcaagccttgaagaagtatccggcttccagagcccaaaaccctcaacagaggagctgcttcaacaacttctgcatactgccacctggtggggcctggacccaacttcatcacagctcttcagccttgggcacctacccgcctccccaaacagatgtaatttaggaaaatgtcatgcattttcaatccaatttactggtgccttccacattgatcagacttccttctcctttttcctcccatctggttaatataattattgcttttacgtggcaaagccattttatgtaatagctttgtttgttactatggttacaagtttagtagccctttggaatataaatctatcatccctgaaagtagctttctgtgtgtcaaggtgcagcccttatgtaaggagagtaacagcgttagttttctgtcgtaaggaaagtggcctttcttggtcttatttttgaaagttctacgagcctagcctagacactcccgggaaactgctgggtgctgtcccactttttccctctggaattttcctaactgacgaggcatccacgagcagctctatctgggagaaagtagggaaacgtcggccgaggggcagctgtgtttgctgggccagagccctcgcattgcataactggtgtttttcctggtcagtgtactcttggctgatttatttaccagttaaaggcaagggctgagaatataatctctcaggagttaagtttctttgcgtgtaatccctttccctcacgcatctgaagcatcggcccttatttcctgatggaagtggagttataatctccctttggaaagtggtaagagttcagtgctgggttcaatctgccaccctcaagtgacaaagcgtgacagcgtctctgctatagtgcttcacacccaactgaatcagacgcagccctctgagcacaaaagtgggatggcctgtgaagctgggctttcttcccattctcagccagtaacagcaaaccttggagagtttataccatgtgtccctgtacgtaacctcatctaatcctttcgacaaccccaggaggtatgcattgccatcaagttggcatcactcccattttacagagaaggaatttgaggctcagaaggattaagcaccatccccaagtcatataactagtgtgtgggacttaatgtctttggaaagtcctggttgctaacttaacagagcctcact

SEQ ID NO: 61868 - DNA, 1439 bp, Homo sapiens
aggctggagtgcaatggcatgatctcagctcactgcaacctccgcctcccgggttcaagtgattctcctgcctcagcctcctgagtcgctgggattataggcgcacaccaccacacccggctaatttttcatatttttagtagaaacgaggtttcactgtgttagccagaatggtctcgaactcctgacctagtgatctgcctgcctcagcctcccaaagtgctgggattacaggtgtgagccacggcactcggcccaagtacttcttaactgcaggacttctcagaggcttttaatatggtaatgagtgctgtgcagtgagatgactcaaatcaatatatagccaacacgtttgatatgaccacagaacccatttccctgaacactttttatcacctcctagagcaggggtcagaaaactactgcccatgtggtctgatctggccactgcttgttttcgtaaattttcactgcccacagccaacctcatttgtgtacatgccgtccatggctgctttcacactgcagccgcagcgatgagtcatgagacacgcacccgtggctcacaaagtctaaaatatttactctttggccctttacggaaaacgtgtacaaactttgtcctctgaaatatagtttgggaacctacttcactcatgatatcaataattctaaaaaatttcaaacaatttttaaagtcaacattgagaagttttccatggttagaatttaataattacagtcaataactctcttaaagcatcgtgacaataaagtagaaggacactgtgtaattctatatggtctctgtcttcagggagctcccaagctagtttgtgaaaaagagaactcaaggcacaaacaactggggggcaagagatgttctaaacactaagaggaggcaatatggcatagtagaaagaatgcaagcatgtgtaagagtaaaacatacacagggcgcagagtcacaagagtcaggggttggtcttggctgtgataccttctcctgcgataagagtaagacctgctttattgagcacttactatgtgccaggcaccatcccagttgctttccatgaaggattgctctttaattcttatcataatgaataggtactattattatcccagtttatgggtgaggaaaccaagtcttaggttgactaacttattaaaataaagcacatacctagtaggtggtgaacaagagccaaaacaagtctgttggtcagctaaccaccacgttatagtggctgctgcttaggggcagcatatatcctctgcatttccccagaggtgacagaagtagtggagagggtagtgctctctaggctctgacacacagcccatgtttgctgactcaacaaccacacaacgtaatgctatggcacctcaggtggcagggagggtatcgtgggctggactgatcttcagaaggc

SEQ ID NO: 61869 - DNA, 1789 bp, Homo sapiens
aattgggtggagaatctaataaacagggagctatgccatcccaaaggagaaaaaagcaaaaagaaatttcagaaaagataacaaattagtttagcaaagtcacaaaaagagagggcagacaaaaataaaggcataggatgcagcgtccagggaaagaggaaggggcgagtggaaacagctggaattgttcagctgtgtcaacattcggctgtttcacagattgactagcaaagtgtcatctgaaaccaattacattcccaaaaccccacggacccagttcataacattgattaatccacattgtgaaaaagtccccaagcaaaactagaacagctgtcagcccttggagctcaaaaaacagcaattgcttgaggaaaaaaaaaaggaaagaaaaaagaaaagaaaagaaaagaaaatctcctcttgaaattttagggattttcaggaggtatgtctactgaaaccgaagatagatttaaaacgaactcctccacctcctgtctgtttgagcacaactggctataattagaaaagcaggggtcatgttagaataaacccaaagtccattcccaaagtcagaacagaactgcctcacagtctctaataccttgtatctttttgctcctttctggagaaaacaccatcgtttgatgtttttaaaagtatgtttattttttcttctcattattttaaatgcattaatctactccctttgggcccataaaaatgtagttatatgttatacgttttctattaaaagctgtttttataccgtttgttctatttcacagaggtagaagaatacataaagtcctcgatttgcaagcatccaacttgtgcatgactcaaatacaaaaatggcgaccacacctctctgatgtgcaaaactactggtataggagcctgtaaaggttttcacacacacccgtatgcccccatgggatcctagatacctggtaccttctagcaaagccactcatccgaagatgactcactcatggcaaatgccttggccttgactctgaagctactgcagctagaaatccaccaccaggtatggtagaagagaccccaacaccatataagcagccacgaacatctccttaagaagtctcaatttctgtagaccctggcctaaactcaccactgtgaggatgcagaagttgtaggcatctgatcctttggacagattttttccacggaaataaaatacatgcttattcatctgctcattcattcagcaaacatttattgaatgtctattctatctcaaacactgggttgtacccaaaaaagcaatgttagcttacaaaatgtttgcacatgctgaattttgtagatgggtaaactgaagctccaaaaggtttagtgacctgcccagggccatctaactagtaggtgttggagtttgtactcaaactgaaggctatctgataacatttcatactcttttcaaaaaccatatttactacattatgcttgacacaggttttcataagctagcaggggagcccaaaagcatgcaaaatatagcttctacctggagatgcattccaagttacaaaaaactgggtataaattggactttaagaacataagcggtttacatattcagattacattctacttttgctctctcctctgtaaataccccattagtaatctaacggactcctctgctgaaaagccatagtgtaattgcaagttttatgaattgaagtatgtctttgatacacttatcctttttcttctgcatgcttatgcatatgtagcactaaccaatattacc

SEQ ID NO: 61870 - DNA, 996 bp, Homo sapiens
taaatatcaactcagtctgcgggctgggccctggtgacaaatgctttctccaatcttatggagaatgaggttgtgcaaggacacaaaatctaaaagtatataaactagaggttttgagcactttttaaaaagcagcagaaccctttgcttaagcaaaatcttatgcagaatcctataggcaaatcagattacaaataaggatgcttgttcgaggtggagtgctggggactggaggaccccaaggtccatgattttccatcacctcctggccttttgaggcagcccatacaggccctgaacaaacacccaggggccccttgggacacaaactactttctaaaagtcaggacaacttccaaactggcccatcttttctactaaaggcctggtcctcagaatgatgagatggcccctgaaggatctggactgctacttcctgctgcttatttgatcattgatagggggtttggaattatgaatcacaagccaaagggcagagtccaaaagcttgtctgcaagtggaagaagtgagaggagcaggagattggctcttcttggtgaatcccagagctgaggctttgcagatgaggaaggcaagaccccatgcggacagcaccttaccaggcccacacccacattgggggagtgtgaggcagagccaggtgtgaaggctcctgaagtttcttctaggtggctttggggaatggctgtgtacactactgtcccttatagagctgcagccttctcggaatcgggtacatgctttatccagtgtgctctggtataagttcacaagcagtgcagcatggggcaaatccaatgacattttgttccttcccagagactgataagctcatttagtagcgacaattcacagtccaaaagaaaatgctgaatctcacttacagacatagtaaaattcaggcaaagacagccagatagcactggaagctattttagacatgcatacatattttaataccataaatctttatt

SEQ ID NO: 61871 - DNA, 599 bp, Homo sapiens
tgcatggcaatggatacaaaaaataaaaaatagtgagtaacacaaggtcttggcatccagaggctcttactctactaagggtgaacaacatgaagaattttaaaacaaggcagaatgtgagaagtactacaaagaggaaaaagcaaacaagagggggagtgtttccgatggggcagactgtggaagagcttgtggaggaagcaggatttgagcagggtccagaaagtcgggaaagactgactcgcaaataaacaggagtgaaaggagggaggagcctgtcttgactggtctgctttccagcacattgggctggttaaatatctaaattgtaataggctttctgcatgcaaaataaataaaaggaattgctacatacctggaatttgctgcaaactttccccaggatttaccaaggtcccacattttctggccttgcctctttctctgacctcagttctgtcatccctctcctccctcccttcacagtagccaccctgttctccaagggggctccaggactttctgcttgtcatcttccctctgcctggaaggtaaactccatcagagcagggacttttgtgttacttacaattttatcc

SEQ ID NO: 61872 - DNA, 3377 bp, Homo sapiens
tggttcaaagaatgagttggggtgggggcagagggtggggggaaggggatatgggtcagcaggtcagctgtgcaagatgtatcccactcctactatgcccctctcccctttttgctgagcctaagggggctggtggcactgaatgctccggcgttacataatttgcaagaacagcaagttacggatttgctagtcggctctgcagcctgccaccctgatcgcttgcaagaacaccttctggcaagaatgacacctgaagatgttaataacacagggtgtgggggggtcaagaaggagaaaggtggcagcacaaaccaaaaattagtgcagcttcctaaatactatgtcccccccattccaaaaaaaaaaaaaaagccccagaaacacatgaaggggattttctccagtgtttctgattaaccctgttacataacccgctcgcattccaaatccaccgtctcagggtctaaatatactctttgcagccaaaagctccccgcacacaaactcaccgagctagcggcaggtccaggcccccagccctcatccccttcccttttgtcccagccctcgccgcccccctcccgctgaaaccgcggttcgccgcggtcaccctttggaaatcgcctttaattaaatgtttttcgcgtgtgtcatcctgatggcttttactgtactcgaattccgtgaatgggaaagcgcctggacagggggtgtggctaaggtggggggggggatactgtaaaacagccagcacatgatcagccatattcctacctccaactacaacatcgagaggaagggagcagttcctggggcccccattcgcctctacccagccctccccaaccgccgccagaagccgagtgcaagaggagggggcgcgctgggccggtacccaagccggggctggagaaatcctctccgtccccagctccaggcggctcgcgcgagcacgcttcctccggagtgacaggcgcgatttatacattatttacaacagtaattaaagctgtagcttcctcctgttctttgcaaactccaggcgcattcaaataaataatcccccactctcgagaaaaacacacatcaggttccaataccttcaagaaagagtgagctttcctcaacagctcactttaggaaaggagggagcaactgagtcccccccatcccccccaacacacgcagacacagaccaaacaccaaaatgaagagtaaaaatcgccaggggaggagaaaacattgcttgcactatccaaccagcatacaacttgcactgaccatccccaggttcctgcagaaatgcttggaacctccgagagggaaggattcccagagcagaaataagtttcggtgcttgcttttgtagacgctccctccggatgcgcgtggagcgccccacaggaccgccgccctctgcgcgttggcgcgcacacgccccccgccagcctgggcgccgggctccgaacccccggtctgcaaacttgcgcatctcccctcgccgcgcccgccagacaacttggcgaacagctcgcccgcccgcaccccgcttccttcggcccttccttcaaatcccaaacgcaccgccgtgctccaaagaaggtgtccacgtcgcccccagaccccggagcgccccctctccacccccgggacttcccaggtcgctcactcctcccgccccccgcccagatctgagagggaccgaaaacacacccccgactcgggcagccagggccgaaactgtcaagaggagaaaaggtaaagcggaaggagggtggccataaacagatttttttgccccttcttaaaaggacactgccgctttaaaagtttctttcccgggcccccactccccgcatctccgtattttgggggagcgtatttaattgaggcaacgcagctttcctccagtgtttgcagaaaaatcaaagccaggggggtgagcccgccggctgtcaaccttcccgccgcctcccccgccccactctgctcccgcaagccgagaacgggctgcaaaagtttgcaacatttctggggggcggaggggggaggggaggggggtcctccgggctcggggcgccgccgcaggctcgcgcgcggccgccggaccccgcgccccgggcgcccgctcccggccgccccccgctccgcgcccgggctcccgccgccccctccccagcccctctccagcctcctacctctgctggtgctggaatagctctgtctgcgcaccggggcaggcggctcgctcttgcgggcggattcctggttcagcggggtctccctggagccggcggccgcgtccgcgccgctgctgcctggctcgctggcggcggggtcgggggctgccggagctgactccatgttttttcccaatgtagagatcgctggagatggcgagctccgagactccctctatcttctgttttcagagcaactctatggtaccaaaaaaaaaaaaaaaaaaaaaaaaaaaaaaaaaaaaaaaaaaagaaggagaaggcgaccggcgaaagcaggagggaaaaagcaggcggcggcgggcgggcaagcaaaagcgcgagggagcgcgcggagtgtctgggtggacgtgtgtgtgcgcccgaaaggggacaagaggcgggtctggccacaggcagcgctagcgagagcttctccagccggcccccacacccacattccccaccctccagaccccagaccgagagccacagactggctgccaattttgggaggtggggaaaagaggggaggaggagaacagagcctcccgcgccccaatcctcccctctccccagcccagggacagaaattaaaatcggtgagatgattccgtgcctacttctgagactctctcgggaacagaactcgtccccatccgctgccagcttgggtagagacaaatccgattgtccacgtccacgttgggaaatcgcaggtagccccctgccagccctgccgagggctgaggagaaactaaaaaggaattagaacggggctgacatcccaaggaaggcggaggatgggaggacgtggcactttttactttgggatgggacggccagtgggtttccaatcttggttaaagacatctgtgtctaaaacagattttgtgaatctagaagcgccatggacagtttctggcatggttgaaagaggtcgctttcagctcctttgctgtttgtccgcgaaggatccagaaaccatttggcagggcattttctactgaagaaaactttggcctgtttggtcgacaactatctaagctggataaaacatgccacgctgcatctagctcaagcgtggctgctaattgtcaattcccactggtacttttcctattaaatgtacagtctcatccataaaaggtagat

SEQ ID NO: 61873 - DNA, 1417 bp, Homo sapiens
caatcctttttcctaatcatctgcatcattctgtctaggagtttacctcagcatatgctgccgaaaaagaacatgttttgtgcactaattatctcagatagatgctacttgtctctttcaattaaatacctttcagggaagcagcagtgtaggataacttcttttatccccaaatgtgtggcagagtgctaagtaatcatagtagccaacatgtattgtacactgaccatgtgcttgccattgttctaagtactttgcaagtattaacttatttagttatcacaacaaccctatgaggtagctactagtattatcctcattttacaggtaaagaaactgagacttagaggagttttgtaaattgcccaagaccacacagctaggaagtgggagaggtaaggttcaaatgcaggctgtccacaccattggtcgtttattgtaatggttgctgctaggtaatctgtaaatgtttaatacttgttagtggatcaattttggctaaagagggaaaaaattaactctaaagcatcctttgtacagaaagggggctcgtgcttcatagtgagtattcctaatttcctgttacttgaattcgatttgaaaattgaatagaaaaaaaatcagtcttttcaggctgcccttgggcttttattaaaaactacaggaaacacagagtctgatcagggctttcaaccgggttcctcctcatctaaaggtgaagtggaaactgggcaagtatccaaacgctttaccaaaccagctcatgctactggaagctccctagaaaccatttaggggctcacaaagcccatagtacacagggaaacctgggctgctcatgaaaagaggaaacaggaaacaagcatcaaagaacaagctctttggatgatacgttcacgttacatatatgaatcatctctcaacagaaaggacaaaggctgctctttgcttccaggcttgttacgtccacgctgcatccaaagtggtaatgtggtgtttgctaaggctgccctttgaaaagctctcctggtcttccagaaatgcaagccagcagcagagttgacagggagtggtatgagcagtcccttgtggagcatgaggattatctctcctccccctatcatctatttggatgtttataaatgagtaacgaggtcaatttgggacaggcaggttttgtgccacaatttggacagatgttcagaggctctggaaagcacagctgcctggtccaagtggtggttcttgccaaaagtactaagtgttcaaaggcgatgggtcaccagggacgcttggaggagtccactgattatcagggagtctgctggtattgatgctttccaaccagatgtatacttgcagaatctttagctttcacaaagtacaaacacataaaatcaaaagacatttttagaat

SEQ ID NO: 61874 - DNA, 916 bp, Homo sapiens
cacaggtatccaaagccaccatgaattgctaggtaagttctgactcttgattttcattcaaggtacccagatgatttgtaatttgttttctaagccttgttgactctcttagacagctgggctctgacaccttcattgcaagaaactcccaattccagtatgcagcagggactggaccctgtctcgtcttgatgaatttctctgactcatgacactggcactgaccagaaaaaacaggactaattgccgtctttgtgccatttccatccctttggttcatagccctaagctagatcacatcaccttcaagctctggaatcttgactcttccttggggatacgacacttaatttctcccggtcaagccatatgagtgttaggagacctgctaagcccacactctggccaggaaactcctgtcataaatctcatattttcaaaacagttttattgagatacaattaacacatcataaaatttatcatttaaagtgtatgattcggtggcttttagtatattcacagagttgagcaaccatcaccacaatcaatattagaattgacctcttacccaaaaagaaaccttgtattcattaacagtcactccccatttcccccaaaccctagacaatcattaatctactttctgtctccgtagattttcatattctggacatttcaaataactgggatcaaataatatgtggccttttctatctggcttttttcacttaatgttttcaaggtccatccatgctgtacttccatcagtacttcattcctttttattggaaaataatattcgatacatattatcaaccatacatatcaccaatgttcataaagaatatcgatgtacaaggcattgtatggatataccacattttatttaaccattcatttggatggtttctact

SEQ ID NO: 61875 - DNA, 975 bp, Homo sapiens
ttcataaaatgtaacatagtatataagaggaacaaaatggtatacagtgtaacacagtgataaagaacatacacacatggggttgaatgcctgcttcatcacttacctaaagagtgaccttgagaaaatggactaaccctctgaatctcagtttccttatccataaaatgaggataatgtcaactccataatgtgattgtgaggactaaataagaaattatatcctagcatttgacctaccatgtggagagttcccaataattcccctactaccaaaggtcagttcccctcctgttctgttttcctttttgttgattgcaaaacttcaaatgaaacaaatactatgacttcactaagaaaatatggtgacgtggttaccaaggcttacttctttatagttttgcaggcaatttagcaaatgttgtattgtttgattcacataaaatcctctgtgctagacagaaaacttcatggtttttgtcatggtttttcattgttgtgaaacaatttcccatggatgtcttatatttctgtacatcttgtaagcaaacgcactgacagcctttttggtggactgtctcattaaggatgtttttatcaggagcatcaacctctggaacaaagagcagatttgttcactgttcagtgtaagaaagattatgttgtcttccagggcaacgggcagattttcatacagctcattataaaagatttgggcttcctaagcttggagttcctcagctgtgatgcaaagccactgtgtgtatggcatgcaccttagccactctgtgaatccccgtgggacttgggggcatgggaaactgatgcaaacatgaagctcatactgcctgctctgggatgagtaataaagttcttcatctctgaatcacagtctcatgtcttcttccagcatccataaaactgtggcagactaacatattagcttccaagtaaggtaaaagctcagacccctta

SEQ ID NO: 61876 - DNA, 688 bp, Homo sapiens
cttcattactttctaaagtgatctttctgtctgtgagactttgttgacaaatcgtttcatgtcctctgggcaagtcttggaacattctctttgtgcttccaaggagaataataatcttggcaagaagctgtagttgtactagctttatttctcttagctgcgggtgaatgtccctccaagggctcctgctctgggccaattttggatgggtgaagtgtgacataattcttatttttgcatctgaccatttagaagaggttgtctttgtcctttcagtttcagttctgataggtcactttgtggtgatctatatttaagaattgctgttgagaaacattgtcttagcataaatactagacgttgtgctttaactcttccctcacttctcacccccttgctgatctaggttttctcttgccaaattgccataactcctcattcttttgcttaggtctctcattctcttttgcatcgtatcaaatgtttatacaattttatgggattttggttggtggtacatgagctcctatgactaactctttaacctgatgaaaaagcctcctttgacacctttgcttctgttagcacatttgcaagtttggttttgtcttttgctacccctgcaagctcccatttgtagttacattttttttctaatttctatcaaagatctatgattacatgattt

SEQ ID NO: 61877 - DNA, 735 bp, Homo sapiens
ctcataagttctctcagcactgccatgtgccccatcctggtgtgaagcaacttccctgctaccacctagtctcacggcaggagaagagtttggggagatggacacaggtcaaaaaggaaggaatttgagttttattctaaatgcattggaaagccattagaaggtttaggcagataattgatacgaagcagttctcattatgaaaggatcacattcattgctctgtgagaatggattgggagagacaggagtggaggtagggtgactagataggaagctattgcacaatccaggccagaggtgataatggcctaaacctaggtagtggccacaaagattagagataaatgcaggaacttgatacggcaggacttgctgatgtgttggatgtttaggacaaagggcaggtggatggttacaccactattgacatggaggaacctaggttgggacagattttacatgagggtgagatcaggagttctgccttgaacatgttgagtttcagattttcctgagatcttcaaggggagatgctaagcagggagctggctgtgtgaattcaggaaacaggtgtggacatcgtcagcacatagcggacctttaaaaccatggcaatgaatgcaattacatggtgattcacgtaggccaagaaggaagagcctccacctagagagcttgagtagaggaaggaacagggagagagggggtcagggaagagaagtgtgccacaag

SEQ ID NO: 61878 - DNA, 1699 bp, Homo sapiens
tttggaaggtggaaatggggcagattggctgctttctgccggcaaacatggcccagggacgtgcaactcttcctcagcatcgtagaacttggggagcttcagtggtggaggcagtgacttcctatcgctggatctcagtgactgcagaatgttctgcagctctgggggcaatctcctgattggggcagaaaaggcggcttccctggtgggtcaggtctgcagtgctctgggggtcatcaagcccagcttagggctcactccaccagcccctcagtgatctgataagtcagtttcccggattacatgttgttctctttcaaatacacagggggtttctggttctggttctcagtgctcactgagaacaccattccctataactcttctaagcaacagcctgcaaggaggaaggaaacaggcaattaacatggtgaaacaattcctccttcctctgtctgtccacccaatttctgggggcacatgacccaggagtggcttcactggagttggttccctgaaatggaaaaccatgaagggtatgagactgcgtaatatatgctgatgtaagggtcaaacagaaagtcggagatgaaggtgaataagacaacaaataattctgtgtgggacattctgtgcaggtctccaaattaaatggaaatggtggggattgacgaaaggttcagagcaggaattgtgaaacggctcctggcagcagcctgaatctactctgcactctgtcatgatgccattgcctgggacttacgaattttgcttgtacaagatttattatcttattttaaactacagaattccaaaacacaaggcaaacccgggcccaaaggtctttgtagaagtggtagcagctgagaaggggacgttcataatggcacatggtaggtgctaaaacttgcctaatgaatgaaggaatggttaataaagggcttcttatggcatggctgtgagcattcaccctcacctctttttctgtggttgagcaaagtgttttgagctgcgtttgtgctcgcttgatacgtaatattgttaagagcttgatattgctctttgtaaacctcctcaccattgggactatcctccttgctgcctgcctcctcccccttgtcttcttcagtctggaatggcttcatctctgctttctctcaaccctcatagcccaaacttggtaaaccctggatcaagtcctaccgtcttcttcaaactgctgggtttctctatgatagacatctcatctctctgagctggcaacaccttgagcttgtacacactttagagagtttcatcctgctgagtcatgaagctagctgagtaacattcatcttgctgctagaattcctggaagggaaaccagctcacctgcagcccattgcatctgcccactacttcacaggccttaactctctaagtcatcatttcaatccttcaaaagacacaagggatcttagagtttaaataactttcccgagggcagctggcttggaattggccaagctggaaatgggccttagtttggaactgagtctgtttggacctcgtgtgtgtgcgtttgtgtgtgtgtgtgtttgtgtgtgtatgtgtgtttgtgtgtgtgtgtgtgtgtctcctttatttagtttaccacatgaagtattaataattttggtttccagcttcatccaaaatcatcattctcagcaaactatcg

SEQ ID NO: 61879 - DNA, 769 bp, Homo sapiens
ctcttgaggctaagcattcccactttctgtgcccatcaattgctatttctgttagtaatgcaaacatagtttcagaggatcaaacacacctactccatctcccttatatgacaattcactgggtcctgtgaccctcagagtatttatataacaaacacaggaagaacctgtagttcatgacactgggttgtaaaaggaaagtgagaaagcagtacttgaggagttttaggaaggctgtagacttctggttaaacgtgacagattgaacacatgtttactttggctctctctcaaaacccaactaaaaagacagtaaaggaataaaacaagtttaatcttataaaaacaaggagaatggagaaacagcggaccagagatcctaaaaaagtactttggaaggtggaaaactgatggatgaaggataattggaacataagtgcctgaacagagaggtaccagggaaagccagatgattcatgctttagcactttggaaaagctcaggtattagagatgccagattcctctaaaggcagcagaagagctgccatcagagtgactgctggaaattctgtctaaagcagagtttctcagccttagcactattgacatttggggctggataactgtttgatttagtggtgatcccgcatcacaggaggtagagcagcatccctggcttctacccactagatgccagtagcaccacctccccactgtgacaaccatgaaagtctccagacattgccaaacatcctttcggggggcaa

SEQ ID NO: 61880 - DNA, 1752 bp, Homo sapiens
ttccagatgcagtatatatatgtacccttcctagcattgcctaagtcttctggaaaactaagtttacggaacctctgacaagcatccttggtgttggtgtcctccagggcagggatgtctgtcctcactgtggttagactgctggtgtatttggtggcagatgtgggagcctgaggtttctgggaaggacctgctctctgcaaaaacacccacaacagagaagtgttcgagaggtgggaaggtgtttggaaatggctggaagagatatgacaagcatgaacagatacagcttggggagtgagtcataggcaggtattaatgaaaagaaacttaacacttgaacaaagaatagaatcactcagaactgtggcaaacatgatgaaaataaacactaatacctatcccaaaagaaatggcactggagacagcccacagcgcaggacatcaagactactccttagagccctggctggtttttgcctcatatcctacagaagccagtggggcagaagtaaagtaaccagctgttggtctggctatgtactattgtctgtttcatgaattgttcttattctgtggtatcttctctgcttgcctgcataagaacattctgctccttttcacagaatgcagtcctgttttcctttaggcccagatcaatatcacctcctttgttaggctttccctgacctctctccccgtgcagagtttaatgttctttcctttgggttttaactcatcatactgtgatgtaatgtttatgtacctggatgtcagccactgaactgggagctcatggaggccaaagtctttctcatcctgcaatgtattacaaactacccaccacaaactgggcacctgagagatttcagctgaacacatgcatgaagcaaacagcactactaaagaattaaaattaactttgaatgaattaggatgctcagtgaatgggaagtggcactttctatttaaatgaagttttccaaaaagctcttgtgtcttatctaattgtaaataatctatctcaattttacctgtccttgctcctgcttaaacagaagcatcagtgaatatcaagaatctgtccttgctgttggaaagcacaggaaggagtaactgattctaatcaatgagattgtagcaggttttgaaaccgacatctcccctcttctaatactgctctcatttgaatgacttctttgatatctgtatcctctattaggcttcgtcagctctgcaggggaagggaacagactgcattgctgcctggggtatctcaaaggcctagcatagtgcctggcactgagtagatttcagtagcactttgtttactgaatgtgtacacgaattaataaatcaagggcttcacaggaaagggggctcactgaacctcccatcattcataccaacctcagggctacatttacagagtgcccactgtggatcaactgctcttctaaacacctcaaaattaacacaggataaggaccattgtctatgttttacagatgaggaaaccgagattccatgagttaagtaactcgcttagactcacatcaccagtttttggcaggcacatcattcaaaccagttcaagcctgatcccaaagtgagtgtgtagataaaggggaaaagcactttctggctgagaaaaaagcatggtaaaggtgtggacatggaagcgactgatatgttgagaaactggctggggagtagggctgtccagggaggaagaggctggcaagggagctc

SEQ ID NO: 61881 - DNA, 662 bp, Homo sapiens
atgtagggaatacataccaggaataggtatgttcttaatacctcttcctcaggttaagccacatcaagaaaatagtaggtcagcattatgagattatctaaaattattgtgaacagtttcttacctttaaccatgtagcccagtaactctcaacccaagctacacagtagaatcatgtggggaacttaaaaaaaaaatcaatgcttggggaccgttctggaccaattaaactggaatcaatggaatagagactgaatgcggtattttaaaaaagtttcccacatgattcaaacatgagtcatggagtgagaatcactaagcaatcatgatgtcaaggaaaaagggaatggctaggtggcagggaggtatggggcagggggcactgctgctgatttattttggatgatcaggaaagctttcaataaatatatgacctctgagctgagatataggtaataagcaaagcattgcatacagaggaaatagcaagtgcaaggggcctagagtacagtaagcagtgtatttctcaaaaacaagacagcactgtggtccagtataatgagagagaggatgaatactaggagataaggttcaaaggtgggacagtggctggatgtctagaacactgaagcctatggtcaaaagtttggattttcttctaa

SEQ ID NO: 61882 - DNA, 1471 bp, Homo sapiens
gttcaaaataaagttgtttttaacttagtcttacaattccttccttttaaaataggtaaattaattaaaaaggtgctttacataggcaagataaagcaggtctattttttaaattgtaaataaattactttgatagagctaaggtaatatactggtttgaactacagtatttgccatctaaagtccaaaagctactttttctggaaatacttccaattcacttttagttcaattaggacaaggagtcagtgaagatagcttctctacttccttcactgtcaggtaactcatatagcactcattcacatcaaaagatacctttaacagatcatgttccccaacatttgctgcatatgtccatgtaagttttctggtaccagtaggatctgcccaggcaaaaagtcgagcctgtcttggcagcaagaccatttcttctggtgacccactaaaacacaatgaacagagagaaaatcagaatatcttggagataagaaacccaaacctgtagtttactgaggaagggattagcacagaagtcctacgaaattgctgtggttaataaaacacaactctacctaaaaacaagtaccctaaaatatctaataaactcatggtttttaagctcggggaaacagaatattgccctttctgaagcttcaatgcactcggaattgatccaagtggaatcatagcaatggaattcattaggtaaacagattgccagatcagggtccacctgtggaaatggctgtgaagaggaaatatgtttagtagcagaagaacttctattcagtgcttaaatttaaacatattttttaaagacagggtctccctgtttcccaggctggaatgcagtgttcattcacaggcaagatcatattgcactacagcctcaaactcctgggctcatgagatgctcctacccaagcctctcaagtagctgtgactataggtatgcattactgtgaccagctaagctttttaacaaatacaatacttaagatatattatgggtcacagcaacaaaaaaattatgttcacactgttactacacaaagtgtggtccgtaaacaggcagaataagtattacctggggtcttgcaggaaaaggcaaagtcctgggtcccatccaaaacctactgagtcaaaatctgcatcttaacaagactcccaggagattttaaaattgattattacaatttaagaagtatttgtccatttaatgcaaaaaatattccagagaactgggagaaaaaaagtaatccaactaggttttaatcctaatctgtacttttaagtctctcactggattcactccattagaattaagactagggaaatctttaacaaatttacatatatacatacatttatatgtgtgtatatatgcatgaatatatacacatatatacatatgttaatataaatataattttataaataaaattatacgatactttaagggcttaaa

SEQ ID NO: 61883 - DNA, 1578 bp, Homo sapiens
agtgtatgtttaagtacactatttcctgaatacttttatacacttaatctccaggataaaaacgttggcataaattcctgagcatgcaaccaagcagacacctaattaatgacgatgctggtcgaggcttgaatttctctctattgctccaaaacaaaattcaaaatcctcttcgtattgacggaaaagtaaatattaaaggaagaaatcattttcacaggagctgaaagcattaagagtaagaatccctaagcacacgcctatcttaaagatctcctgcccgttcctctccaaacccggtaatcctaaagagaaggaacccagttcttgctccctgtaaaatgatagtgaagataactgcgagatgcaacttcctccttttttcttagtgccacttcgagcgtatatgaccagacaaccatgctcactccacgcgataccgaaacagaaagggctctgtttttatgctgtagggccaaaggggccaccctgagtgcagcgagaggaccacagaaacgggcagggcggggacagcagggccagggcttggcctcgggggacgagaaaggtgggaactttggcagcgcgggcgggatcccgccgcatctccccagccggagtcgggactgggaccccgagaatccgcgggcggcagaggctcccgcatctagcacctgccgcaccgggatggggagtctcaggcggcgcagggagcagggcccgggcagaatcccggacggagcagccctcggctgggccctcagcgcccgcagcccactggccgcgccctctcgcttaccgccccagatgcccagcttcagctgggacttgttcaggttctccacatagtcccccaggaagcggttcagcaagtccgcgaccaccgactccagcaccatggtggcgctgaggcacaaggagagggaggagccggaaccgcccggcgcagctgagggctgcgaccagcgctgcaaatgacagcccctccggcgcaggcccacccccgcgccgcgcgcgtgaccccgccggtgcgcaggcgcgctgtcgcccggccggtagctaaggaggcccagctgtgatcccgaggctttgtaggcgccgcagccctggccctctagaggccgacggaggagtgcgggggaagttagcttgcgcctgtctcgtcagccgtgcacgagaaaaaaaaggaccttcgagaagaacaagggagggcaagagttaccgagtacagggacatctatgtggccgctctgctttcccgccgtcacctgctgttgaactccggccgcatcgcggtgtccggagccgcctggcctggagtatgcgctgagcgtcacctaggcaaccacccctgcacctgtggatcaggtgggggaaagggaccgaccgcgttcttgtcctgctagagttcgactccgcctggggcttggtctctgcttcttgaaaacattgtttttttattttgtttctgttttgttttgttttgagacagggtctcgctctgttgccaagggtagaatgcagtgtcgggatcatagctcactacagacttgacatcctggactcaagagatcctcc

SEQ ID NO: 61884 - DNA, 4939 bp, Homo sapiens
caaagattacatgtttgtatataaacacttaggtgtgtatgcatgtaaatatctcataataaatcacccagaaaaaacacaataattgcttaaatgatctacaatatgatactttcacattgcgatatgtttggcatttattggttattgcacaagtgagaactggtctgtaatgagagtgtgtgccaagcagatgcatctgagcttggcatggcctttaatctggtgtgacccacagaagctatgctaatgcacatgcacagccctgattttaagacaagaccagtggcaaccttccaggtcaacacacatgtataaaatatttaaatatatgtacaagagatatccagataatttttttccaagaccacagaataaactcacaataaatgtgctcatgtattctaacagttaaaattaaaatattatctatttgattattctgactgtcttttatcatgatttaaatatgctttactttttcaataaaatttgacccaagagtttgcagatcccctgaagcaactctgcagaacaatttgaaagcccctgattctagtccaaacagatggagaaaccaggtctagagaattacagggtcttgttccggctcacatagcccattagtgacagaaccacaacaagaaccttaaacctcagcctcccaggtcagtgctctgaccaatgccccaaagtgctgggagactcctgggccccacagtatggggcgtgacagatatcagttggtagcctagcatgaaatccttttcccacgtgggagagaaaagtcccgaagtgaccagtgacatttatgactcagcctgtgctgaagagcttggaaaaataatgtttgttaggtttggtttggtttttgagaaagagagaagccaaggtacatcacacttaagtgtagaggtgctgggtgtgcactggggaagcctctcaataaacatggagaggggagcgatgcctgccatggactagggtggaaaggggtgggttggggggctgggtttgaatctgggccaagagaagaagggtgagtccaggaggcctgcaacagcagtctctccatctgccagacaattgcaacagctattctaagcactggcctgaggccagactttattgatttcagcaataaaattacatgttccagagctcatctgttttggaccataaatgacaaaaagagctattatagagtgtcagatttgtccctctgtttggtatgatgtctcctatataatacttgtttggcctctacaaatgattcatttaggacagcagaatttctgagtcactggcagaataattgactcacatttctctcatcattattgtgtgttctttcttgctggagccaaatactattcatgtttcccttcgtacatgttaatattaatgtcaccagtgggctgtgctttctttttgccaagcaaagacatagtaaacatgataataaaacaaaaggcattttcaatgttggtgaagtcctgttttgaaagggtacaaccacattttctgatcatggaacaaaagaacaattatccaactttgaattatcaaatgactcctcctcccatcctaatgcctacttaaatccctacttaaaatgcctttctagcgttgcctcagtgaagccaatttccccttcctacccatacgcacttaccttctgtctagggctcaggaagcaatgctacaccttcctctttgcgcagactccctccttcctgcagacaaacgctgtcattttatccctgtgtaatgtgagggtctttttcagggagaagagaacagaaacccttcaaactagctcaacaaatcacagggactgtgttgaaaggaaacaggtgtatctcagagtaatcaaggaaaggcagaaagcggggctgagcccatgaggagatggggcatacctgtgggagcagagcaggtggtcacaccccttgggctccttctctaaagaggttcattttctttcttctttttctttttactttttttgagacaaggtcttgctctgtcactgatgctggagtgcagtggtgtaatcatggctcactgcagcctctacctcctgggctcaagtgatcctcccgcctcagcccccgaagtagctgggactatgggcacacaccaccatgcccggctaattgttttgtttgtttgtagagatggggtctccctatgttgcctaggctggtctcaaactgctgggctcaagcaatcttcccacctcggcatcccaaagtgctgggattacaggcatgagcaaccgcgcccagccaacaagtgcattttcaacaatttaaggaggcacgttggtaagaaagttatgcccccagtgttgtaaagtcagaggaagaagtgcgataaggggtggatgcgtctagccataattgatacaccaaaggtcaaccctgtgacttatagagaaggtggtccaacagcaccacacacaatgtacatatacccatcagctagtaattcaggtctcacccttgacccagcccaagttcatcctcagacaattagggtgaggctcactgatttgtgggggctccccagagttagaccatggctatgctcttggctccaggaacccccaaactccctgaaatccaatcagcttctctcttttcttttctaaatatcttttcaagtcctgatcatttggggtgggggcaattttatgtcctcatgtgcaagtaatctctgctctacattgccccccaaatggaagacctgaagcttgtgtacgatgagaaggaagctttccatcattaacgcagtgcatacctgtgctgtgatgatgtgttccctcatgctggcaaggtgacaacccccaagtgtacttccgatttaaagttttgtttcttcatcatttaaaaggagtgtttatttattttgaaaaggggtgtgtatttttgcagcaccttcctaaaattataaaccctagacgtttgtgaatggaggagggtagagcagataactgcctgtctactgagcaaaggatatgggaatagactgagaagaaagggaagaggggaaagacagggaaactggcctgcatagttgctatcatgaggaagtgagtctgaagatgcattggcatgggaataggaaagacagaaaaatcccattgaaactaactcccctggagctacaggtggtttttcttgacagacagaagagttactagctacaaccaccatgttgctggagactgcattccatccttggacaaggggatattcaaccctggaaggagatggccctggaaggagatggccctggaaggacaacgctagtggcattgacttgcctgccatggagctactgactccagtctctcccagtttgtcaggtttttctacaggagtgtttgccttgaccctgcttagaaacagggcatggctccagcttctgccagcctatcacagttgaaaaaataagagaaaaagaagaaaggaaaacatgaaagcaaaggaagggaaaatagcccgttctaacttcctttgcctttggggcacccgagagccactcctgcctaccacatgagagtttgtattattgtcccctttagactggagaggacacagagactccaggagttaaatgcccgaggacacgtggttgatgagtgtcagagccaggatttaaacctgagtcactctgacttctaggcttgtgtgcacaggcactgcttgtactccctgggatgatctcatttcacttgtctgactgtcgaggagtaattaaagttcaacccctttccgttaccgtcactcacacacattaacacaaaccaaggccctgctgtcccttggtcagcagcactgtctccctgcagaagtctgtccacctactggccctttagtctaaccccccaccccatccatgtgtcctacccattcagcccataaaggtggcccaggccgttcctatatcctgtcggctcccactcctcttgctctggtcccatctttactagactcccaactcttggctctacagcctaccccacagcctctcaccagcaaacccctccaaatttggtattttttctgatgtcctggagttcagagccagtgtcttctccagacttcagcttggtccgtgtctctggtctttgactctctgctgccatggaacctgatcatggttgcctggccagctccctgccctggaaggagcaatgctgcttagctagagactcttggcatctcaagcaagtcctcactgccctgacacccactgttctctctcaggttcagggatcaatgggtccaagaacagatagacaagcagtaacaaaggccaggggagccagggaggcccactgttcctacagatggccaaagaagacagctgtagggacgagacatgcacagtgagcaaagccatcagcccctccagaaatccatgggaactaaaggcaaccccatgtcaggctggaggagagcccgcagcgaggggacagcaaggaagccacatgatctgctctcctccccatggaagaagccccctccacctgccctcagggcaggacagaaccctgcgtctccacaacctggcactggagaggcccttagaaaccaccaagcacaacacttaccctgtctatgaaatcattttgcctaatcctctgtaaggggtgatccagccttgttcatctgatagttccagtgccagggagcttactgcatacctcctttcattttcagatagctctgaccgtcagaaagttcttcttttcttatgcagttctcacttacttctagttattttttaaattatttttattttttgaggcagggtctcgctctgtcaccaaggctggagtgcagcagctcaatcatggcccatagcagcctcgacctccgcgggctcaggtgatccttccgcctcagcctccctagtagctgagact

SEQ ID NO: 61885 - DNA, 1025 bp, Homo sapiens
aatacaaaactagccaggcatggtggcccatgcctgtaatcccagctactcaggaggctgaggcaggagaatcgcttgagcctggaggcggaggttgcggtgagccgagatcgcgccattgcactccagcctggccaacaggaaaaaaagagagagagaagtaaagggcatgatttacagtgaactgttcttggcttctggtgaatttctactcactagactgagagttcacaaaactttcatttaacaattagttgtagagtttctagactccagcttctttccttttttgacaattggggcagtgttttcctctctccaatcttttagatttttcctgttttccataattcttcagatgactgacaggcatgccaatctcatttacatgcaatttgcctgaaccaggatatgaagctgttcaaaacaatcaggtggtggtggtgttttgccattcctttctgctatcttgaggttcaatttcctggtctccacgtttttttctttctgtaaatcattaacattgataggtgagtgaagttaaaaaacagttgtgctttctctttgtctcccataaacattaattacaccacctaccctaaataataggcttgcacctttgcagttcctcctgctctgaaccaaataaaaacagttcttactacagttctatatatatatattttttttttttttttttgagacacagttttgctcttactgcccaggctggagtgcaatggcgtgatctcagctcactgcaacctctgcctcccagggtttaagagattctcctgcctcagcctctcaggtagctgggattacaggtgcccgccaccacaactggctaatttttgtatttttagtagagacagggtttcaccgtgctggccaggctggtcttgaactcctgacctcaggtgatccacccgcctcggcctcccaaagtgctgggattacaggcgtgagccactgtgcctggccttactacagttcttacaattgtctttaattctaagttcatc

SEQ ID NO: 61886 - DNA, 2336 bp, Homo sapiens
ggctttaagttatttaactgcaaaattctcccgtcccaggggtttcagggcttaagaaggagtcagtgatgtgttaaagcagaggagccatggagcagggctcgctgcgcgcagaagcttctggggcagcagcttttgaaatagacttttgaggatgagtgggcaatgacaggttagaggacaggggcatctgggcagagggccaggagctgaccaagggaaggagcagtgggaggggaggccagcagtggtcaagccagtctccaaagggcctcatccattacatcagggagcctgggattctcctgaaaggaaaggggaactactacagtttgtgagcagggtggtgtgtcataagccagcttgtgattttcggacaaggcaggagacaggtcgcaacaaggtctccctagagagcagctctgggagcttccatactgtgctttggttttatgtgcctcttttgtatattatccttaagacaagcagtctattagctaagtgatgaaacagggattaattccgttcttcccttaagaagctgtgaaacattttttccggccgctatttttctgttaaatcaggacataatacctcccctagctgcctgatagccaagaagagctactatatttggacatcttactgtgaaccagacagtgtgcatatgcagcctctcatttaatcctcataatgtctttacccggaatgaactattaatattctcactatacacatgaaaaaacagagggttaggaaggggatgtgattctccttagatcttataagtgacgtagccaggagattcctttgctgaatttcccagtaattccaaaggtaaaccgtgtgaggctcccattggattctagctattactgcagtcataggaagtagtgggaaaaccctttcatcctgctcaactaaagtttcactttccacacaatgtgcttcccttccctctcctatcaagctggtgctgccgacatgtgtttagaatatggggttactgcttttaattgcagtcccactcatgccttttcaaaagacagaggttagggcagctcaattcaggtctcagcttcagcaataccgtaacccgacttgccttcttttcacttactcatcatgccatgattcagaagcctgttgttctcagggtaactcacattcatgctgttgcatacaggcattggtcctgacttcctgttattgcatcactcttatttttaactgcactgggattagatgacagagcctaaagtaaaagtagaaccagaaattcccagaaactctggggcagaattggtcacacggttttgattttatggtgtttttcccttgatggaagataagattaacataaataatataattaaggtggctggagtgtgatgaaaataatctaagagccgaagtcagaagaagaattccccgtttccttttttctgctaaatttagagttgtttttgttaattgagacataattcacatactacaaaattcccccttggaaagggtaccactcaatggtttttagtatattcacaaagttgtacaactataactctaatttcagaatgtttacatcaccccccaaaaagagtcactgtccccatgagcagtccttcccatgcccgtttactgtgtgccaacatcatctagactgtttgctcctcctcatctttctctctcctctccctggaatcctccagctgtcaccagcctggtcaccagagatgaagtccctctggctgagcacagggccagggtcattgccatttcactgaccataaacggatggctgtgccgccctacacaatgttgtctctgacaatgaaggaaccccatgatcttgctataactgatagagagagtgaaagggtatatatgcagtcagagagggaggcgaagctgcccctccctcctcgcatggtttctggggcccaaccatgcttgagaaatgggccctccaggatacacaatatcagactgatggattaggaacactgcagcatgctctgaaatcacccacataattcccgcctcttgcatcacgcccattgaagggaacacatattcctcaccctaagttttcaggaagaagagagacttcattctctgaaccccaaaaggtgatgtgtacaagggacacccctctctggcccctcattccctccttcccaagggagggagacttagcaccactttatgtaacatgtagttttgtcttaattattgtctgatcctccactagaacatagtgtcccagaaagacagacagttggtttatcctttccactgctgcacctccagtgcctacaactgcatctgacaca

SEQ ID NO: 61887 - DNA, 1977 bp, Homo sapiens
gacatcaaatatatatcagttgcataagtaaatggatgaaatctcttagaacagtgcaaaatgtacggtttctgcagtcagcttagtttctttcattagccaaatcatgaccaataagcaagattgaagagttaaaatatggacaagaataatttctcattttccattttcttcatttcataaagttttcttccaactatcccgtttcttcaaaaaaggatatttgtattttaaggatatttttatttcttttaagagtttatattatgtaaagctgtaaattctgcacagagatgagtataatccactatgtaacaagagactggatttttgtccaggctctaacaataatcaactgtgtcacattaggaaagtcacttccttatctgttgagaacagctagaggtggcagatgagtttcatctcaaggatcaactccaatcaattagtagtgaccagataaaatactgtattgaggattctaaaatcctattgacatcagtgggaaagaatgctgggatcaattagtgaggtctataatgaatatggtgggaaagaatgatggaaaataagccagatattagccaacctagtataaatgatctcaccagtccccttcaagctctaaaatcctgatttgtcttttattaattcacagattacccagaatatttttaacatttataacatacacatatatatatggccaggatatattcagtatttactaaatcctggcactatgcaaagtactttgcatgggttgtctcatttcctcctcacaacactgctaagaggcccacactattattattcacatcatacaggatgaggaaactgaatccagagaagttgaatggcttgcaagttcacacggctattaacagtgaaatcgagactcacatcctgagcacctttctcccggaactatgctcttaatcgttatgttgggttagatagtctactttggcttccttctaaacaaaacaaaacaaagaaaacctaagataatgtctgcaatagaaaaaagaagcatattcagctgacaggaaattgcttgtattccactctgacagacaatgatttgcaacgttaagtaacaaagggcagtacaaatattgactgttcctgaatcactgatactgtaagcaagttgtttgaaatacacatgttcttgggaaaattcagacacgtaatcatttttcagtagtactatagagttcatgaagttaagatattttatgtaaaataaaacaggaaattaagaagttaagaacatcctttgaggccttgatgctaacagatattcttttagataggtggtcagcaacttttcctatcacatatcatcctcagccccctctcagctccactgacttccctgacactcagcagatgagctcctctctcatttttccttttaggccaggtagactcatccattacacccctgccaggtcataatggcaagctaccctgcaaaagcttttctaggttcagattagaagaggtgctctaattcacagattgtggcatgatagcttcctagaaatggctacacacagccagaaatggctaaacaaatttaatttaccaataggtggagcatgagacctggccacacttcctttcactaaaacctcagaagcactaccaaccctcaacgttagaaaaggtcatttacatggatgcccagagggtgggagaatgtgcatactacttcacagaggaggacgctacattttgctgcattttgtacatgcattttcttgtgtctttactctcatttccctactcactcctctctattcaagactattccttatgtcatctaggctctgatctcatcatttataactttcttctttcctacattgggtttaaattaatttccaattactcattaaatacactaatggattctccttttaagaaattcagacattacagataaggctaaagtcccataggcagttg

SEQ ID NO: 61888 - DNA, 1104 bp, Homo sapiens
ggcaacacatgtccaggtgtttcctaaaacactatttatttttttcttcccaacttttatttcaggttcaagggttacatgtggagtgagaaagaaaggcgtagagtctgcatgttgggattccctctccaggccttggggccgtaggaaattctttcctattctgctgattaactaatgcaactagttcactccagaccagggagaggaatagacctccacactgacactcccaggtctcctcttggttttattttagcagaagccaaacagaagtggcagcacctttgcagcctccctgtgacctctctggttgggcccagtctggtctgagagtgtgttctgccaacttgagcactctagcaagaatcaggagacttcggggattttccactgggttgaaaacacttcagtgttacctagtgccagcactgccaggtctcaaagtctggagccatctataaacaagttctagccagataactgccacgagcccccaccccacttaaactaacaaaaacactcttatctcccagccaaaaaagaaaaaaatccccatcatcgtccaaatgcaccaacttcctatttttcctggctggctgccctttcttcttcattgcctcctcttcgtttcccagcagcagccaacattccccgcaacttgatcagcagggcagggcgggttctacccagtagtgtgcaggacataatgtgtgggaggagacgctggagggggcatagcaggtctcccccagttctccaagagccagaggcatttacaaggctggcctggggaaagagcccatggcctactctaaataaacactttagatcctggatggagtcattggaagtcacatgtgttcggtgcttcagagcttacaaagctatttcatacatattacctggccccatgaggtcggatcttatcttcaattcaaagatgaggaaactcaagctcagataatttaaatggcttttctaagattatctagcagagtctggaactgaattttggacttctgagtaaaccctgtggacttggccttacatttggcatcacagaaaggatagatggttttgagaagtctcaggagacaggtg

SEQ ID NO: 61889 - DNA, 880 bp, Homo sapiens
aaaacggttttagacatttatcctgaatttgcagatttttttccaaatcttttctttgatcatttttttttctctcaaataaggttctgaacaaaaaatgacctgtcttccttttccagtgcttatgggaatactgagtcaacatacacaattttataaacaagcacataaaactgaagcacaatagttatgtcttttctccccaatcagtaagggcttcattaaaaagatattttaacattaaacgatgaaaaacataagaattatggcttggtagctagtaaaaggctggtgtgagcaagagacacaaaggttaaaaatttactatttttcagtcttgtgtttattttggatatgtaaatatgtggctgggttacctaacacccaacttccaaaactgatcatgaggttttatgacaagagaaggacttttatagcaattttactgcctaatcgaaaacagtctagggaagctttaaaggtaacaaaatgaaactttacacaattataaacaactctgtttcacacccaacctggcacttccactcactgtaatagtatatttgtgatcaactttgtaacaacctgtcaaaagagagctctaacatctgcccactagggatcacatcagcctttccggctctgcagcagaaaacacatgggagtcactcagaactccggatttccaacaaagtagcatttcccagagagtaagccagaggacaccatcctctgagacgctgtcgggtagattattaaacaaatttgggaaaaatagaaagtagcattaaggctccaagaggtgctttagtaaaagatatttcgaacctggcttccccaaaaccttgcaatccccgcaaagcaaacatctattaacata

SEQ ID NO: 61890 - DNA, 762 bp, Homo sapiens
ggttacaagtcagactcttttaattatactccctttgacagaaaacagttacctcctgatgggatcagagttgaaacatgggtttcttctcccctccatccctcattcacgcacaccaaatcaccctacagggagcaggtaaaggatccagacatcagagacagccccagcgatggaaggggtcattctttcctcttcctggagcctcagtcctggtcttccatactctggccccaggagctgtctgaagtgctctcctagagagccaatcccactgtctatttttagtccttagttttatttgaatattgtgtaatctcagattggagttggccctctaacaacctcagccccagagaaccttcaccagctgggaaagcttcccaccccccagcaggaaggaattactctcaaaaactcttactctgtatttctgttttacaggctttactgtgctcagagaatatctatatataaggttcaacaactctacaaggcaggcagcctggatattatccccattctgcagattaggaacagaaccatggaaaggttatacgtggccattatgcactagtgtagccataccaattgttaaaaaaaaaaaaaaaaaatccaaaccaggtgataaataactgttgccccaaatcttctgagttattctgctaatagttattcaagcttttgtcccaaagcctctctttgcccctggctgtcctagaccttctcccaggacatcctagacctcactacaattcacca

SEQ ID NO: 61891 - DNA, 3019 bp, Homo sapiens
agtaaaggggtcatggctaattcttgtttttttaaattactaatgtgtcccttacagataaataaaaaagtaaaattactcacaattccaccaatcactgagagacttattggtgtttatctatccagtcttttctgcctttctccataaatcacagtttttaaaaacgggaccatacggtacatagtgttttgtctcctcacccccttgaataaccttcacattgttccatggtatttacagtatttactaataatgactgtaaatgtaagaggtatataactgactttattcagggcatggcaagcaggagtgaattattttcttcttatcaacacagcacgcccctaccgccactcatccctatagtcgttctctaaatacctaagtgacacctgaccagcaaggtttcagggtccttgtgctgaaaggagcaggctcgcctggggtcacggccctccgcttcgcagcaagaccccaccgcccaccacggccctccagttagccacagctcgcttcccccaggaccgggccagaggtcccgagagggcactctgcggacctaggggccccagcctacaagacgctgtgtcctgcagtcatcccctttacacagcagagccccaattctgggaagccggggtcaccccgagcctcccttccccgtgacagctcggccggtgcatcaccttccctcgcggaccctttcagcatcaccacgcgtgggaggaaacccaggacgggcgcctgagcctcggtggcggcccaccccggtgccgcgcggcgccgcggccggaccggcgccgcgccgtccccgaatgatgacgcgcttcctgccctcccagcgctctcgggcagtgcgctcgcgctcgccctcggctcttgttccgcgcccggagccagcggcggcggcagcggctgaggcggctgcgggagcggagtggtcgcccagcgcgcggggggacgcgggctgcactcccgggcaggcgctctgcaatgagacagtaaatgcatcccccggtaaggcgcacggctcactcgggttttcctcttcctccagctgcatgcacgttgcatgaatttctcgtgtcttttccctcccctctccagaaggaaaatgtggggttttttttcctcccttttgcttctcgtgagtgatgccaatgcaggaaaaacccgtaaagctcccagatttgatggtctaggagggcttcttgcaggaaaataaaaataaaatgaaattaatgcacctgtctattgcacatgtatgtttcactgcaccggacccgggcgcagcggtttgcaaacagcctcgcagtcggcgccagagagcggattcctggccgtgggcagccggtcccctccggggctctcgctgggtttccggtaactgggctttgaaaagcggccccgcctgcatagagtgtcccctcgaccccagccgggcccccgcgccagaagagttggcgctggaggagcagcttcattccagcactggccgccgggactccagcgccactttgcaaacaagtctcccgccgaggctctgggctaagacagcccgccagtgcggagttccttctccggtgccggacactcagacctgccgatcccacgactgccctttacttggcaatctcgccacgggcgaactgctggccgctgagcgacgggggcagtgccgggccgagagcggggccaggctttgcatccagtgcggctggcctcacacagactcagcggctccctctccttcctcggtcccacgagctgaaattttgcgcccattggaagctggagggacctggagacgagtatttcgggatccctgaggggaccgaggaacgactttcgagggcgccatattttcagtgggtcttgactgcggaggggagggggcgagcagtttctgggtcccggggagagccccgcgccccagtcggagaggcctgatcggttgtcgccgggaaagtttgcgcgccgaggcaggcgcggaggcggccgcacaaggcgcgcacgactgctgtccccgcaagggcgcgcggactacagcgcgtcgccacgccagccggcggggcttgggaacgagagccgccgtcacggacagcgtgctgggcttgccgccttcctctgtcccgcctggacccggccttggggctccgaggctcagggaacacgcccctcttccccgcagctaccgctgcccgggtgctcagccggagccgtgcgctgggcggcgtcccggggctgggcgccgagtgtagagcgttctcccggtgcccgggctcgcctgggtgctccgaggggcgcagtagctcacttcctgggggagaggaggcgccttggttcgtggatcaggaccagggcctggcctgtggtcgccccgaggccgccgaacagcctgagcttccagtcgcctctttggctttagcggcgacagcagtagcgcccgcggctgcgtgttctgctctcgcagctcgtagaggcgaggaaaggagggcgtttccagaagttggggcttcaggtgacgcgtggggaaacttggattcttgctgtccttgaagagctgggacaacttaggccagaattcctgtgtctcatagtgaaaacttctggttctttccagaagatgagagaggaatgaactgaagtgttggcgttgtcaaagacataattaaagacggttgggtagggatgatgtcttggagaagtggtccccaaaatacacgtaaattgccctggtgctgtaagtaccacttacttttccattaataatacctgggtgtgttaagctgtggcattgtaaggttgcacgctgacctcccttctccagagcttggaggcagcgacctctctggagtgagggggaagcgggagtggggaatctttacttttgaagtagactgtgacctctgctttgtgatgggacagggcacgggcgtgtttgccaacctacaggcagccaattgcaggaacgtgttctccttggagtgttaccgaaatgatgtcatagtattga

SEQ ID NO: 61892 - DNA, 1735 bp, Homo sapiens
aaggaatccttctatttagccagtgttcttccagagttcctgtcctgagtttctgcccactggagcccacctgccctctaattggggtctgcaggcgtacatccttgcacaactctgtaatttatctggtagcctcaggctggagtgtttcctggacttctcagaactacaacgttggctctgtcttacgcacaaatatgttaggtaaaatttcaagtcaatctccctcttccctgtgcttggttaagaattgatttgtgacatctgtagggagcaaattaaggaatttacaactggtacatgaggaaggtggaaggaagttctccctaaacttaatctgtaacatagtttttgaccttgtctgcctctatgatggggggcggacggggaaggggaaggggagtgtctgcctctttgggtagcctgaacttacattagccaaatgtcattgaacctccatgacttgaggctagttacgtgatggctgagtcaatgccaggtctaagatcattctttcctttattctatttatggaactaatatcaagagagcatttactttttggcaggcattgttctagacgcggggaaaacaattttgaataagactcataaagatctggcccgaatggagcctatattctgggagtacaagtttcctgttaatttttctctcatgtctttctttaaaagcccagcacaaatctaggaaactgtgatatctccaggaagaagggacctctctgtcctctgaaatcatttgtgtgttgcaggttccaagagtgtggcagtggttatagcacattatctagtggctgctggtatgagggtttaggctaccctctgggaaactggactgggtcagaccttttttgggtgtgatgaggggcagagagtgaggagactctgctatggtgccttccaaacaggaaatgttcagcaaatatttattgagcaaatgcatatctgcatgaggtagtcacatgggtggtattacaaacaccagactggattccagctcttcagattaacatttggaattcctaggaactgtgctgaacctggcaaagatgagagccctcctgccaggagatcctttagtttgtttctggagcattcccaacatgaaagctctcccatggaggttgggggagttttaaattgccagtgtgtttgaaacaagcaacattgtcttctgacctttccctagggtcttgcatactttgatatggcagaagcaggcgttgctctgaagttataaataactaagcaacttgagagttacactctagggccccaagttaaaacagctgattccactcttgttgtagagcaggaaactatcttttcaaaatcatgtgtgagcagcatggcattcaaacgggatattaatcttcctagaaattttaccaggaaagcagaatgcttccttttcctccacccttatttttattttttatttttgcttatgtgtatctgtcatttcagcatatgtgaagtgaatgacaagatatttgttgtttttactggtgacagatgataaatatcttcatttctttttagcttaaaaacacttgctgaactttggtcagctgatataaggattagaaataattttaagattatttaatctcgttttcccccaaagaattgatccagaaattggtataaagtcagaaggagaaaaagaaggatgagtttctaagataaatgtgctcagataattgctttttatt

SEQ ID NO: 61893 - DNA, 814 bp, Homo sapiens
tttgtgtgagttttccctttctgccttgttccggtcaaggctgtgttcagttctctggtgataactgtcctctctcttccttcttctctatctctcctttccctttgctttcccttatgccagcgctcctcctctttcctcttcttaagactcttcagggctgttgaaaatactaacaagattgccctgttgatgtgtatgtgtttccaaagtggtttcaaagtggctccatccaaaagtttaggaagtctttagggattggcctttctggaccacattcccccgcctcacccacggggagggtgccaggcggatccctggcttggttccaagtgtgtcaacagcctgttgctttctagttcaacaagagggaataatctttggtaaacatggccgttggaaaaaagcaaatatttgtcttggcagttgtagtcattcaaatatctagaccctcttgtgttcctgagggagctatgccagaagtcatggcatcaaatcccacatctggttaagaaatactggtaagaatagataaataaaggatgtttggaaggcagtgctctttctcctttcttgtccgtctttctctttctttctttgtcccactctctctctttccctcccctctctgaacaagtctgaatattctcttttccctaattttggttgcttaagctagtgtttctcaagtttagcctgttgacattttgggccggatcatttttgtcatatggtgctgttctgaccatcagaggatgtttagcagctgcctcggcctctacccactatgccagtagcactcggccccagtggt

SEQ ID NO: 61894 - DNA, 580 bp, Homo sapiens
catcttttacaattacaaatagctttgtggagaatagccttgatactcttaaaatcattattcttttttaacctcatggaagttaaatgtatatacgaggtgactccttttgtaaagacaaagcaggatgtctacagactactgggattgaacagagctttggagcaagaaaggaaaagggagtcacgtttgggagaaatagagaaggacatttcggtggaatctgtgttatgtcttcaagtagcagtaaataaggtttataggaaggtctgttagatattttgatgacctgtattgctaggccaaaggctatggattttgcaatgtaggccagaagttagcaatcttttctggcaaaggactcaactacaaatatttgaggctactgcctatgttgcagctattcaactctgctgttggcacacagaaagcaggcatagacaagtcataaatgggtgtggctgtgttccaatgaaacttgatttatggacactgaaatctgaatgtcatataatttctatgtatcatgaaatataattcatttggtttttttccttaaccctttaaaattataaaaacc

SEQ ID NO: 61895 - DNA, 2312 bp, Homo sapiens
ggtgacccagccaggaagtggtggggcagaattcaaacccaggccccagagcccctgctttcagccctggcatgctgttcacctctttgggatggagagacgaagtcatctctccagcctgggaagaaagaccttgctgtgtttgcagggcttgtgtgtgagtttggggaggtaagggtggaaagagcgatagagttgacagcagtgacatcgttggttgctgtgtaatgagcttatctcagttaaaatcaatcattttctggtcgttaaaaaacattatatttagatggaccaacggagtaaaaacaggaaagacactctttattctgtcgaaatttctggagccctttcttgtctgcctcctcttcagttttaaatcctgacctatctctatataaagcatctctgttaagatctcatgttcttttcagattctcctcacagtgtcaaaccctctttgcgattccctgcagcaaatgagctctcgtgatggcctaaaagataggcctgtgcagaacatcaggggaggaatgtcggggggttgtaacgtggaaaagataaaggcctccgtctcctggcgcaccctgggaacgaggagcaatgcaagaggaacagaaatgaacgtgctgcccctccgcgtgtggaaatgggcctggtttttcaattcccatcatgtggcagggtttgctgggagccatgagctttgcttttaatttactaacaggaaagtggtaaaggtcatttcactgtagcacatggtactatatactgaatagatttcctgtttgaaggaatggttatgtgttctgtcaaacagaaaaacaaatgaatatttaattccctcagtgcttaagacaggtgccctgatagctgcatattgctcttaagttttatgctgcttagtgctgtttttttcttttaaccatgaggatgtgcccaagcctaaatcccagctgccacacccttatagtcatgaagaagggaggggagccaccaagagaagcacgagggagcaggagcagattacctcacacagtggctcatcggcatcagtcactactgatggcactctttaaaatcccagagcagggctccacgagaatccatttctgtgtttctgcctcctgccagggatggctgtaaatgctgggcatggtagaaggatgcacacccctaaccacagcggctgtctctccgagtcaccacatacgctgttgcctgcctttttcctttcattcagctcattacctagtcttgaatcagatgtgtggaatggaatgttattttaaatgtgcagtcactcacatttgggtgccaagtagaaattatgcaacagcagcgtttgtttttctgagaagttgaagtttggccttgcccctcacagcagagttaaagctcggggtttttgcaattaagcactttcagtgtgtaccacagacacccgatccagctctctttaatcgaatttgacttggctgtgagtatgctttcttggtcatccctatgtttggattgggaaagtggtttctttagaaggaaaaggaaaaaggctgttgggctttttactccttgttctgttgcctttgtctaaggtcagcaggagagaagggagccaggaggctcggttcattgtttgaggcatgccagtgagtagcaaggtgaccttgtcaagtcatgtcactttccaggtgctggttttattgtctggagaattgggagtttaagcttaaattgtctttagggtcccctctaacccccaaagtccatgaatctgactttgtgcatacacagaaattgtttctcccagatgtccgtggtattttgctaagggggaacacttggagcaggctccgggcttgggagtgttcttgttctggtggggcctggaaatatggctgagtaaatttaccctttcatcattatggctggtatgccagatgttctgtgacatggaaactctcatgcttgcttgaaatgtcaccactgggcagctttgagtattcagtttacttgagtggctctgctgtgcccaatggaagcagagttcagaagtgaaataatacctgtgcaaactatcctttctgacgccggatgccttttctggataaaataacttgtcctttttgagaatggaaaatgattgatatggcttgctattctagttcatgttattcaaggctttgacctgcaaatagcaatgggctatatgttaatatgattttagggcctgtgctcaaaacaaaagccccaaacaaacaaacaaacaaacaaaccctgtctttattctaatagtgctgtctgtgacacctaca

SEQ ID NO: 61896 - DNA, 1137 bp, Homo sapiens
gcaactagaactgtattatatagattcttagatataaatggcattgagagatagtgaatgctatctgatatgttaagcagttatacgaaagatgacaaatgttgtcttcaaagaattgataggagtccatagaaaaagtttctcccaacttttaaaggctcagatgccataagataaaagtttgaaagatgcctctttgatacttgccacataagcctgggttgagaaatcaatgggccttcctcgctgaagtgaccagaatgagccaccacatggttgctgtgcccaggtcccctctgagtggttttgtcatgtaatcatgtgtccactaggggttgagcttggaccacaaagtcatccctggctgctgccattcattcatggaaactctgtgattgtgccaggcttgtttaaaagaattcgggctggggaatggtacacccatctcagtgttttgtgaaaagctggagctgagcccagtcttgtccttctcaggggagcatggaggacggatcctagtccgagccagcagactttcagcacagattcctgttgagcaggaagcacagtgcagcagcagtcatgtttgagcagcctcatggtgtttctggaatgtctccagagccaggtcctgagctgccttggcttgaccctgggtgtccatgagcttaaggagctgagcctcaggctgcatggccactcctgagataactggcctggctctttgtgtgaaagaggcccttctcaccccgtcaggatgcccagactcccagtgcacctgttggcaggtcgcagtggagcagcacgtggcaacactcactctcgtgcagctcagtgtgcgttccttggcggccacatctcagcctgaagcctgggacgtgtccttgtacacatgccttagaaagggtggacattcctgtcctgccttgatggatggagagtcattcaaaagacattttaaaaggctgtttaaaatcaaggtcttaaaaggccacaaagaaagagacagtattgttatccagagcaagaggaggtggagcaggaggggagccccttgatgagggacagtgacacccgtctgggtggcagattaaaactgcttttgtgagaatttagaggtatttttgtccagaggaa

SEQ ID NO: 61897 - DNA, 776 bp, Homo sapiens
cggtgggcttgcagcagcagtggcctctgcctcctaaatgggagctctccccctatgctccatttctccttattttttctctctcgtgcttttgctgttgtcttgttcattttgggggaagggaggagatacagggatcctcgtatttccatttcacttctccccagttccatttcttagttgaaccgtattttctccagcacctgtgcagcattgataatgtacatgacatctatgggtccaggccctgcacacatgggcctcaggttggcaatctgtacctttgcccttggtgagtcatttaacaagaatgtcactgtgtggggtctgcctgcagctttatgtctgacacgtacaaaggcctggatggaaatggagtgaaggtctcccctttcattctccagcaaaaatgcagcttatttaggggagaggaattctttcttcgtaaggaagggcaggtgccagcatttgtcttagggagaagtgtctctcaggggaaaggaaaatggagctgtaacagggtcacttccctgactgcatgccgactctaaaccctatcccagtatccgggaatgaggtgttggatctgctcaagtgcttcctttcttgtcacttcccctctccatgcccacctcgtttgggtgagcaaaataagacaaggctgtcttgtgtgtatggtgtgcctctgtccgaggggcgggcgggcagatggctggcctctgcctgaggggaggccaagaggtccaggagctctaggaacattatagaaggtctag

SEQ ID NO: 61898 - DNA, 1666 bp, Homo sapiens
aacttggacatggcagagtccctatctgtcctccaacgaacttacgtgttcaagcatttaaaaaattggtgaaggaggttcagccagacttgggtgaactatagtattataggcaggaccttggagttttacctgacattcagcaatccctgatgtggcccttttattgctgacacacccccaatttcatattcaaattgagatactcttacctcaccaggcacgtcccacaagcttcaaggtatttcctcctgtggcttctccctctggatgtggacagaaaatgttctacttgttgccatgatttctaaatagaaacagagatccatatttctctcccacccctgacaaatggtatttccttaagacaagggtctgcactcaattgtaccagagggagttccaccacacttttttaacatcatctgccagaaacgcagtgtggttttcagggtcagtaatcgggagagatttaaatttctcttagcccttgaaaagaggaggcctagtggctcccacatatgaaatggagaaagctcagcagaggagtaagtgtagaaagacagccccaggtcatcattcctgagccgtttcccagaattgcagtacctggaagctaagtggagccattcttagcatttcctgtcgcctcttggtggcgaaacctgccaggatgtgctgtgcaatctttcttggcatggcctgagtcccacgtgagaaaggttgctccattctcaggcctgtgctgttggcaggaggcaccaagcggggtacaagtctggttcccgagcaaggtctggggatgaggggctgcgaccactggggctgcctgccctcatggccaatttctcgactctactctctaggtgggctccatccctgccaatgctgcagacgacggacagtggtcacaggggctgatttctgctgtgagttgccttctccttcctcccagtttgcttttggggtcccctgagggaggtttgggccttgggtcacttctccgttgactgtccccaggcccggatggtggcggctgcgaccagcagtctctgtgaggcggccaatgcctccgttcagggacacgccagcgaggagaagctcatctcatctgccaagcaggtcgccgcttccacggctcagctgctggtggcctgcaaggtgaaggccgaccaggattcagaggccatgaggcggctacaggtaatggtcactgatgctggtgggaaaatactcctgttggagcgggtaagtgtcaccagaggggacaagcctcacttccttggcatgacccaccaggccttccatcagccagccctgtccacgttccagcctcatctactgcgtgcgtccatgcatcctccactgctgccccaccacgctgccattctcctcgtgtgccttctggtctcatgccctggggccctgctcctcgccagcccaacccagcagacccctacttgtcctttgtgactcatctgggaagccctccctgactcccagggtttgggcagtttatccctcctctgtgctttgagagcccctagccagaccactcaggttcccatcacatggtgctactgtaggtctgtctgtgagcaggttgtgagcctcttagatgcaggcaccacatcttcatctgtgcctctctcatacgttactaact

SEQ ID NO: 61899 - DNA, 559 bp, Homo sapiens
tgaatttacccttaatctgcacctttagccaaggcagtgcatggaagatgaatggctcgtgggacagaatctaatgccagggagcaggagtgtttgaaagaattcatagtggggaaggtaaaagttaatggaagtacatgattttcaaaactggtaacagttaaaggcactcaccctccgcctctctctctctctctctctctggtgtgctatcatgtcttggactccatccacactatagtttcaaagttccactgacgggggaaagttggtgctttggtcctccgaagatgtcacctttcgaccttgcccgatcttgtttcaccagactctagcccatgtcatggttttaaaatacataaacttctgacagcttcccatatttataagttacttataagtgctgcacgtattagaatttttttttttcagaccagtaaagttagagaaaagacgctgtaaaggaaaagcaagtgagagtatgtgtaggacactgacagtgtgtgggcaccagttctgaagaggaggggagctgctggagccctagcctgttggggaa

SEQ ID NO: 61900 - DNA, 1761 bp, Homo sapiens
gtttgcatggatgcttctttgggggaactgcaggagttcatggaagagtttcagaaaggaatgagaatgcctcaggagttgttctgtgatggaaattggcctgttgttctgttaatgctgctagaaacttacagcgcttaataaaaatctattcttttagtaaaaaaaaaaaaaaattattcccttttctttcatagctacatgaaagcaatcttgaaaatgtgaccaatgaaaacggtgttatccttgacttgaggccaagtccccaaaatattgctgcactccacaaggcagaggggagtcgatgttgggaagtcaagcacaatgtctatcatatatccccaacaggctctctcttccctatcagtagtgaatgaaaaagccactttctgaccacaatcagcaccagcctcatcgtggagcctcccgcaaggatggtggaatgaaggcaatcgaagaatctgtatctttggtggcagtgtcgatcggtttgtctaacctaattcttccaggcttcccaatcactaaccagatacacttctgccacatttaagccagacagagttgggcttgcagccaaggtgccctaactaatgccaggtagcagtcgcatgggaaaaggccaacaagcatttgaccacatactaggcatgcagcgaaattttgttccgttttccttcacacctacatgaaagcaatcttgaaaatgtgaccaatgaaaaccccactgcgtccactttcaagagttaactgagcactcgtgcccctaacgtggtgccagactcacagtaggtcttcaacaaatgtttactttttgatgcatctctagagtgtgatgttggtaacacccggattccagtatatggcttacttgatgggtatggaaaaggatagcagacttattacagacagcagccatcccagtcctgtttctagactctgggatgagcggtcggggcacaggtctccccacccctagtctccatccctgcgctctgagaagctagagaagtctgtggccaatcacctacacagcaaaccatgtgaggaatgtctggtatttgggtatgtggtatggtatgggtttgtttttcctgttcatcatcacttaggatggaaatctttaactattttgactggaggcatgagcgtggagctcaggaccccagggattggaaggtgggggagggcacaggacagtcctggtcttttttctgctcctgggactaaatggcaccatccctgacctggtgtgttgtgctcagtctctgacttttccctgtggccccacaaaagcgttgatttcgaagcagcagtagcagcagggggaagacatttcctcgggcagggaatcactgaaagctacagagacgagtctggcaggaaggagactcagcccctgcatggcggggctggttgtcctttgtgctcagtgtctagctcctaagttccgcacaggggacagaatctgggctgaaatctgagacttaggttctggttctggctgggtgatcttgggcaaatttctttatttcttggaaactttttgtttttatgtattaacaggccttttgccatgactctgagtctggatggtgaatatccttgatctttggcagctaccaattctttgagaataaattatatactaggtgctctactgggtgttttatgaatatcgttattttcctcatcacagataacatttattaagtgcttacaatattccagtcgactacagttccaagggctatttaaata

SEQ ID NO: 61901 - DNA, 2579 bp, Homo sapiens
taacaacattatataaatggagcattatatccactttatggctgaggatactaaaactgagagacatcttacaagtcagccaatatgacacagcttttaaaaggtggagccaagagctaaaccgagctgtgctatccaaaggtttccaccaccccgggccacctctttacagatcaatacacccacagagagaagactccagactccagggtgaccactgcagcttggtggatttgatcttggaggtctccatttttgtaggcatgatgaggatgtcaaagtctatttttcaaaagttaaaaaaacatggctcatacaaatatacagtgagcatgtgtcaaagatttaactcactaatcaaagaaccagcacaatgacaaggttcatttaaaaatatgtagaatattcatcatcactgagaaaaaagaatactgcaattaagattcctaaattagttatgaagttaattatcctatcaggcagcaaaactataacctttggggttgtcatctatcctatcggagaaaattacagcacttctattcaagaatccaatgagtctcttataactgaacatctacctggggtaatgtaatatcctcatcaatagaaaatagatcaaaacaaaggaatatatccctagagaatggcagaagcctcgaaaggatctgtgagtgaattccaagtaagtgcggggtgttctttctaaacacagggcactgagccagtgcccagccatggcattgtaagctagagaagcacgatgtctagatgagaagaccaacaacaaggttcaaagggggtgccaccattttgtgtgcttgtgctatgctctctgagccacagctttattttctgtaagaaagaagattctgttttttaattgggagaacaattctctctcttcaacctcacagaatttttgccaggatcagccaagagtggacataataggactgggtcagtgattgctctggcttctgatataagggaacaaccattggcctcagcccctggaggccccttaaccccttaatggaaaactgtttttttccttttttttttttttcttttttggagacagagtctagctctgttgcccaggctggagtgcagtggcacaatcacagctcactgcagctcaacctccccaggctcaggtggtcctcccacctcagcctccggagtagctgggaccacaggcacacaccaccatgcctggctaattttttggtattttttgtaaagatagggtttcactgtgttgtccaggctgctctcaaactcctgagctcaagctatctgcctgcctcggcctcccaaagtgttgagattacaggtgtgtgtcactgcacctggcctggaaaactcttatgtggcaggtgaaaaatgtaaaagccctcagctttctgtgatgttctagcaaacactggcacatccagaggaacatgtgccactttcgggccaagccagcaaaatgattacgaaagtctttgaagacctaagtcacattaatgactcagaactgctgtgtttttgacaatgaagctttggatggacacactgacccagtgtcgtctcaccaaccatcccagggtgagctcagaaggggacatatgtcacagtcttaatcagcaattggcaagtttttcctttaaagggccagattgtaaatattttaggcttagcaggccacatacagcctctgttgttgcattttttttaatgtgcatgttatgttttttttttgtttgttctaacattttaaaaatgtaaaagctatccttggctcacctggctgtgcaaaaataagcagcgggctggatttggctcatggactgcagattgcaggcccaggtgttcctggcttatttgcaggtggtggaaagaccacaggctttggagctgaaactgactttgaatcctgctgtcctcactttccagctgtgcgagcttggacacgcctccttacccctgagcctctgtcctaatcagcagaattcttgcatgaaatactcgctgcacgtctactaccttgccaagcacaaaagcaatgcttatgaggctggaataaaatgaaaaagctccggcatgggaaaggaatgtggcagaaggcacgctgactattgcttgaaccctgaagtgatttgggctgccctgggtgggagaccatgaaaagggccttcggttccatgatgatagcctagaatcggatacgctgcatgacaacatcccaaggactcgaattcagcccactggggctgggtcccgagcacctgtatgttttaaatacagatcctccaggagtctgccctgaagcctgggtttaagaagccgccaaggagtttcccacaagtttgtgggtccagcggcagaggctccaagtggtctgaaaatgggcattcatgcagtcggcacggcatctgcctggttcccacctgcacccagctaagcctggtaaccttcaaatcaaagcctttccccccagtttgctaagggtgaaacatgtgctcacagcaccagcttaaaagactatttcatgccaaaataataacaagtgtttttatgacagcacagaa

SEQ ID NO: 61902 - DNA, 808 bp, Homo sapiens
gtcacttgtgttaaaaatcctgacaaatacaaccaggaaggccatgaagaagggttcttatgcacaaatgcctgataacaagatcacaaaagactgcaaaaatcacaacctcgcccaaagaccatcacaaccttacacataaacacttctgtgaggacaactgcccagcaactgcctgtccaacctcagaatgacaccacctttgttattgatctttgcaggcaaggataattatctcaaaacaattatgtcatcctcctcatttttcctttaaaaacctttgtcttcctttacctctgtgaatgtcgcacagtttactatggcaagagtattccattgcaatacctgttcctgaatttcctctcagagtctgttatttaggctgacaaacttgttaatagaagtcgttttccagttagtttttagcctttgagcattcatttgccagacgacacatgctctgaacactaggctttcaggggagttccttccaggtaaagagtttgtcttggcaaacttgactgttgatgaaacttggttcaaagagcaaatcactctcatgaaagggagtctggtactgggggagcagaagttgggatggcagagtcaagggaggtcaagatctctcctttcccaccacacagacagatacaagccaatattttatatatatatttacacacacacacacacacacacacaatgtatttacgtatgtatatacatgtgtgtgtgtgtgtatatatatatatatatatatattttttttttttttttttttttgagacagtctcactctgttgcccag

SEQ ID NO: 61903 - DNA, 4986 bp, Homo sapiens
actcattgcaaccttcacctcctgggttcaagcgattctcctgcctcatccttcctagtagctaggattacaggcctgagccaccatgcccagttaatttttgtattgttagtacagacggggtttcatcatgttgaccaggctggtcttgaactcctgacctcaggtgatctgcccacctcggcctcccaaagtgctgggattataggtgtgagccaccatgcccagccacaagccaaagtatgttttagcaaacctccatcctgattgctcataggaagggacgcttttaagaaataaggatttttttttgagacaggatgacataggaaatgaaaagaacgctctttccacaatgatgtgtaaacccagggggagtcgagggtctgcgctgggttgctggaagaaatgcccccaccctccctccaccctgtggactgagcaggcaaagcctgtgggaagcagagcaaacaagacagacagagacggggctgtgagagacaatggcagggctgcagggggccaggcaggcttggggttctgaccgcgagggcaaaagcagagaccatgtttgtcttagaactctccaaagctatgaaaattcaggacatttcctgagcccacatagtagaggttgactaatctctttcataacgtctgtttcaggttaaagggacaaaacccactttcacatctttctggctaaggtcttgctttggctttctttgcttcacaatagagtcattgacccacgctggagtctgtgggtgggaccacaaacaggaacattcacacgacagaacaaacatttctccgtgcaaactgggatccctgcactttcaacttaagggcttgctgatgaacgaccaggacttcggggtgattagccccaaccctccaccaaatgactgtgtttgcttcctttcatattttgaccccgtgctttttggctaaagtataaaagaagagaaatctgaaatgtgttctcaaacgttcaaagctccaattgctgcagaagagaatttaaaacaaaccccccttggactctcggcaggagtggacagcagtatctctgcttagaagtctgcaggtgaaggacaggctgagccagaggaaatctgtttctcattagaattcttggcggagcattttcaggctcatctggaaaagagatgaggagaagggctgccagtgaggtttgtttaataagctcttttctcccctcacacgtctgctggctttcccgtccacaggccacctgggaccaggttttccagtccctctgcagccccctgcatgtgtctgtatataatctgggtatatggcttataaagtggagaatccatataaggaaaacccatttcactctcatttttctaaacgtcaaatgaaattctccctcagacactctccctttcacagatgcggtggatatgaaggggaagagtccgtgataaggatcccttttattaatttgttcagtcttcaaggtgacaacttaaccacggcttttatctgagcatcacgacatttgcttaaagtaacatcttcattttacagatggggaaaatcaataacaacagcaatgaaaatacaaaaccaaaccaaagctgaggcccagagagaagaggtgaacttacacagtttcacagccactgggagtcggagctgagatgaggaatctgattcctgtctcccacagtgtgctggaaatcagagcaccccccagacctcaccacgttctctttcctggatgtgccaggtcctagggtaaatgctgcttccgcccagaaaccctccccgacccaaacccaccctcaagtcaggcctccctgttggcgctctatgcacgttttctttgtggcacttacctgattttaatcaagctttgtgtaattatttgcttaaagctccctctccagcaagactgtaagccccctgagacagaaactgtgtcctgtcttgttcatcattgtatctacaccacactgcacagtgtctagtccatgatgggcccaaaaaaaatatattgtgaaataaatgaacaaatgaatgaaaaattgcccaatgcagtggtgaaggctgaacatacaccagcttccttacttccttggtgagttagccagtaagggatttcccaaggaaatttctacagattctgttgtttctcattgacattggtgttttttttttttttttttttttttttttttgagacagagtctcgttctatctcccagctcccagactggagtgcagtggcgcaatctcggctcactgcaagctccgcctcccgggttcatgccattctcctgcctcagtctcccaagtagctgggaccacaggcgcccaccaccacgcccagctaattttttgtatttttagtagagatggggtttcaccatgttagccaggatggtctcgatctcacgatctcatgatccacccgccttggcctcccaaagtgctgggattacaggcgtgagccaccacacccggcctcattgacgttgtataaaaacctttcgctaaacattgagaaacttcctaaggagtgagagactgaacgactgtgaattgtgcaggatttctgctttttgctggcctaagaacataagggatgaatagaccaggagtgccagcagaagttagtctatgtcctgtgggtgatgtcctgctccctgttccagctatgtgttctagggtatcatcactgcttcctgggtgagtgcatgagggcatgattcagtctgagtaatgggctagttcttcctggccttgccaccagccctgtagcctgggagagcaccaatcaaaagatggttgtggcacatatcatccagttcatatggggaaactgaggcaagtggagaggactgttctggtagtggcagagctggaacgagaatccagggctcctgcctctttgtctgctcttctccccagcactgttcaatcaatcagcccttggcatgtgctcagtgctgtctattctattaggttggtgcaaacacaattacagttttcactgttattttaaatggcaaaaaccgcaattacccacctaataggttctgaaatggatgtaaaaagtcttgaaaattaagcacacaaaaattaaatacacaaaatgagcatagagcatggtcccaccttccaggaacttacagttttggtggagagtgaaactaaattcttgaaacaatgatccatgaaagattgcaagtctaggtcattacatgctatgttgtgtgcaggacagactctaagcactgagaattctaagaggtcatttgacaattgtgcacaactctatcttgagtgcgcctgtgacagtgaagaatttctgcacaccaggaagacctggaggtcgcagtgcagcggcaaagggcacacagcctttggagttagacctccaggctctgccgcttcctgctctgtgaccgtgggcaggtccttgagcctccctcagacttgatcttctcttctgtaaaatgagatgagaagacaatagagatacttccttcgtaaggttgttgtgagaattacattcatgtaacatttgtcaactactataagttgaattgcaacaaatagtagtaattatcattaataaaaataaagctatatgaagataaaatgggttgtcttcaggagattgagcccccagtcaccaatggtatttcaactctgcctagaaattatagaagaaattcaattttagaaaggagtagctcctagaaccagatgatatttaaggtctttcccaacactgatcacaagatgaattttgtggacattagctggcccttgagaatgctacatgttggccaagtgggaagcggggaagggtgtttcctagaagatgggaactgtgtgagcagaggcttggaggaggtacagagcttgaagctattgtactcttatatcccagaacttcatcccacttgtgttttctgaacatgttgtggagggactctttacagcttgtagaggtccagtcagggggattgcagtaactctgaggtcttccacttgtgtgtttcagaatttcatgaaccattgagggcaggggagtttgtgaattcagcattaatacaaaggagttctaaccacgttagttcactcctgcttatcagggttgttttctaatgggcctgatttccttatgatcagcttctgaactcaactgaaacaaacttcctctacccaaaacaaaccaatgaggtcattttaccaccttgccaagtctctgtacaaatctccacgtggggcagcataattggagatggagctggtaaaggaaaaacaattcatcaggaagagcttgttttgatattcagatgagtttataaggtaatttttttttttttaagacggagtctcactctatcaccacgctggagtgcagtggtgcaatctcagctcactgcaacctccacctcccgggttcaagagattctcctgcctcagcctcccgagtagctgggactataggcttgcgccaccatgcccagctaatttttgtatttttagtagagatggggtttcaccacgttggccaatatggtgtggatctcttgacctcgtgatctgcccgcctcagcctcccaaagggctggggattacaagcatgagccactgcgcctggcctataaggtaatttttaaagtggaaatcataaaagaaaaccatggttacgttcatgtaccctaagatctagctatgtacaacttttattagcaaaattaacaagggagggtaatgtttctgtattaccctgaaatggagacctctgcatttctgcccaggcacccaagagaatgtgctctgggtgctttctgctcagagaggctgaaagtgatgattacctaatgtgcaaagtagcacttaaaaaaaaaaaaaacctaattggcaacaactttggatatcttatatgccctcatttcagttacaattggctttatgtacagttcagagggtctg

SEQ ID NO: 61904 - DNA, 6765 bp, Homo sapiens
gggaattacaattcaacatgagatttggatggggacaaaccatatcaggccttaaattttatgtggtctgatataaatattgttagttatgtatattaattacatagggccgccataacaaattaccataaactgggtggcttaaacccatagaaatttatttcctcacagttccagatgctggaagtctgaaatcaaagtggaatcaaagcctgaaattggcaggaccatgctccctccaaatattctaggagaggagcctttcttgtctcttctagctcttagtagccctaggcagtcctccgtttgtggcagcataacaccagtgtctgcctcccccatcacatggctggcttctgtgcatctgtgtctctcatctccttataaggacaccagctgggcatgtggctcatgcctgtaaacccagcactttgggatcccaaggcaggtggatcatgaggtcaggaattcgagaccagccgggccaacatggtgaaatgccgtctctactaaagatacaaaaaatcagctgggcgtggtggagtatgcctgtaatcccagctactcaggaggctgaggtaggagaatcgcttgaacccgggaggcggaggttgcagtgagctgagatggcgccattgcactccagcctgggtgacagggtaagattacatctcaaaaaaaaaaaaaggacaccagtcatattggcttaagggcccaccctattccaatatgacctcatcttaattttattacatctgcaatgactcttttcaaataaggtcacattgtgagatactgagggttgagacttcaacgtatcttttggagcatgcagtttcacccataacaatatatatttcatgttttggttagcattgaactggtatatctttttctaactttttatttccaattgttatggttttgctttaggtgtatctcttataaactttgttcatttgttttatctaatctgagaatgtttcatttgagaggtaatctgtttacatttattataatgacgtatagtttaactgattcctgccatattttgttttctatttcccacccttttgttttgctttggtttttctcctttccagctgtcttagtccccccaacacacacacacacacacacacacacacaaagcagactctgaaataatggcttgtctgcagcttgtttattttaggaaatgattcaacgaataggagtggggcgggggctgggaagaatgaaaaagggatgaagacaaagctgatcatcaccataggcaaatagggtcaatcctattagggaccctagaggagggacatggatgcatcttggtcttgtcttcagagacactaatattgcttttcaaatgtggctgtgtcattttaccttacatttctctatcacatatagagcagagagtatttggagcagagggcgtacattgcagcatgaatttacaccactatcctggcatgtctgcatggctgccatttaacttctccatcatcctatgaggcactttatcatccctattttagaaaggaagaaattgaggctcagagaggtaaagtaaattgcctgaagtcacacagataaaaagtgacagagccagaactcaaactctgttttatctgattccacagccattccttccaaccttaagctctaccgcctgtgtggtgctgggtgtgagtcggagctagcctgggtttacctgagttgcagggtcacccctcatcgcacccttgtcagtcctcaaataggggtgcaactgttccatgaaagggaacaaagagactgagctactagacaccaagctgtttaggactgaacccattcctgtccaaacggaagtgatccagagggactctgaatattacagaagtcaagagatttcatcatctttattcaaagaaaggggtttgtttgttgattttttggattttttttttggaccacagctctatctactccctgaagagtaaggattattaagtaaatcaggtaattattgactaagaagtgactggccactgcaattgataaattaaccatgtctgtttttcttatgtagctcactggaaaagaatgtgggggatttcctcttcttcttctccagaggccttcctgtcttgaaggctaggcttctcttgctctgggggaaagttaaaggcctttctttgattttctaagggtctgtagacctaacacttactgttagagattgcgagggctggggagggggccaagggctagaggtcattcaaggactggcaggacccttgggtgcccagcctcttacccaggaccctgaggtgccaaggcctctggggagtggctgggtgggcagtgtgcttctggggactggacacttgcactgtggccttgaatttggaggatgccgtgagcagcagccttttactggtttacctgggcatggacaatgagccactgggcagtgatcgtcacagacctgatgcccttcccccaagtttcaaggatcctgaggcctcagagttctgcataggaggagaggaggggccttgaaaagaggctgggattgaatttttctgaggtcctagtaggtgtggggtctaaggacgatttgatttagaaattcatgaaatgtgtcatttcttgccccaagctttgtggaacaagtaataccagttacactagtgatgaccaaatcctgctgtaaattgttctaacatattgtataaaacaggccttaccacttttgtaatcccttgcaaatggctgatcgataaccaacacaatataatattccaagcccttcttttggtagaaaaaatttcctctagcctggtaatttaaattccaaattacctccagatgatgctatttaaatgccctgtgattaaatctgcacaaagtggagtttctgtgggaaacttcgctgcctcctagggcatcctgcggtgtttttttaaaggccggggatctagaaaggctactcagggcctcggaatctttgtctacatgactcagccttggggccccgggccctggacacttgcccagagctgaacattcagctggacgcgccacagaaggagcatgcggggagccaggaaatatctccggaatctcacaatgctttctcacctacccttattagaccaaagaggcagagccgcaggggtgggggccgcggggcagagggcagcgcctgccgggtgggagggaacctgtgtgtgcgcgcacacactgttcacgtcatagtgtctccgtgtgtgtctgcgtctatgtatgtgtctctatgtgtctgggtatttctgtgtgtctgtgtgtgcatctctgcatgtctttgcatatctgtacatgtttctgtgtgcgtgggtctgtgtctatgtgtgtatacatctgttcatatttctgtgtgtgtctgtctctatgtggctgtgtctctgcatatctttgcatatctgtacatgttttggggtgggggtctgtatctctatgtgtctgtgtgcctacgtgtgtgtctctaagtctgtgtgggtcgctgtgtctgtctgtggctgggagcggggtcaggagtgcttttggagtccctggttttctaagaataggaggttcacagcaggagggggctaactcttcagtccagacccccctctgagacctgcagaccacctgcagccccacccagtgtggcccctgccccgcgtgtctgtggtctgagtggcagtcaggaaagaaagcgagggctgggcgtgaactttggttaggttgagatgcatggggaagaaagcagaagggagggtgtgtgtggggagcagacctgcaccctcccgaacagctggggaggccaaggggggggtaaggcccaaacctcactccaaagctcccaacatacaatccagcagttcccagtggaaaacttgctggggtttgcaaagtaccctcctccccaaaactgcatctttgagcatgcacccaggcaaaggctcacacttctctctcttcccaacgctgctttgggaaaccctcctgcaccagagaatgtgggacagggacacccttactttcgaatgccaactttggttgggcactcctctggacgctttccattgatctcacttaatgcacttaacagtgacctaggctttgttattcctcttttacaaataaggaaactgaggtacagggaggggaagcgggttgcttaagataacaagctgatgagtgtcagagctgaggcagaacccaggtgtgctgaattccggagtcattttcttacctgacagccctctacctctggatggccctctctttacatttagaagtgtgtgtgtgtgcgcgacacacacacacacacacacacacacacacacaccttagagcccttttataagacactagagcctagacagcaagggtgtccacgtcatggtagtctccatttaccatgtacatacaaaaccacaacagaactgtaggtctagtgaaagccattcttttacaccctcctcctctttccacagatggaaaaagaatcgcaaataagcataatgtgaagagcatgagctttggaataagcaagcctggaattacaattttcttttattagctctgtggctgtaatactcaacttttgcaagcttcagtttcctcgtctgtgaaatggaataatagcacttacctcattggctgttgtatggattaaatgagaccatgactatggatgtatggcatttggtacccaataacccctcaataatcggcagctataattattcataataataatggtggtagcaacaaacccagcccaaacatctgaaggaccgatcactaaaaagaagatgaactcagtcctacgtagtaacaagaatgtgacatctatgttgttgccaaaagtctggaggagttgccaggaccagagagaaggaggtggtgaggccggcctggaagagggaggggacagatgtcaaggaccccaatcttgaggtggaaagttctgtgattaacccagatgaatgtctctaacctccaactcttctgttctcagagttttaatggggcacaccgtgtgctgggcattgacatagatgggaaaagcatgacctaaaataagggctggaagccaagactgggaggaagggcaaagggagcaggcagcctggcaccaggtaccagtgaggtgtctgctctttgtccccatcacctgtcagctaaggaattctgcatgtcatcagtgcaataaaatgtgatcgccagagtgaaaaccttgtaatagaccagctgtggcttctctcaacaccagtatgtccaaggaggatgcatttttattgcttttgtggtcttaacaaaaaagattcatgagcattgtataaaaggcatattaaaacaattcggtaaaaggatgaaagaaaaatagagtgcttgtagattttttttcaggacgcacacacctatacctgtataaaaacgttgtattacggaagctctcacacatacacaaaagtagcatgaatagcacgttggaccccgatgtactcaagacccaccttcagcaatgggagtgctgtgtttatgagagtcccaattaaagcaacattgctcttaacattttccccatgtgtcaacaagctccagtgaccccataatgcaaacttattcaatcccctgatatccaagcacctgaaattacccctcatctcattccccaactgcctcgagctcctatctgaagtaagagagaggtaagttcaccaatttgccctaaattacactggaatccgggcaagtgcctttaacacaggatctgttcagtaagagttgaaaaaataataatagcagaagaagaatgaatgagttttgagcactcactatgtgctatgccgtcttctgagtgctctccctgttttatttcactgaattctcaccccaagcctgaactgtatattctgtcttcatccctgttttacaaatgaggaaatctgacacaagcaagctaaaccacttgcccaatttcacgcagttatttaggggcagggctaggatttgaacccacacctccttacttgatagtctatcttcttagccagtacactggggtgcggttctgaatcaggtgaccgctgaaaaaaaagcctgacacaggcaaagtgattcctgccagaacaggtgaggatgaagaagaaagttgcctttatcaaacactgcagtgcaatacacagagaccaggcactgtgctaaagcaaaaactgtaaccttccacaaagaccatcactaccttacacaaaaaatatttcatctgcccagcagctgcctatcctaccccagactggcatcactcttgctatttgttctttgtagccaagtaaaaattatttcagaacaattctgttttgaaatgtcatgtcctaacagcctcttgccatagagctacaggtcatgattgcgagataatattcgtcatccaaactggtagaggcccttcctgaatgagtggctgtcctggctcctcagtgccaggctgtgggtgggattgcatgcttttgaaaaaaataagtgccttatacgcaagtatgcatagaaaaaagtccggaaaaacatcaaccaaatattagcgagtgccagcgtctgcccactcacagcggccgggggagggctggtcatagggatttttcttttttgcttatctcaatttttaaatttgttccaccatgaatatggattacctgtgttacagagagtaaaggaagaaaagttaggagaggaaacaagaaagga

SEQ ID NO: 61905 - DNA, 1565 bp, Homo sapiens
ttctttccaccgttattaggttgtttgcttattcctaaaatcagaggaatttacttatctcagagagaaactctcgaatttgaaattgttcatcatccagcagcatactaaagtaaattctccaaaccagtagacagtaggggtgggagaaacacaaaagaattacaggatgttgttcgatttaacaaatatttattgggtacctaccatatgacaggcattattccaggcaccatatataaaacagctgttcccttccagggaaatgtggttttgtgtgagagatggtcatgccagcaaataattccagccaagtggaatgctctggcagaagaacgaaacacctatggtgggagcccacaggtgagatcccccagccccacccctggaggtgcctgagcaagggtcgaaggcaggagggcagaaggagcattccaggcttgggtatcagcatggaaacaggcaagaggatgtcaacgttcctgacatgtgaaaaggaccctgagtacttcggggtgattaagtgcacagtgtaggaggttagagagggcgggtggctcactgggaaaagtggtttgctaatttgcctctgttggcccctctaggcctgctctcggcctttctctgccctgctctggccctggaggctgacttctgtgggcggcagcaccggggctcctgggcagctgccttccagttaggttcagtgcctagaagcgccagcagcagctcagatggaggacagagagtgagggtggggtgtttgttctcaacagtccccagctcccaacctgcccagccatagtcttggccatggctgccttctctgccatggctccctccaggcagcccctccttcacggtacagccctctccaggacccagcagcactgctcttccctctggtctctttagacccaggggcagggactgtttctcactgaacccgactcctttcacctgaccagcctgtgtgtaaatagtcccttcgttaaactagtccgttgacctttatgagtgagccatctgtttcctggcaggacctggctaatgccagtaggttggttaaaaatgcaaatcatgctaagaagttgctttttgttgtatttttgtttttgtttcacaatgacagtggcaaactatgtttttgaactcctaaaaattataaactgaaataagccagacacaaaagatcacatatcctataattccatttatatgaaacatccagaaatggtaaatttatagaggcagaaagcagaatagttgttgcctgggctgggaagtgactacccatgagcatgagggatctttttagggtggttgattgtggtgatgattgtacaactctgtcaatatattaaacattactgaattgtacacttaaagtgggtaaattttttatgtccagaatacatctataaagctgttaagattataaacaaaacatatcaataataaagtttggaaaagaaaaaggtgatatattatcacctataatcccaacaccctaacacaactattatcattttttccatattccatttgtattaactgtatttgac

SEQ ID NO: 61906 - DNA, 1271 bp, Homo sapiens
ctgtgaggcctccttgccatacttgggatgtaagaagggcaagcagaagatggtttgggggacttcatgcccccgattgttttaaatcctcaccttccatttgatgttttaaaaaattgcttttgcaccaacctaatattttagttaatatgatcaatgaccatgaagctgctctgccggcaagcctgaggccacattggggatttcagcacagtgatggaaggtagacagctcagttatctgtggtgattagagaccaggaggggagggacacggagctctccagaggcagaatgttcagataacagcaggcaggatctgaaggaagagtgaaaggagggcttgccagaggagtggacacatgcaggcagaacatggaggcattctgaatattccccctcctgcatgccatatactggccagatgtactgccaggtgaataaggcacaggagtgatatagatgagcgtggtccaatagaactctctgtgatgatggaactgttctttatatggtccaatacggtggccactaccacatacagctattgagccttgaaatgtggcttgtgtgactgggaaactgaatttttgcctaattttaattaactgacatttaaaacgtaaacagccacatataactactggctcctggattagatggcacaggagaggaaactgacctaagagtttgatggaaggaaaaaggttgggaaagttctggaacataagccactgtctatagggggtcagccttgatcaggcaccaccgtgagggttttctaagcagctctgggcatctgaggccaggaggggaaattccaaaggaaggaaggtgactaagaagcgtgacagccttgccagcccaagtttgtccagaaacaaccctcttcatttagcatctggaatttgaccaggcagatgtagttccagggtatgaaactgacctccaaactctgtgcaagctctgggaggcacattgctgtgcaggaagcaatgcgacgtgacagtgagcactcttcaatgtcaggcccattctgtctatatcatgcggtcccacaagctgggagaattgctgctcactccgttgtttcccttggtccctgcatgtacctctcagagagcacccactctgtgatttcaaccccttcctccctccctccctccttccttccttccttcctttttttctttcttttttttaaaaaaagttttgatgcaatgaaatagaattgatgcacaggtcctaagtttgggctgtgggttctacatc

SEQ ID NO: 61907 - DNA, 1375 bp, Homo sapiens
aggagccgtttttgttgttgttgttttcttcttagacctatacagggtgtaatctgtagggcatcattgaaatcaacttgtccaaatcctatatgttacatacggaaggacagaaaacccagagaactaagaagctcaccgcagctcacctgcccctgaattagtggaaggtaaggaattagaacctgcagatgacacacccaaccctccctatccaggaaccaccccttcttgcctagaatgaatcctccatttttgtcagcccctcacgtgtttccactgcaaaggtgttcttcaccctgccttcagggacgcagcataaatccttagatttcctcacattgtcttccctcttcattcacccccctgggctccagtggaaattaggccaaagaagaaccaccttccactcctgccctacctcactctctcctacaacactgatatctaggatagtcctctcaatctttaatgtgcataagaatctccctgggatcttgttaaaatgcagacgcagacagtaggtctggcttgaggcctgacattctgcacttctaacaagaccccaggtgatgctgaggctgctttgaggagcaagtctcacgctttggtcctaagggctagagctgaaaggagctgccagaggtcaggtgctccagaagtagagctaagccggcgattcctatagacggggccccagagaaaccagtaagatagtcgaggaagtagaatgaggtagaaaggaagctaagcaaagagctggcttcagctaaaatctaacctcagcctgatccacaggttgctctgggacataagtgacaccacaaagctgttccagtgtcagctgaggcaaaggagctaggtttttgcttccagcatcaggcagtcattagctgtgagctgcccctgggagaaggacattgccatccctggataacctccaggcattttcagggttggcagctcccacttggtaaagggcaagcctccagagaagtaaacaagcatgagccaacagtatgcaacactcacagcagctgggggcaggtgcccccgcggtaaagaggatccaagcaggcccccagcagaatctagcatgagggcctaaaactcttgcaggccatctgcccagccccacttttgcatagcagagattttaactttgaaagctatgcatatgtacatgaaaaaacagaattagaaacaccaacacaaaactttacaacggtgatctcagcttgactttcttgtctttttccacaactttcaaatttgctacaattaacatacattctttttgttgttgttgagatggggtctcagtctgtggcccaggctgagtgcagcagcgcaatcgcagctcactgcagccttg

SEQ ID NO: 61908 - DNA, 1301 bp, Homo sapiens
gtgacttcctgcccaaggtagaaggtaaaacatgactaaacccagaactaaaacccagatctcctgactcccagccaggttcttatatttttctatgctttcattgggttgacttgtatcttgtaccaaacccagatgagttatcagtcctcctcaacatccattcactcatttagcaaagggatattgagtacctactatgtggcaggtgcttcttccaacagttacactcagagaattgggggtattgatcttggctgtcactattaacagagtcaagatgtccaagccatgcttccagggaaggggacccacttcccttctcatccctgctttagctcagtctgatagaagagtcaggactttaaggtgggggaatagagggagaaatattgatcccaaaggcttcctgtgccctaatccctcttttggtactgtatcctagtacgcccttacgttccctgttcatctcatcacctaaagcatggcctgtcttcccacacatttacatttcttaacacattctaacttccattctggttatctggcacgtaactcatctccccatggagattatcagcaccatgggctcaggatccatgtctaatttcacctttgtatcctcgacagtgcctggcatgacttgtatcttgtaccaaagacaaatgattcagcagcccattgtaaataaatgttagaatagatattgcttaatccttgttgaatgaacgaatgaatgtgtaatggaaggagaaaatgttatctagagaggtgggagctggagagaacaaaactgattagcaaaagaaatggagtaaaattctggaaggcagaagacaaaagagaaaagaagagagctaataaacacaataggaacctgtgtaagtacaaacagccaagggactttttaagaatgagaggaagaggggttaatatttgaatctgcagtttatagggtacaacggaaccacttctcactgttatgctcaactttcagtgaagtctgccacaccttcgggtaccctgtatgggtgatgttttctgtgggaagtcaaagaaatgcagctgtgttgtacatctggaatgaagccagagagaatagggatggggaattgatccatccatggaactaattcagtagaagctggtgctcagagcccaggtgacaaagaaaaactcaagcccatttcctgatccaaatccctgggaaaattagcaatgaagggaaggagagaaagcggttcccaccatatatgggatggagttgaggctatttcatttgtatcttaatggccaaagaa

SEQ ID NO: 61909 - DNA, 867 bp, Homo sapiens
ggctgaggtgagttataaggtaaatttcttggaatggtgcctggggacacagaaagtgtcaccaaatattagcttattactatgtgtatataatatatatacatatttatatgaatacatacatatgtaatcctatgtatatacatatatgtatatatagcatacatataacatatataagtatatggaatatatttatatactacatatttataatatgaatatgcacataacatattcatatataaattcatatttaatatgtcatatattcatattatcatattatattacatatatattacatgtatacatataagatgtatacattatatatattatatacatgtgtgtatatataaatctacacgtgtatgtaacatgacatctcatacaaacagatgcttggtgaatgttttatgaatgagtgtacgacagtagatgaactgggagaaattctttgagtatttcaatgaattgctggcagctttgctggagaggctgtgacctttcctttctaattaacaggctcatggaggtggggagagggttgggggctggggagtcagcagtagacactgaagccctttcttaattgtaccagacaccttgtctcatgacagcacagaggaagaattcagagaatcagaccccctctcctgaacattcaggagaagaattgcatctgacactcaatataaatacacaacatagcagggactagtctcctcctccctataggaaatcacttattcccatattttgtttttgcccttctctgcctttataagatgataaatcactaaaatggaatgtggcttcaaaaagccaaaagtgcattatttacatttttcagccaactcagca

SEQ ID NO: 61910 - DNA, 610 bp, Homo sapiens
acagcatctaacatttattgagtgcatggcagatgtcaggtgtcaggctaagcgctttaaatgaattgccatttcatctgactgttgcctctgttattaccattttgcaaatgagaaaattaaggcacacacagtaagtatagaaatgagatctgagatctggcaagctccaaagttcatgcccttcacctagggtggtcaactatcccggtttcccagcgactgaagtgttgctcaagacatgggactttcagcggtaaaaccgggaaagtcccaggcaaacagggacaagttggccattgtatcttgacttggagacttctgcctgagatggaagctcagctctaccacttatgactgtgtgacatggggccagcctctccacccacaggtttcttatattcctcatctgaaaacaaggatgatcacacctatcccgcaaggcggttgtggccatcgcatgagatagcacatgtaacagcaacccgctgtgtgtctggcactgacagaaaaggccagctccccaacacatccacctggaaagcgccacttggcccaatctgtgtttacttcaagtctggagaagtctcggccattatctcaagtggtt

SEQ ID NO: 61911 - DNA, 538 bp, Homo sapiens
ttttctcagcaattcagggaaggaacagcagtgcctgaagtccttcaaaagtctacccgggcaaatggtgttaaggggtttcccttccctttgtggagttcagcctgctctgccccacaccacatccttggtgctttcctaggaaggaggtgatttcctccagccaacagcaactggaacatattctggaattcatctggattcactgagagtgtgagaggaggtggacaagggcatggaaccaaggtcacagagcagtgcaatccagttcacctgatgccacctgatgaagccattgagattgtggtattacaggaacagaagccagccttgggctgtcagcttatcggttggtcatcactactatcttccaatgtacatatttccagaaatgattcattgcactagatccctgtagccttaagacagtgatgtaatgtgaaaagggacctgtaaaaggaaatccttcctgtgaatgcagagtattagattgtagatttccctggccatccactgaatggaggtggggtctgtgctg

SEQ ID NO: 61912 - DNA, 2315 bp, Homo sapiens
ccaagtagccgaagtatacctctcatttccaaaaggatcatcaactctctcatcccctaagatagtgacttgtccttccttgattaattaaggcagctgccattcaggactattagcgtcaacaggccccaggcagaggaggcaaaaaaccaaatgctaccctgcaaaatgacatggccaactgaggaaggtggaggagtgcagagcaaattgaggaaacgtaggctttctccagtgaagtgctggtgaaggtttattgacctgggtgtggggaggacagcactgatttgtagtgtttgccaatttccaagtgtaaatactcccacaatggctgacttcaacgggcctggagttgggtagtgatgtgcagcagtgtattccaccattatagacacaatagataatagtaaagtgtagcaaaataattaggaagtaatgcatttttagcatgtattaaaatttttaatataacttatttaattacaagtttatggaatttacaatttaatagtggtggcaatgtttaacaagtggctaacaaaattcctgaaaatttccatcaaacagctcttacaagccagcacggaccatctccagcacactaccgaacagccgaatttctgtgtgtgtcttaaacagtactagttcccaaagttaattactgtttggggagaagattgcatgtataatttaatagtgctattacatcatagaacctgcatgcatgcaactcacactgatgggactgtggagaagaaatccaatgagaaggatccacaaccaccactggctgtggactgcaggactcggaattcctccctctttggttctggctgggccctaggatttgagtggccaagagagagattggagaggaagggatggcttagcaaagggctgaatgggcaatattctagaattaatgtccctgggccggggcattggaaggagggcatggaaaggatgcatctggagagttagaaattttggtggggaggggcaggagttttccaagggaggtggatggaaacttgaaggcctagactcttgataaaatgtgccttcagtcttcccatgaaaagaaaactcagtgaagcttgtgtggagccagccctgaagcagtcacgaaaaactgagagactttgcaccagggagtacccaatacgataccccagtcaaggaacaaaggccatgtttggcttccagtgagccactggacttggtactgggagaggacaaagtaggagaaaaatcaattttggccctcagggaatttcctgagtagaagtatgcacaaatcattaattccaagggtgagctcacgggctcccctgtgaggttgggagactcatctaaggtctcggtagccggatgaggatgctgccaaggtttcttcctccttaatggatgccagcagctcccctcctctctggatcaggcataggtgctgagggaggctgaggccaggggcagaatatctccaactgaggggacttctggacacgtggggttgtcagtggacttcccagtggtggttagggatggttggcagcgagaaagatggaagggagcaccgggcaggccagggaaattggaggtgagaaaaggtaaattatagctgggaaacacacatcagttgaggctccggatggtgctgggggttcaggtgggaaagtaatgtgaaacaaagttggaaaggctgcttgaggcttagtaatggtagcctgagtgcctggctaagaatttgacattttcacgactcactttccttatatataaaagtcaggggaggggagggggcgttcacatttatttgtgtccttatttgattgatgtctatctcatgcatgaaactgtaagccccgagaggacaaggggcactgtgcctgacttggctcacctggagaagtgccaggcatggagcagacacttggtgactggtcactaaattaattaatggtcagagattttcaacttgtatttttggtgttagaattcaaggtagcctcaggcactggggaggcccagccaggaggctccaagtgtggtagttccacttcctccagccatctgtatgcagtgtatgtatattatctcatttgaagcaagagttccttaacttaaaaaaatacaaatttggaagccactggagcaagtgtcctcaaagggccttactgttctatcctagtggccatcatccagaggctggtatatggataagccaggcccagattctctagcccagggacctccaacccccaggccacagaccggtactggtccatggcctgctaggaaccagccacacagcagga

SEQ ID NO: 61913 - DNA, 2753 bp, Homo sapiens
gtaaggggcctagaagaagcaagctgggagatcaagagataatcttgagagcgagatatctgggtttgagattttgtagggaatgtcattttggtaatgggaaggcagtggatagctaaggtctgaaactgttcttggcaattaggaggtcatgtttgggatcctggaaaagtcatcctcatagatgataaagggccccgcggtgatgagggagctgggatggaaaggatccaggaaccctggagccaaggtggccagtacatcgaaggggttgactataaatgagcactagggatggggaggggactgaatgacattactctaaaggaactgagctttcacaaggtgaagaggagtttaggagtggtctggggagccaggaggattccagcctgtcctgctgaccctgagaggggaatgtgaggataagcagcccctctctgaagggtcagagggcaaagaaaagggaatgttccaggaaaggctaagggtacagaggaatgcgctgcttggagcagtgaaggggtcagggaaagggggatgggggccagggcagccgagaagagaacagagcagtgtagggatagagtctgggagccaatgggtgcaggaagaggcctgggatgctggctgagaccgaaaagaatgggaatgggcccaatgggtttcatccactgcgtctctacagtggggtgaggacttggggctaaagatttcacacagtggcttggccacagagtgggtctgcgcaggcagctgcgatggctttggcaggcctcgggtctgcaggcaccaaagggctgcttgcaggaaccctgcatggtggatggtgcttcagttaactgctcagacaggacttgtgaggagggatgatgacaccacaggctagaggggtggctggatcagggactagatgagctctgaagtccattccatcactgccacctgtgatcacatacttcacagctgtcccaaaggttgacccaactatgagatatgctggttgtttaatctgtaatttcaactagctgtatacaaatgtgccttcaccaccacaggctgagaaaggaaacagacaccccggcctatgccagaggcctgagcataaccacctagagccagccttggagggtatcagcaagaggctgaactgatgaaggagaagggaagatgcagaagcccttgttctcagggctcagagcaaactgtggcatcagatcttttaatattgctatttctgttgctgataatgacagctaaagtttattgaacactttctatgtgctaggcacactatatggcctagcttgtttattcctcatacactaagaggaaggtgtttttatcctcattttgtagatgagaaaacaagtccacagggatgaaggaacttgctaagtattggggcctggacccctaagaaaaactgacccaagttcaaaagatcagaaaactacagctccaacaggaaatatgactcaatcaaagactcaggaggtcaggcacagagcaagggctgacatccaagtctcctgactgcctactcatagttctctccaccccaccacacagagacgaagcacagtgtccatttcttctgcccaaaagacatcttgactgcagcctcatgaaagaccccaagtcagaaccaacaagctaagccactcctagatttcagactcacagaaaccatgagaaatagtcattgtttgttaagtcattatattttgagatgatttgtgacacggcaataaataactaatagagggtaaacatctattggctcatgtgtcaggatttgaggacattccctctgacatttctactctctgtcctgctggaaagtcctttgtcatgagacaaggaaagagagaggccatagtgaccctctgtcctccatagagctggagacagagtggacaactgacgctgcctttctggctctcagctgtgctggccaacaatacttgtccatttctaccagcaaacttcttcttagaaggtctggtagtaagtattttaggctttgcaggccacatacagtatctgttgcaactactcaactctgccattaaagcgccaaaatagcattagacaatacataaacaaatgggcatggctgattctaataaagctttatttacaaaatcaagtggctgattcaagggtcatactgtgctaatccctggtttagagaaaggaaaaactaagtccatgaaggtctgtggccaggcaggcttaaagggcccacaggacacttcccatagaggggaagctgttcctaaactgccctacccttggccccaccattgctctacctctgccccaggaagccaagatatttatcatctcttgcaaacaaccaccacatatgaagatagctaagggagctccaggtttgctgagagtctgagcacctgtgagggatattactaaggaaatgtccacaccagctagaaggtttctttcaactctgggtgcaacaatgtccagacactgctccagtagttactgcttgcacacatattacctcctttctttctcacctgcaattattgttgtgtaacaaatgaaccctgaaactcaataacttactcacatggctggcaggttggttcctctccacacaaacttctccatgaggctgcctgggtgtcctcacagtgtggtgacaggcttcccccgcaactacctatccaggaaaccaaggaagaagccgcaatgcctctccgacctagctctggaagtcacgc

SEQ ID NO: 61914 - DNA, 11525 bp, Homo sapiens
agtaacatgtggtcccgcaaggagtttctctagttcagttgcctctttttataagtgagaaaaaaggcttagagagattgtaacatggctaaggtcacactgcaaggaagtgaccaggccaggtctggatccctggaactgactcctaactccctattcttgcctcctctgctgagctccaacctggggagtcagctccctggagtccacgcatctggatatcgtccacatgcctggaactttgtcactgttccggtggctgggttgacacaccgtgattaaagggctctggtcaatttctgtgccacgcagcccctatgctaatggtcagatctaatgttctgaccattaggtcagtgtatcttttccctcctgggcagttaggttagtggaagaaacccgataaaatcttggagaggaatttgatcattctctgaaggacttacaagttgtttggcctgcctaatctgctcagataccgtccggggaatatttggtaaccatgcagtacagactgtgaattattctgtggggactattaacaagaccctcaccaaccctgcctcagctgatctcagggcttgggggcagccccctctcctcccctcccactgaagctctgaaaaaaagcagcctttcccccttgggagatgggaggagtagttaaaaataagaagtgttgggggaaatcctcctccttccaagcacagctcacacggcagagcctcctcagagttgcggctgcggatgcaatgacttagccaggttaacgccgatcccatgttttccgaaacctggcacctaagcatctaacatggaaggccgactccctaaaatcagtgcaagaaaaatgataacaagttatatctggagggacctcggggattatctacccgctggatttaaagttgaggaagccgcgggcagcaaacaaggtctcacagttgctggtggcagagtagagaccacagaccaaattgcctgagtctaaactcaatgttctttccccttagactgccacccgcacacacacgcacacatgcacacctttttggaggcactgcacagcaagcacagaagtacgccactgagtcctgtgtccctaaagtatttgactgtccctccgctgggggaaagggcaggcagaaaacaagactccgtgtgctgtcgctgtgccgccccctgcctctctgacccgcgcccgcagagaaagtctcaagagccgccccaggctttctcccacgttctccctttctctgctgcagttgagtttccagagcgtgagcgcgcaggatgacacctggctggctgagagctgccggggaggcgctggcgggtgccgagagcgcactgaccctgacgcggggtgcagcacggctgggaagcccccgggcctttggctaagcgcgccgggggacggcacaggggggcgacgcgcatccaccacctggtccgcgctctcccggcctccggcagctcagggcgggctcggttggggaccctaatggctgggtgccggccctgggagaagggcacgcggagggcggagggttgcgcctcggccccggctcggccccaacgccctctccctggcgcgcaggtttagaaacagggcggcctctccggccgccgcctcggcggctcgggtccccatatatagtcatatccaccgtcaactgggaggccggcggccggcagcgaatgggcgagcggcccccgcgggaggagcggggagggggcacggggcggagggaggagaggaggaaggggggcaggagaaaaaagcttttccaaaaaagtattggctgtcttgaggaatgcggtcgcccccttgggaaagtacatatctgggagaagcaggcggctccgcgctcgcactcccgctcctccgcccgaccgcgcgctcgccccgccgctcctgctgcagccccagggcccctcgccgccgccaccatggacgccatcaagaagaagatgcagatgctgaagctcgacaaggagaacgccttggatcgagctgagcaggcggaggccgacaagaaggcggcggaagacaggagcaagcaggtctgcgcctccccggccctgcgcccgcgcccagagcgccgggactcgagcctggcacccccggctggatccccaccccgaggactcggggagccaccaccctacccccaccaccacccagggcggccagggcgcgcgtctggaaagaaggaagggaaacgcaagagccaggcttagtctaacttagtctggtctgaggacgcttatttcccttctctggttcccatggcccgcgaaatcaagtcctagaggcgctttattctcaggactgggaatcagtttgggggagggaggaggacacccggttcctggggacgtttgaaggaagggcgagggatggagaaagggggtcgagtaactcaagtgttagaagttcgttgacttttgactggggagaaaggaaccttaaacttggggaggagaagggagtcctggagttgttacctaagaacaaagatggggcggaatggaggctacagcccgaaagccaggccagcagtggcgttcttctgtgtccccaagtagtggacttgagcccgctgagacctcggcaggagtctcgtcccagggcaggtgggtgtgcggggtgagccgcggagcggttccagctcgggtaaagaggaagttacctcgggtcctttgcactccaactcggcggcgccccgagcccgaggggccccagccaacccgacgcccgtgtgttgtgtgtgtctaacacccggtccgtgccggccgcccgcgcccgcccgccgctgcccccagctcgaggaggacatcgcggccaaggagaagttgctgcgggtgtcggaggacgagcgggaccgggtgctggaggagctgcacaaggcggaggacagcctcctggccgccgaagaggccgccgccaaggtacccggggcgcgcggcacggcgtggcgcacgaatggctaactctttctctttctctctctccctccctgtctttccctctgtctctcccgctgtccctgtccttctggttctgtgcacccacacccctccccttcgggatcacgctgcctgctgcacccccctccctccctgtaccccctggccaactcccagctggaagatgagctggtgtcactgcaaaagaaactcaagggcaccgaagatgaactggacaaatactctgaggctctcaaagatgcccaggagaagctggagctggcagagaaaaaggccaccgatgtaagtgcacgctcacactgcttccctcacctcttgcctgcgtggccactccggggtcaccacagggctggagagcaatgaaggaagtttaccttttcctgctggacacctgcacacagccctgccatggcccagagcattggatgccgcctctgactgctactgcacacattcatttatatttcatccactcctctcttcttctcctttcctttacctccctgggggtggaggtgggtggatgagaggctgggagaatagagcagctgaaattggactctggaggtgaacttcacctccctggtggcagaaaacccttgaggtgtcatcaccaaggtttgtgtagagaatgccaggttttcttcactttctttccttttgccgtttccagtgggtgggaagttctgggtttggtggtgggtctagtcagggttcagagaacctggcctctaaatgaaagaaatgacacagcggtacctttacttagatggctgcacttcatggtggggcacagagacactttgaggcttcctttctcattagtgtaagccttaatccaccccttaagatctgcctgggaagatgatacttgcttgggtctgcagtctgaaggcactagatccagaaagtaagctgtgagttatatatagctcagtgctttatatggtatagtgagctagctgccccctgcccctcctgctggccccgcccccacctgtcagccttctgacaaccaccacatagttgcaggggtgatgcacacagctaaggctctcctaagctctttgtccactgccctttggaagctttttaattgatagcttgcctcttctgcctcggaaagtcaagccaaaggaccaacttcttttcacaccgttggattccattctaaaagctaattaagcctagaggcccaattagaaaagaattccttgggaagttggtaacaattccaagaatgtgtgagcaccagggaaagctatgccagcagttgaaacaccgagagcaacagcagacttttttatatgaaagtaacatgcaaataactgaagggtctcaggtcttgaaattagtgaagtcttttgtagcatgaaaggcttgagatgtatatccaggtgtgctttgtaaatgagaactccagagacgacatttaggatctgacaaaaagaaattttcagtgaaaatcaagcttcctggaaaggggatttggggggaagcactgatttcgctaaaacatttaaattctaaactacctggctttggaaaaagagccaaaaaccatatatgactctgagcctactttgtataatgcagatcagatgcctgctctatatatggctaaatggaagatgcctgcctcccgcaaattctccagcaggacgtttatttagctttttcaaaagagctgctaatagatcaaggaaagatattccttataaggaaaagaatgcagagaatttgaaaatagcccagtaagactgaaggcaaaagagggagaaaaaggttactacaattcttaagggaaaaaaataggataataattattgtaactatgtagtgctaacatgtctttattgaaaagtcttgttgaagggagcgctggaatggggtggggcagaaatgggaaagaagttatttaaagtcagctggtgtgggaagcagcaggggagggagcttcttgaatcttgttttggttatttttcccaccgggaaactgcccctaaatctggcatatatggcttttttgatagtgtattgatcacattcccttttaggacactttaggttgtctggagtttggagcccgtaggaatattgaagaagttagtgaagaaatgctatacagtcatttgttgattaatgaagggggataaggtctgagacatgtgtcgttaggtgatttattcattgtgcaaacaccatagagtgtatggtacttacacaaacctagagggtatagcctactaaacacctaggctacaaacttgtacagtgtgttactgtactgaatactgtcaacaattgtaacacaaatcaccaggcgataggaattttttagttctattgtaatcttatgaggctactctcatatatgcagcccctcattgaccaaaacatcattatgcagtgcatgaccatattgagagtattcgttttttatttactaaaaaatagtcaaaacttgaggaggaagagacagatgtcactagaaaaagggagaagtccggtaagggagaagtcagcttcctgaggtggaatcgtattacctttgggattaggacatttcattgtcattattcaccagtgtaaaacacttttacatttttctactattattactaaaaacatttttctactactttacaaatcctattctggaagtgggctctacctagcttagaagattgtcattcaggagtagtatccctgatggtcttgtttcgaattttgtgttgtctttccacctaagtcaaaagtgaggctgaaggggatcgaagactccatttttttctggcccccaatctcttccccagtaactgtgatatatctgatatttatagcatatgagtctttatccctttgtaggtctttacttcttaacttagggattctcaaccttctctaaacataatcacttagggagcttttaaaacccaaagttaggatgcacccaaagccagttaaatcagaatccctggggatgcaacccaggcggcagcatttaaaaaatacccaagtgattccaacctacagacaaggatgagaaaactctcctaaactcttgtataatgacatcggcatgaaaatgaactcacctgaaactgaccttcccaggacattaagtcactagttggctgcttatggcacttgccagtgtccagcagtttcctggctgctcctggaggttgccagacacccggttcccccattctcaatgttggaggcccacagtctctgcacttaggggaccagctgtaacctccccacctgaccagatgaaccgcggggaaacaaagcgagaagctcccacctacaggatgcaaggacccaagctgggatttgtgagagtctcagcagaggctgtgaggaactccacagaaaatgaggcaggaaagcaaaagttccttgttagggcttggaggaggagagggttgtcaagcatgttttctttattattcccacacataagggagctggctttaagagctttctgtgacaaacctgaggagaaaaagccctgagacttagaaggcatttaagaatacagctcaagggggaaatcggtggagactgtatctgcggtggttttctccacctgtagccagaggctctctcatagggttctgtggctttccttggggtgccttttaaaggcatcccagtccagcccaggactgactggattccaggagatctcagaggctggtctgacaccaaagaaggctgtaaagagaagagaccatttggatgactgttttcatggaaagtgagccccagggaggctggcctgagattacacagctgattatgggcctcagcctgactcttaaaacaatgcttgtgtatttcttaatcgtagctatcatttgagtttttaactatgtacaaggtattgtgctaagcgctttacagtccttcataattctcatagcagccccatggggaaagtactattattattcccacttttacagatgacgcccagagaagacaggtaatgtgtccgaagtcacgcagcaggaaactaggagccagagtcaacctaggaaaactgcatttagaacaggaggtctaaccactgtgctctacacgcgggtggttttcacttcgtgaagttttggggaatgggggtagtgcttgggttataatcttgcggttgggatcaggccctttagggcatattccggctccagacccgccgctcagcttctctggctcccgggcatgggaatctggactcgggagcggagcgctcccgcggccagcaggagtcgctattgcccttagcagccagctccgttaccccgggtcaccaccgcgccgcggaggggccctagaagtggaagccagagccctagtgcagtggcctcccggagcgcccagctcaccaggtacccccgcagcgcgccgggagcgcctttctccccgccgccgcgagcatgcgcagtgcccccagccagtcccgggatccacggcgcgcgcccctcccagccgcgcgcgcccgcctgcggtttgtctgcgcagccctggaggctgcgacttccggactgctcctggccgcagggggcgccgccatcgcacagagaggcctgggcggggcggaccggcgctgggcagccaggacagccgcggcagccgggtccgcagggcagcagccggcctctcccactgcagccctcccgcccgcctaccgtccggcgcgatggcggggagtagctcgctggaggcggtgcgcaggaagatccggagcctgcaggagcaggcggacgccgctgaggagcgcgcgggcaccctgcagcgcgagctggaccacgagaggaagctgagggagaccgtaagggatacacccatcaccccgcagcccccagaggcgcatcctcccggggcagccccgcagggccctcctgcttccccccccgcaggccccggtccctcgtccccacgcctccagggcgcacctggcgcacctgggccagctggcggcgggctctggggaggggcccggcctgttctcctgagcctttgttttccatctcgctgatccaaagtaaacgctcccaggggaaacgggtggtgttgagaaggttctggaaggagcattttcccaggaagggtctgtttctggggtggtggctttcagtcgtgtctgtgcgtccccgggaggtgcactttgcgctgctggcttgctttactctgagagtggagagggaggaggtccttcctcttggagatccgtactttgagaaggggcgccgacaggtcaagtgggagaggcactgtggacttggggcccggggatgctacactccgccgttcccgtcgaccctgtggtttcccggcggcctgtgtctccgaggcggtagacagacattgacagcttgacagcgccgcgttctgctggaagagctaaactatagtgcaaaacccttaacccgtcccttttttcagcagtcctcctccccttttctctcatacagatagataatgctttgttaccaagtcttggaaaaagttggcgaaatgtcaacagttattgggtgtattctcttgcgggcttcccctcccccttgttaaatgtaatacctggcttccttcctttcttctaaggcaaatgtatccagcaaacacgaacaggatttcagaggtagtctagtattggatatttgtcgattttgtgtgtgtgtgtttttaatgaagatactgaaacaaacaccttgggagttttatgacaattgatagtatgatgtcctgctgtgcttaatatacggggttgttctgagttgagtaaatcgttctagttaagtgtttgtaaatggctgtatggctggccacagaaacttcaagacctgaaatggtcctcttcagaggaaagctcaactagagaaagtttcagataaaatacaagcaggaataaggaaattaataggcaaaagataattctcagtatttgctttataggacgagtcagcaaaagtcctgtggatatccctgaacttggctgggtggtaaactaattccgactcccttactcgctagtagctgtccttgaaccattagaactatatagaatatgatggataaaaacaagaactttggacccagactgtcagaacttgaatcctgtctccactacttactagcagtgggcaagttacttaatctctgtgtttcagttccctgtgtgtaaagtgtggatagtaacagcatctacctgtcggttaaaggagttactatgtaaagacagtacactgatgcttggcgcaaaagggtaagtgctgtgtgcccgctgtcattaaaactgcacagccctggcagcccagtgctccttcaccttcagttccccacccagcaagaggtcttaaagatggcctgctcatttcatgacatcataaaacacttcatttactgcttttaatcaacatttgttggggcggggggcttgaatgaagaggaagtgggcgggctggtaggcatgtttgatgggttaaagtggtatcagtggtagaagtctgaggtctcctcaccctgctaagaaagagtatgtgtgaccctatgcaggagagccttgtattggctcctggcctagtgattgatgttagacacaaaagataaattttatgaagggcacattattacttttattcttaccttctcttttgcacgtcgtttttataacagaactcttcctgtgccagttggctaaagatagtactttcgttcttttcacggctttatatcaaaagtagtttaagtagtttcaatttttttaagtaatctttgcaaacaatctacctgggtgattgattgaacacagaaccttttaagacagcaacttgaagactggatcagaccattgaagagagactttcaggctgcaagttgttcctaacttctgaaattggaacttaaatgtagctgacttaggtatttagatgtagcttgggctgtgagttaagctagcagtaacagtttcttttggcagcaaagataaaggtttagtgacaaaaccatgagccactgcaaaaaatatttgaccagagagttggcctaaattcaaatactcagactgtaattaataggccctattaaaccagcccttaccttggaaaaagcagccatcccttacttcctcctagtctgtgtttccaaggtgtgtggatccttcaaaatgttggaatgaggctactttgcttgacatgattgattccagatcttgtgacccactagggttatgtttgctttttttcattatttaaagaaaaaggcaggatgaatcttcctttctgagtagtatccagcaaacaaggagacagggagttgtggccagaaggttcttaattagtaacatgattaaatcatgggaaataaccaatttacaaaaattcccagcactttccctctttacacttggtaagtatttccgggataggaaaaccgagggtgcattttgtgcttgcattggcactcccagagtggctgttaactggaatgtatactctcgatttccgctttcatatgtaggcaaggcagaggcactacaatgccttgttcatgtctgttctccctcattatacaaatatgcttcataaattatgggctttggcacacacaggaggttgtgtttatctgttatccatgggagtgccccttaatgtcatcagtgtttttttttttcccccctttccttaccatataagggcagaagtttagcttggctgtggtcacttggccttacacagcaagttgggtgaaaccttcttcgtataactacagtttgcatgaaataaaaagacctgacctttgatcatcccaagttccactccagttcagtcaggactttggaaacatattccagaggattgatttctagattataatattctcccaccagtattttttcttaataaccttaactggaatacttttttaaaaagtaaaagtcactgccatttttaattttctgttgttgtattggctaaaacatctggatttcatgaaaatctaggcctcataaaagttgtttttttttttttttttcaaatctgatttgggataatattatactatggtggggtgggcatgcccttgatttctatatagtaccatgttggggtgggggaatggggtgcatgcccttagaggagggtcatatgcattgtaaggcacctcaagtacagagcaccaggaagttacttaaaaacatctgcaggaggacattggtagcctttactaatacagcagtctcttttttgagtagttcattgttagaacacaatagcacttttgaaataaaagaaactagcatcccagattgaaagacttcactggcagtcagcacatgggctgctgttagaagaaagctaacttggctgggtgcagtggctcatgcctgtaatcccaacactttgggcggccgagacgggtggatcacctgaggtcagcagttcgagactagcctagccaacatggcaaaatcccatctctactaaaaatacagcaattagccgagcatggtgtcacgtgcctgt

SEQ ID NO: 61915 - DNA, 2976 bp, Homo sapiens
tatctctgcttttagataacagatggtcatgtgtctatgggcttgtaccggcagaggcaacagcaggtccttaagactccccaggtgccatgatgaaaagaaccttagaaaatattgaaataagctcaaaacttaaaaaaaaaaataccagaaataaaagctagtaaaggtgagaggtgtggggcttttggaacatagagcataataaatcagaataaaaagtaaaaataagaaagagaaaaaagtggccctgattaaattataaaattaagcatatcttgaattctaacgagccaaacaaaaattctactaggccagtataatagggcctgcagagcctgtcatgggttcagggttttcccataaagataggtgtacctcagatactactcctaggtcctggctttaacctcaaagcccctctgcctgtcctgctctgaaacctctggggcagtaggcattgacttctgggctagggagtaaatgttccgtgtccttatgtgagcttcctattacccattagcattgttttatgaagttttcaattttatatcctgcctcatttcaaaaagattgtgataatcactttagcagatgatttgcattgcagcaactgttctcccagtcctggttaggatctgtgcctgaggccttttgtggggagttggggtgggggccggagaacatctcaatctgatctcaggagagataaagacacaggagtgagaactgccagttccaaggtttccgtgatgttccgggaagccaggagaagtgacatagtggagagccggcatgctgggagcctagtgacttggatcttaatcctgtctcacactgatggctgtatggcctccacatacttctgtgcccagggtcagagttccctcctgccgcctgtttctagtcaagagctagaagaatagccagcttctttgggtggtggcaaaggggattgtttatttatagtacagattcctgccctccccctttgacctcctgaatcagaatctctagggacacggcctggaagtttgatttttttttttttttttttgtttttgagacaagagtcttgctctgtcgcccaggctggagtgcagtggcatgatctcggctcactgcagtctctgcctcccgggttcaagcaattctcctgcctcagcctcctgagtagctgggattacaggcatgtgccaccatgcctggctaatttttgtgttttttgtagagacggggtttcaccatgttggtcaggctggtctcgaactcctgacctcatgattgcccgcctcggcctcccaaagtgctgggattacaggcgtgagccacagcgcccagctgaaagttttttttttaatgctcatctctgagttgattctgacactcagccacttgtgggaattgctgatctggacaatgcctagggatccttctagctaaaaaattgagaccctattttttggatttacagggcctcctcaggaaggggcagccactctcaggtctgctgtgtgtgccctaccattcctcccactatatcacaaactggcacctagaaactggtctccatgcccagtcgttgctggggcaccctgtatgaagccctgctggctggtattcctgtaggacatattctctgatgtccaggagtctgaggttctacagaatgcccctggggaaacaagagtggcatttagacaacagcattctgtaaacacagtgccaagagctaagggaaagaatgggggtgggggtgatcggagggaagacacggatggattggtaggggccctttgggtaggaagatctcatgtgcaaggctggaatgaacatgaggtgctgtttccttcctttctggtgactcggctgtgtggggagctggggatagagacctgtcacccagagggttctttccccaaagcataaacagtcgtctttctgtgagtacaaagtccttgaggttcaggcccagatctaaagcagagcagagaacttggaacttggtagctacaaaaaagttttgaaaatcttgctggcatttctctaataggccatagcctctgtaacaaggatatttgccatcatattgaaaatgataagaaagggggaaagaaaagaaagtgtacagtgcttttgagtacataacctagacactctatggaggctttttgttgttgtagggcttttggtttgtgtgcttggtttttttgtgtggctttaaattttgttttgttttgtttgccctttgtttttgcttccgctttgagtctcccccccaccctcaaaaggaatagaattttactggaaaatgaaaatatagaaaagtgaagaaatcttacctgacccaaaagtatatccttaatatatacatccttccagtaatagtaataaaaaaaaaaagcctaatggtttttaaaagacacttccctataattgagagatttgttatcctattaccctcacccttcaatacacacacacaccagaaacaacagtcatctgccagtaattcctagctgggtccatttaccagctgtgcactgataatgatttactttgtaggcagtacagttgtaaatgctcttcctctgatttatttcacatttgccctgctccctgcctccatcaaccaattactacatttttgtcaagataaaagtgtatttacatgtttttatagagtccttcaccgtggttggagatgccctactcacctctcttcccagataaaacttggcatttaaaatcttacaaatctaggtgagcaaagagctgaaggttctcagattcctttgattaaagactatgaccacagtttctaactacatttgcatttccaactctgtattgtggatccataagctgagaacgttgcttttattaaaattaggttggttttactcatcttactgagcccatactctgtgcagagaactgtgagttctctggatgtgagcagcttacagttcaatg

SEQ ID NO: 61916 - DNA, 2480 bp, Homo sapiens
cgcttgaacccgggaggcagaggttgcagtgagcccagatcgtgccactgaactccagcctgggtgagagagtgagactccgtctcaaaataaaatgaaataaaatataaaaaaataatgttggggaaaaaagtgttcatgcaggttcttataccagtgcatctgttctaagtgaaaagggaaaaagggcaaggattccaagacatgcctgttagagacatccagcctgtagcaacgaggcagatattgttctggactgcattgacttttgcacccagagttatttggtttgacagactgccaaatcctgaggttcaaaagaccgtccgtcacaagtggggaaaggggccagcattcttggggttggattcccagaattctccaaatgtgagtgtccataagtaagcctctcagtctaaggctccctcaggatggtggtttggttttagagatagtccctctccccaccgcaaagaatgttaggggaattctgacgataaaagcatcaaccatgttggccacctacgaacttgaacttagatatgtaaacttctcccagaagccaccaacatagtcatgtctgcggttcacaaggatggagcaaccccctcacactgaaggcagctattttcattaggcctgtcacaaaatacacaagagctatcatttcctccttttaataatgtttcattgcagaccaggcacggtggctcacgcctgtaatcccagcaatttaggaggccaggagggtggatcacttgaggtcaggagttcaagaccagcctggcaaacatggcgaaactccgtctctactaaaaatacaaaaattagctgggcatggtggtccatgcctgtagtcccagctacttgggaggctgaggcatgagaattgcttgaaccgggaggcagaggttgcagtgagctgagatcacaccactgcactccagcctgggcgacggagagagacactgtcccaaaaaaaaaaaaaaaatcagactagttaatagtaacttatatatgctgtgaagtttggttccatcttcgaaactttccacctcttgcctcatattcaaactgtcaccatctcctgttagatttttactgccaaactactctgagaaaccaaccactctgctgcttctccattgctactaccccagccaggtcgccttcatgtctcacctctgttaccaaaaggagctcctaactgccctcctgtcctctcctccttccccataaaagctgttcaccacgctacaatcaggaagatggtttcagcacacgtgatgccatccccactctctccttgctgaaaatctttgctcttaggctaaaactcaaaacccccgccttgccccctgcctgcctatacaatcccccttgacctttcctccccatctgtctgtctctgcctgcagccacagtcacctcccagctccctgacttctccctgtcacctatccgatgatcacagttcaaatggcacttctatagggaagtttcccttgaggacccccaatctggggcaggtctgtgttaaattttcattaaccatgtttctgtccttaagagcaattaatcttcatttataattacatatacgtgaatgtgatgatttgattaaaaaaaattcattttctccactggcctctaggctctctgagccttacccaaagcctggcacataaacagtttcttgcagaatgtttatagaatgattttcagaaacgtagaaattgactaacacagaaaattgagaatcagtttttaaaaaaaaaaaaaagtcaccatgaaggaggtattccccaaattttgagacaaggttactaataaagctcagtacataatggatgagattatttctgcacagaatccagaaaggaaagtcctaacaagttatcaaaaagacaggggaagggcagagcagactttggaacctgggatgtgcggccaaaagtcagagaggtagggagagaagggcagggagctgtgaggtcctggagaacactggatcaaatgctgtcactgggtactggtttgtaacacaatctgtcagagacgttaatggatgggcatgattaacaggaacccaggatgggacaggtcccatcaagcaaccataaaagatgacttgtaattgtatcagagatggagagttgggagtaagtagagcaggacctgacaatcagcactggagtccgtctgataaaaggctacagtgtctacaagaagggaagcctgagtgtcagaagtttccactccttgttgattggatggcagactggggcccagctgatttgcagccagctgatgacctgtccatggagattgtacacatccctgtactctggtttcaggttcctcagcagcctttgctcataggctggcttaactatgatcctgctgtgggaagataaaaaaactgaccgaaggagataggctgagtaatggctccctcaagatgtccatatttcatccct

SEQ ID NO: 61917 - DNA, 1750 bp, Homo sapiens
gagattaggtttcttatttcacaagaatgtctgatcatttacagatgctgagaaatcataggtaattgtaaattataatagttacttttggattaaaatttttcaagcacgaaatttttaaaaaacactttatcttttatagcaaaagaaaggtaatataaggtctggatgtaacttcatgtctttggtacggtgtggagctagaattccagaagcaatagattttaaaacatctttagggaaatgggtgaattgaaatgagacataagggagatggcaagagagtgaaaagaagcgcgttctaaagggggaaaggagaaagggaaaggaaaggagaaaggcatctctaaagggaaaggagatgcctgctgagcgtctactgtgtgccctgcgctgttccagaagttgaggatccaaaactaagtctaggctccccaaagaagtcccactctggtaaggaatctgacaagtagttaaatgatacaaagtgttaactgttgttaaagaagtgtgcacactgaggggcaagatggtaagggcgagaactcccatgggacgggaactaggaaggcttctgggaggtgacgcttgatctgagggtaagcaaaggaaaaaaaggaaagagagacagaaaggaaaaacaaggaagagacaagaaaagggagaggaagaagggctcgatgcgatcggcgctcgggtagtcaggcgtcgactgctagggtctgaccgcggtccccacccccgtcccgccccctgcccttccctccgccccgcgccgcggctggcagggtgtgcgtgagtttggtggcggccggctgtgcagagacgccatgtaccggctcatgtcagcagtgactgcccgggctgccgcccccgggggcttggcctcaagctgcggacgacgcggggtccatcagcgcgccgggctgccgcctctcggccacggctgggtcgggggcctcgggctggggctggggctggcgctcggggtgaagctggcaggtgggctgaggggcgcggccccggcgcagtcccccgcggcccccgaccctgaggcgtcgcctctggccgagccgccacaggagcagtccctcgccccgtggtctccgcagaccccggcgccgccctgctccaggtgcttcgccagagccatcgagagcagccgcgacctgctgcacaggatcaaggtgcggccactggagcggggggcgtagggggccggggatccacccctgtcggcggtgctgtcgggggctgagtggaccccacccggggcggcggggtgcccgcgatcggcttccgagaaagacttcccatttccccaccgccgagccgtggtcagacgctcttgggggttccccaaatctgggtggaggtcaccgcctgtctcggggaccgccccttccccctagggggcggacaggcacatcccttgctgttagtgagtgaccatggcctgggacgaggtgggcggggcccaggtggagggggcggggcccaggctcagggggcggggccttggaaggtccccgaggagagcgctgggctttttcagcaggcccgtaactgtcggttctttccccttcggtcttaggatgaggtgggcgcaccgggcatagtggttggagtttctgtagatggaaaagaagtctggtcagaaggtgggttcagaaaattgttgttttgttctgtgccagttggtaaataaaatattgttttactggttagagtggatcccatgaaatgctat

SEQ ID NO: 61918 - DNA, 2807 bp, Homo sapiens
tcttgtagcaacctaaaaaaaaaaaaaggcaatgttaaaaatgaaaagcagaggaaaacagcacctgttcgacatttctggtaatatgtaaaaaaatcagtaacttcagtgctatgaaacagcaagccacatgtgtaacataaacttttctagcagcgacacaaaattttttaaaaacaggtaaaatcaataatatatttcattaaacttaatatttccaaaatatcatttcaacatgtaatcaatgtattttttttctgtgctacatcgtcaaaatccagtgagtattttacaattaaagaacatctctattttgagtatccacattttgattatccacaagtgctcagtagccacattcagctaatggccattgtattgggcagcacagctttagactgaagaatcaacagacttttctttgtatcatgaaacagaaaactcatcgtctgaagagcttaaagacttgctaagtcaaatggcatatctcctttgaatgcctgttttcacttaccccgaaatgtttctacaatggtttcagtacatttattatgaaaatgtccctgacatttccaattctgtaatcccacttctactcaacagagggttctaatgtatcttaactatacacaccacactagcaatccctacagaaattttctttagtaaaggaattaagatttcaaattttacctggacattttacatccataaagtaagaatttggactttgtactaggcgtttctttttatgttttttcttttcctcttccaaggacggatgtagtaaatctctagccaactgaacaaagaagcatattattactattagttttaaaccacaacgctggcacatttaaccatacgtgaaatatacatgcaaaaacaggaataacggtcatcctcggcagaagcaacacgtcagatagtaaagttatttttcgaaacctgttaataactttcatcagtacttttcataatacttgtgttctccaagtccctagaaaagggctttcgcacgatcaggaaacatatggtaaggcaaactttgtccttctttactcaactgcgtaatgaactgtcttcgatgaaaactgcgcgaagtcgaggtgctaagcaaagaaagtgaccccgactgtggactcgcttagagtagaaactgctgaagtagaccagacaacgtcagcgcctgggtgatttttgctcctgtggctcaacagctgatctgacaggaattcttgctgagcgaccgtccttgacggaattaatatataaggcaacaacgaggacagtttttaaaaaaggaaaacaagtaggaaatcgcttccgaaagaaggcagagggggcgagaaacaccaatcactgggaaagccaaaagacccaaagatcacaacctcaggggcatcctcaaagaccaagaccgctcataagctacacagagaactgttcccctcccagccaccgcctctgaattgcagcccacgcccctgcagggccagccgcgccgcggtgaccgggcaagtcactacatgcccgccacgcgcgaagacgctgcgcaacctgagccgcctcgccactctcggacactacaggcccgagaggcagccggactcatccgtcccatatgactctcggtaaagaagcccaaaacaaacccggagcccgatgtaaacaactcacaggcatgttgatcctcttgcaagctcagccctaccagacctcccagcccacacagctagcaagctgcaagcgatctgcgctcggcatcaacttccgggatagaagctgctgggaggagcggcggggcgggcttgtctgctctaggccctcctctcggtggtagggggacgccgcagcagggtactcgggtccagggcgcagggaagacccggggatggtgagcgttccagggtgccaagtcccgtgggtctaacgggcttgttggcgagcgccgcgggctctgcagtgcctgaggccagaatctggctggggagcggcctcgggcttaggccatggcgagggagcgcccgcggccaccggggccggcgccaccccggaacccggcgggccgctcagcccccggccccctggcccggccgctctcggttagctctgggggtgggcacacggggcaatgccactattctcttcttttgtgtattaaaaaatacagtattattaaccattaatacgtgccagagagattatgaaagaggctcgtatccttttggcttcccttttcaaggcgcagatttcgaagttttctgcggggtatggctgtgccttaggtttgctttgttctgaaaaaaagtttttaaaacagcacggattcgctgctgtgcctcattcactaagaggccccaccccttccgaggattactcgtcctttgcagagtggacaactagggggcctgagaaaggcgaatgtcaccgatgaccgaacatgagtctttatcattattattatttgagacaaggtctcgcttttttgcccaggctggaatgcaatggtgccatcacagctcactgcagcctcgacctcctgggctcaagcgattctcccgcctcagcctcccgagtagctgggaccacaggaacacgccattattctttttttttttttttttttccttggagacagggtcctgctatattgcccaggcttgtctccaattcctaggctcaagaagtccttccacctcagcctcccaagtagttgggactaccggcgcgtgacagcatgctctatttttgaggaggaaactctatgcttgaaaaatgggtgtcatgggcgaccaaaaggcaag

SEQ ID NO: 61919 - DNA, 1540 bp, Homo sapiens
agcgatcagcgtagcagattctctaaatactcattgtatttggctctggtctgtgtggcgtgaagaagggggcacgagtgaggttcgagttagcatggtaaccattctttctcagctctgtgactgaggggctgcgggagggggttatagtggtgctgggcatggcctcggggagaagctggataatgccctctgcagataacccgtaggctgcgccacagcagcgccaaggaaagaaagcatctctgctccaggtctcggcggaagagatgcgggaactacggggctctgattctgaggtcctggatttggaaggcgtctgcacacaaagaaataacaaagttaagttcccgcggctcgaccagcagagtacgaaacggggcctcccttcccagctcgggtggaaacgcctccaccctgtcaccccgcccatagcaggtcttttatccgctggagccgcctggacagtcctcgcggggcacgcccgaggctccccggaggaactacaagtcccatgaagtcccggggcgcgggcggtgatgacgaagccctcgccgattggccgcacggggcggggcgcgcaggccttctccgagaggaggggcggggcgtggggcggggcgagcagcggcggattggcgggcacgccccctcgcccgcggccccctccccgcctctctccaccgcctcctctggctccccggtcagagggccggagcgagaagatggcgaagacgtacgattatctcttcaagctcctgctgatcggcgactcgggggtaggcaagacctgcctcctgttccgcttctcagaggacgccttcaacaccaccttcatctccaccatcggtgagggaggggccgcggcccgggaccgggtagagaattggggggcgggtactaggggacggggaaagggcggggggcgcttgggagcccgggagaggagaccccggggactgcaaggtggcgggggcactgagaggggcgagggcgtgagggagaggggcgagggcgtgagggagagaggcgagcgggaacgtgaggctaagggcgaagggggaacttgggggcaaaggaacgggaaggggaacagaggaacaaggactaggggtattgggggaacgagagggttcggagactgacagggaggggtctttgagggacaaaatgtgttggggggaagactcaggaaatctcatgtagagagaaggggatagtggacgtgccaatgattaaaagacaggagaggaaggaaatgtgaagggggaaatgagggatgggggcaatgagagggatgtgaagtaaagggacagaggacacaagggacagagaggtgagaaccaggcaactggaagggaattcaggggaatgagcggtcaggaggtgaggaagaaggggacggctggccacaggaggtctggactgagatgtcgtaggaggggacagaagaaaattgtaggtggaagaagagttcaagggatcagagggcagaatgaggatacttgatggagaaagtaaagggatctgggtgtgagac

SEQ ID NO: 61920 - DNA, 604 bp, Homo sapiens
gcagagctgttaagcaacgtgtagtattgcacggccttctgctggcaaagctaggactggcgtggcttcccatatcacattataattttgcatattttggtgaagaacttggcggtaattattttaataaatcatagatgttatcctgatgtataaagtggaaggacaactctgaagatatatggtcaagttttaatgtgaagtattggataatctattaaaagttgaattgtaaattcgtttcttatgcaatatttgtttatctggaatggatattgcagcatactctaatctccttatgcacacatacatacgaatacacaaaatccattacaaaaaaaagagtttgtgttgggagatgtcagtgactaacccttctgtaatttgtttattgcttatgaatttggatgtgatagttttttatggttttcaacaaggaatcgtttactttttctcttctaaatatctctgagtaaaatcttgatacagcatggaaaacaattctttattgagagtcaactgttccccttttggaatgactccaaccactttcttgtttcactgtctgttagcacctcacccataccaagatttagagagaggg

SEQ ID NO: 61921 - DNA, 1968 bp, Homo sapiens
ttgatagacatctcataactgtcatggctgaaggggagttgcccctagttgatcattcaacaacatgaagagccctgtgtttttttcttttttttagagacaggatttcactctgtcatttaggctggagtgcagtggcgcaatcatggctcactgcagcctcaacttcccaggctcaggtgattctcccacctcagcttcccaagtagctgggactacaggtgtgtcccaccatgcccagctcattttatttaattttttaagagagggagtctctctatgttgcctgggctggtcttgaactcctgggctcaagcagtcctcctgcctcagcatcccaaagcgctgggattacagtcatgagccacagtgcctggcctaaaagccccatcttcctacacagtgcgttgtagtctttcctcctgaattgatgtagaggcatccttgatgtataacaagcagagcatgctgaactagttcgcagcaaaaaacaaacaacgaaaacttgatatccaggttgttcttggataggtcaccatgtttatcatttttaaacatccggggttgtgagataaagttgttaagggagggattgcaccagcacatttttctgtttcagttcatgttcatctgactcatatttattctagtctaacctcattttgcgtgaaaatttttgtactagaaaatgtcactttcaattaggggaggggaaattctgattggggatcagaagagtcaagatgtattagtgataatttggcatcacttttgattcaaggtaaaaacacagaatccctaaaaatgtagtaaagtaaaaagtgattcatataactagataggggaaaggaaatgtcactgctgagctttactgtgggaagagggggaggtgaaggaaattattacaaaatttttgtacgtgatgaggagacagcctctggacttccccaaatatttccgtattccctaaaacagctctagtgaattgcttcatgattggtgtatgaatagaaagacactagaactcttaaacttgatcttgaaaggcccgtctttgtatataatcatccacagatgtccgtatgtgattatatattcccatagtgaggcaatgataaatgtaaatgagaaccatgatataattttgccttgcttgcatgcacattttcagaatagaattaaaagcacatgccactgtcagtagttaactatgaggtttgtcttagttttttataaggctttggcagaggcctaaagcatgttttagtgtctaagtcttccctccctccctctcttcctcccttctttcctcccttccttccctctttggaatcaaaaaggaactctctaggttctgactattctcttttcagaactagggacaatttcagcttgtacacagattaattttcattttttggcttctctgctggtacctgaaattgtaactaagttattactagataattcctttctgacttcttccttcaaataaaatctgataaggacaaatgtcttctaggtactatttcaggtggatatgtttggagggggacgtggggcaaagcagaggataggctaggggtgctgttataatgtaacttaggtcagttgattggtgcttagtaaatcatggttttctgtatagtgccaaatgctcagaaaatctgtactggataaagaatttcttgttcaagtctatttagttactgtacttatgcctaaaactggaatgtgctcctcttttaaattcagtaggctgtgcatttatgactatagatgataccactttcatttttaaaataatgataaaagcttaagttgtaaatttaagttgtaatatggacacttaaaaaaaaacccaaaacaaaacaatcttccttctggttatggggaattcctacatgagttctttccaactgcttttgtttatatgagtgttgaaacttaaaatgagtaaattctgtc

SEQ ID NO: 61922 - DNA, 2452 bp, Homo sapiens
tagtatttattccagcagcaatttagacatttaaggaaaatgtttttcaccatgtgccatgtttttgggtcagtgagaaagccttaaccaagacgattgttgggtggtactgtgtataataactccagatccttgaccaagtttggagagtcacttatggccatttgaaaccaaatgaaggatcaaaggactaattattttgaatacctctgagtgttttccccaagcttgagaagagtttcattcagctataaaatgctcattgtgcaaatgagtggtttccatgctgtataattaaagcattgcctttaataatattttattacctttagcttgtctttttaatttgaggaaaatctaaacaatttaaagtaaaacgtgataaagacagtttttcgggagagagaagggtagatcgctatgtttattccacttagtatctatatcaaatatttgtatcaaaagcagactctcactttaaaattattcttctagtggcaagattcttttccctagattgagagtacagagctcacatagtaataactgctgttaaaatagacacttagaactatagagctaaagcttaggttccaaactaagcgaagctgccattttctgaaataatgtctttcttatttaaaaggaccagttcctttttgccttttttccccttcctcacttccttcctattgctccatgtatgttgtacatgtggttatctgttcttttttttttatgcttctacccttatgttggcaaaagaaatgcaccaatgggaggtgaaggtttaaaatataacagttgagttcattatcccagttttatcactttctacaagtataagcaagttacttatctggacctctgtttcctcttacgttaaatggggattaaagcccccttgcagacttgttatgagaatagtgataaggaatattcagtacctatcacagtgcctggccttaagtgggtccttaagaagtgctagctatttttattaatgatagcctatcccattatagctgtcagcatcattatctgctgagcagggatctcaggagagtatcttgaagaatatcgttggactccactatacggggttatctaatctgaagctcattttgtttggctgcattttgttctaagagtttgtgctttagacattctggattgttttaagctggagtcatttattttgcaggcaattatttcctcatttaaagggcatagtcccacttcattcatttgaaatgatgtcagttaccacactactgaactcttctggccttttgtgatgggcgtttctctcttttgtttcttggccttaggctgataaatcaaagtatctcaggtgatacaggaattcccggcaatgtcatattcaaaatattgggcatgttgctcaagcagtatttccattattggaattctccttttttcctttaaatcttagcctccctgcttgttaatatgttactttactcacaaaataggaagaaaaaaaaacactttagcctcttaagtttaacaaatattttaggggcagctatatacaagaccctgaagttgtcatttttctctctctcactaaaaagtgaagctaaaatgatcttttcttccagcagtggatttttttttttttttttttttttttttttagaaggaaagagatcaccaggtgccgggagactgaggtgggtagatcacgaggtcagaaggtcgaggccatcctggccaacacggtgaaaccccgtctccactaaaatacaaaaatttagccggggtggtggcacgcgcctgtagtcccagttactcaggaggctgaggcaggggaattgcttgaacttgggaggcagagattgtagtgagctgagatcacgccactgcactccagcctggcaaaggagcgagactcccatcaaaaaaaaaaaaaaagaaagaaagagagaaagagatcgagagagagaatgtgacctttacttgacttccaggatgttctttaagccaatgttttcaatatgggttgcaacccattactgggtcatgaagtcaatttactgtgtccagaccaacttttttttttttttttaaatggagggaaagagaacagacaagaacatgacaacagataagagaacacagagtccactgcacatgtaagagtaacaaggagtaagggtcaagtgctatttcataaaacttttgtttcagttatgtaagtatgtatatatgtggaatgtgttgttatataaaaattatttcttaccagtgggttaaaaaaggcagaaagccactgctgtggggcagtttgccactgaagacttgtctcattttttagaaaaaccaattctatggaggctgtatttgatcagacagatccctttttttccatgaaagaaaactgggtcttttactattgagcctatattgatggaaggcttccactgct

SEQ ID NO: 61923 - DNA, 1247 bp, Homo sapiens
atgaaagaggcatttctgaggttttatgctgaggaattgtgaaaaataatgttggatatgttggatggggccatatattttaagatgggtaattgtagagttacataaactaaaaaggtatccagtatcctgtggtgcatacagtctactttgggagaagggagggattataaataactaatgaagctatactgtatgtattatgatggaagctagtactgtgctagaagtattataagcaaaaagcttgaatggccatgtcagtggttacctttgagctatattagtactgctctggcttagggcttggcaacatcgctgactcagtgacaaacttcctttttggaagtcctggctcctcacttgccagcatatgacactcccagttcaccaggtcatcctgtcccgaactgcccagttaattgtgaagctataagacagtcctggccagggctcatctccaccgctagctggggatcccaccacatagctagacaggttcctgaatggacttctccttcaggaccagagcatggttgggggtctgtacatgtgcttgccttccaccctgggctcacgaattaatagtggaaatgtcttcaaagcaattattaaaagtaattattgctatgatttcacttttgattctccatttatttcacttctgtctgcttatttatttacctacttgatgtttgtggaggcatgtatcagtcagcttttgcagttatacaaccccaaaatctcagttgcttgtaacagtcacatatttgattattgcagctgaggattaactgtagcccttggtcagttttctctaatattcattcttccctgtttctccacccaggcttctgggtcagctagcttcagactgggttcagctgattagagaaactggcaggaaataatgcaagaggagaaagggagaaaccaagatatttctctttttcccttcttgccttgggtggcttctctagcagagactgtttctctctggctttagttctcactggacaggaccaccatggttcttgtccagtgactctatgtcttcagttcctataacaccatctcctccttttgtctgtccagctaaggggtggtagtggctccctgctgttgtcatctcttccttttgtctctccggcttaggggtggtagtggctccctgctgttgttaaaccttttaccatccccaatatggtttgcagcaatttaatgccttatatagccagttccctcta

SEQ ID NO: 61924 - DNA, 1257 bp, Homo sapiens
attttctacatggttgcagacagtgcattttatattttgccacgtttataacatgataacataaatattttcgagatctctatataaccttggtaacaatcaaggatcacttttaatagcttcaaaatattccttcatggtaaataagacacaaagccttcagtggctaccccagcattgggaaataaggggtgggggagaggaggaaagctattttccaggaagtatttctatgcatgcctaagagaagacatatcttttggttgctcactcccaggtattctgctatagaaataaaggtcattgcccttcggggctcaagttcaggctagagatttccaaatgagtcttcggtatcttatgtgtcagtcatttggggtgactgcctgatgatgacctgtttaaaaagcatcttgtaactttgaaaaatattcctgaggaagataggtgctcacagacattcagtgatccttaatgtatttctccagtatttgaaaagaaggcatggtggctcacgcctgtaatcccagcactttgggagaccaaggcgggcagattgcctgaggtcaggagttcaagccattctggccaacatggtgaaaccatgtctcaactaaaaatccaaaaattagccaggcttggtggcacgtgcctgtaattccagctactcaggaggctgaggcacaagaatctcttgaaccctgggggcagaggttgcagtgagccgagattgcaccacggcactccagcctaggtgacagagcaagacgctgtttcaaaaaaaaaaaaaaaaaaaaaaaaaaaaaagaagccaaaccaaggaagtaatagaggacagaatcttttggcaccctataaagttagtagagtgtctttattttaaggtgaatggctacatatatagatgagtgtaattggccatgaaggttatagagtgttgtcaccttcaaacttttgtatcatagaggattgtgcttacaaatcaggaggatgtagtcactggtagtttttcattattgattgggaaaaatatgccatttgtgccaaaatgttgattttttttttactcatcctcttacctgcattactctgttggttgtaactttactcatcagcaatagcttattataattatccttccatcacactggctacagtgagctgtaagtgctgcttaattttcatacacttttgtggcattgatgttggttttgatcaagaaaaggctcttgttaactagattcagaacgctggaag

SEQ ID NO: 61925 - DNA, 611 bp, Homo sapiens
attatatgtgttccttactgtatcacactatcacagctactataacaaaaataccatagactgggtgtcttaaacaataaacatttatttctcacagttctggaggctgggaaacccaagatcagggtgccagcagatacagtgtctagtgaaggtttgcttcctggtttgtagacagctgtctcacttgtatcctcacatggcccagagagagatcatctctatggtgtgaagagcactaatccctttcacaacggctccaccctcatgacctaattacctcccaaagttcccctatctaaataccatcacattgaggattaggcttcaacatataaatgttggaggaacacaaactattagtccttaggatgtttcccaactctgatgttgcaatatgcaaggcaaagatcttatgattacccaactctggttcataaactcctgaagaatctgtccaactacagtgaataaatatggttcctccagattgctaggttgaatatttttgacttgaactcagaagctcttcttagattttttttaacctcctagaagctggtttaatttctttcagttcagtgccttgcatggagccatatagatttgga

SEQ ID NO: 61926 - DNA, 1783 bp, Homo sapiens
taaccgacgaagtattattcaacataaagaaaaatctaacttggatgtgaatgatcagagaacttaagttttaatttttaaacctttcagaaattgttaatatagatgtttataacttccaccttttaaattatttcacttattgaacagatattagtgaacttctaggtgctgaggaaacaacaaagagcaaagcaaagtccctgtcccccaggagttcgcgttttaacggggaagaaaaataagcaagtgaaatggacgactgtgagaagacggagcagggagatgttactattgcttgtagggtggtcacagaatgcctgcaaaaacaacccttttgaagaattgggaaaaaaataaaaaccatttggctgaaacagccctgagaagggcagcttcttccaccactctttcatcattttaccatctgtgggttatccccggggtcactgctatcccagcctaggttttatacaggatggagtacgaagttcccgcaactatccaaacggtaaaatgtgcttaaaaaaaaaaaaaaacctatttaaaaaggaatcctgcttgttcctgcgctacatttttgtttagtctctttggttgacttggaatctctgcctgttctcggtgcatgcggctcgaaggtgggctagggagcttcccttctcttaaccacctcgcggccggcactggaacccgatcggagtgtatctgtggggctgcggcgatggctggggccctaacgtcgccgaggacgcccgcctcgggagcaggagctgcggcgtggccctggcgcttccggacacccggtagggcggagggcccaacggtggggtccgcgctcaccgccttgagcccgcccctgcgcccggcgccctcagcccacgccccgcccagtcccccaggccctagcgtttacccccacgccccgcctcgccccgcgacccacgtaccccgcctccgagccccgcccccgcccccacgtgccccgcccccgagccccgcccccgtccccgtgcctgcccatgagccgcgccccgccccccgcgtcccgcttagccccccaccccgagccccacccaccgaaccccgcccgcgccgggagcatctcgcgtccccaacgggcccccgggtcggtttccgcggtggccatgactgcggccgtgttcttcggctgcgccttcattgccttcgggcctgcgctcgccctttatgtcttcaccatcgccaccgagccgttgcgtatcatcttcctcatcgccgggtgaggcggtcgcgtcgggaaacccggacgccggggctcccctcccccgctggggttacccgcgaccctcggcgcccccaccgcgcggctcgaccttgttgcgtttcagacgggaggagggttgagagggggagagcggagatccggctccccaaaggcgcctcgccctcttaggaagaagcgcacactgggggtcagggccttttgcctggggctcatgggtggggtttagtgatccgtgaagctactaaagttgtataaaaaaattatggataagttcatatatgcatccttcattttctggagggggagtccctaatttccctcagattctcaaaggcatgtgtaatccccaaagggttaaaaaccattggcgtttaggatagtagtgcgcgacttccgcctattagaatcacctgtggccaggtgctttaaaacatgccgatgcccacccccaccccgatccattgaatcagaatgtctaggggatgggattcgggcttcagaaaaaaaaaaaaaaat

SEQ ID NO: 61927 - DNA, 602 bp, Homo sapiens
caaagcaggcactccagggccaaactggagtaagacaattattcagctgggggccaaaccgaatgctttaggggcagcggggagcagaatgaagcaaccgtgaggcctcatgtagaaccccagggtcaggaagagacacagcacagggtaagactccctaagtgaggctgccagccttttctgtgctcacaatactgcctgggcccacagccagcagggcggaagctgccagccaggcatgaatgcaaaaaactcaggaagtaaagagatgcatcattgagaagctttctctttgcacacatgactaaagggaactggattagaagggttttcttttcccacagtggaggttcaaaaaggtttcatcaagagggcattttactgatagctaaacgagagcctcgtgaagatagggacccctcatcttcgtctctgtgaacccatattataagtagggtcacgtgcccccatgggcatttaggaaacattttcccaaagagtgaaaaagaacagagggcttgggaaaatgtgacttggggaatgtttcctttttctcttgctctaaatacgctttattggaagttaggaccaaataaggtatt

SEQ ID NO: 61928 - DNA, 1187 bp, Homo sapiens
atccatgttcttctgccatcccatcgcgtttaagactttgcagatcttgagcaaacaggggttttcatctatttctcaaccagctcacatccaagaagcagcaagccaatatctgatatcatcagggatgaaacaccacgcccattctcagctaacatgatgtgctctcgggtctagctccaatacagtcattctttctggttgctctgttgttttgaacacactagggttttttttgttttgtttttgggttttttgttttgttttggtttggtttggttttttcttggggaaggactaaaaaagctatcagagtaaggatgaatctcccagccagctggaactttgtaactcttttattgaatatgaaatatataccgaaaagtgtgtagaccataagcaaacagctggatgaatgctcaaaaactgactgcagcacccacaccaaggacctgaacgtgcccacaacccttcctgcctccttccggtcatcttcatcccccacagggcacatattctgataccttagcaggctggagtttgtccttagctcacatgacaacctgacctgcagctgtcctcagttcacagcaagtgaagctgccgggctcagcgggattgatgcgggactgatttccggcggggaaggtccatgtcacatcatccccagcctctctctcatgatgccacctcagccatgctaagcccagcagccattcagctgctgtttcagcaccctaggaggggctcaaagaggtggcgctggccccatcttggcagtcagatggtcctcctctctccagggaggagccatccatgcagtcagcctggtgactcagctatgaggatgtaggggtagaactcccttttttgtacttctaaaagtcctaccatgtgtgccagacagtgggaggcccctggagaatgactcagcagtgtacgtgcaaagaagctgagttctgcacatgagccaccatgcccagcacggagcctttggttggacttgccccattcagtgcggcccttattgcttggaagccgtttccctccagcacttatgctgggccctctgtctacctgtgcagccctgagcacaggtgccagctgccagccaggacctaaggaggagctagccaagacctcaggaggagtttgcctccttagctgtcttccatctgtcctctcct

SEQ ID NO: 61929 - DNA, 940 bp, Homo sapiens
tgcatctcctccctggttagcaagttcccaagccacatcttcagagctggcggtgcccgggagtacacgcaaacattttaacaccaaatctgcgccaagcgccactagaaagcaacgtgcttcccgacccaacctcagcaaaggaaaacggagcatcctttcttgagaatctactatttggtactacaccttccctgctccccgcagcaatgattttactttatcattgaagagccttcagcccaggggcggctgagcgctcaggagtgttaggaaagaagcaggcggaaactttaccgttcactggggccgggctggaaggctgttcctttaagatcaccagcaggagcacggccgccgcgtgcaggctgcgccggggcatcttcgcgggctcctgcggggcgggcgcgggctgtgccgggggctcccggtggccgctcgctctccagctgcacaccgggaccgcgtgcgcgcagcctgggtgccgtggcgagtacgtccgcccttcgctctcctggcttccccgggcagcttttatggagcaactcaacgccaaacacttgatgtcatcgtgcggggagggggtgggggaggagaacgccctgcccaccggagggctggcgccccagatcctaggtgagttgtagccttgacttcagcagcactctgcgggtccccggcgctcctctgggccagggctgacccaggaacacagttctccgaggagctgctggcaggcgtgggtgagatccgcctgtctcacatccagaagggtgcgtctagggattccttcagtggcatgcccttggtctgtcactggtcctgtaacagcccaacgagttcaccttgcccgctgcttagacagagcccatttatcaagacaggggagttgcaatggagaaagtaattcacgcagagcttgccgtgccggagaccggag

SEQ ID NO: 61930 - DNA, 609 bp, Homo sapiens
ggaagaccatgcttttgtgaactgttgctttcctccttcccacctcaggttgtttaacaggctggagccacctataaggttaccatccagaactgctgaaccatggtgctaggtctgactgcacctgaatccaatcagagcaatgaaatgaatccaggtgtgccccactgtgtgtgcagggagagggtggaaaactaaaatgatgacaaggcagttaaatgggtagttttgagcaatcacttgggaacttagctcagcaaaccatggctgcccttttcaccctgggagactccactgattccatcagtgggtctgaaccttggcacattggaatcacctgccaaagtactttaaaatactgatatccagtagacctgcctcccagagattctgactgaattaggcaggtggggtcagggcttggggatttttcaaatcttactagttgattctaacatgcagagggttgaaaaatcactgcgccaagcctttgggggagctcttcttgtagaaataccttcaatgtctgtggcactttcctttgaagcttttcaatggtaagaaatcttcctttaaagatcagtgggatttttgaagagcagctaaaag

SEQ ID NO: 61931 - DNA, 1563 bp, Homo sapiens
gagtcactgggtgaggtttaagttaatcttttaattgaaaatgcaaataaaaatagtaatttgtgttgacctcggcaatattcttctataaacatagatttattcagactttacaattacttagtaccctttataatttaatagaaatgaaaaagtatatatagcagactactatattaaaatagctgcacaaagaatgtatctcctcttaattgttctataaaatcccatggaaatttttgttctggaatgttgcacaccctataattttaaaaacaagcgttagaaatgtaaaatgtttaaacatacaggccattgtaataccctttatcataaagagataatatgcaaaaaagttgaaacaacacacattttgttatgttactctcctacctaaagactctgagtgcccctttaagtcaacacaaggccatgccccttacttgggcagtcataaccctcacaagtgtctgcaacccactttccagaagcctctccctcctctgcccccaggcactctaccagccagccaggccaggattcctgactcttccctgtccttcctgccaggatctttgcaaatactcttccctggctggaaggcccctcccctctctgagcaagtgcctggcttctccaagtcactgtccaacctcagccacgcaccaccccccacccaagcagaggtggccctgcccctgtcctgttggcaaacgtccttggtgtagcactcgcctccttgtattttaaggacatgatagtgggattttcctcatttccagaatttcccaagagccaacagctggaaacctttaacatttttagagcacctccagctgcggggtcagctacccctgtataaactttctgaaaggcacagcgccatttctgcagcgccagtacctcatttctcccccaaaaccccaccactccacctccaatctctgcaagatgcattgggatgaggttgatgattaactttgtagagagtacagctgatataaagtgagaccattctttgctatctcctccgatgggtggggggagggcagggtgactggattgatccctgctgtgccaaacccctatcgactccactggggaatggcaccaggctcaaaaggccgaagaagagacccagaggcagtgaaagacacgtgggtttttttgtttgtgtgtctgtttttgagacagagtctcgctctgtcacccaggctggagtgcagtggcgcaatctcggctcactacaagctccacctcccgggttcacgccattctcctgcctcagcctcccgagtagctgggactacaggcgcccgccaccacgcccggctaattttttgtatttttagtagagacggggtttcattgtgttagccaagatggtctcgatctcctgacctcgtgatccgcccgcctcagcctcccaaagtattgtgattacaggcgtgaggcaccgtgcccggccccacatggggttttattaagggcttacatacaggggaaagagtccagtggtggcaggctggacaggagaaccgcaactgtttgcaaaaggcatgt

SEQ ID NO: 61932 - DNA, 4420 bp, Homo sapiens
cctttatcaggaactgagagccatagccatctcattgtaaattcagaccaccacctacatgacctgtgctggccagcttggtctcatacagccccctcagtgtctgattccccaagatttttatatgttacccacatgggtgctacggtcagtcccatcatgtttccagctcaggaggctaaaggcccaatcacgaatttggttctttgtattgcacaacagcagggcattttaaagtcaaattgagccaatccactcatttgacactcaacaaatatttgcccattgctacagtgtgcttaagagatttacccaaaaggaacagagaaaggggtagggtgagaaaacactgaggtcagattataatgagagtggtttttctcactgaggtttcacttggtatgtccaaattagatagagatgtgtttctcattgagtttgaaaaggaaatattatctttaagtctttaggttcccaacttcatgaagatggagccaggtgataagtggcatcaaatgccattctgagcaacatgttaaacactcagaaagcaagatgggtcccatgtggcctggtgattttccctaaatgcatgcagctcttactcgcccggaggcttgtccacagctgtggtggttatgacggtggtgatggagatcacccactttgtgccaggcactctgaaaagtgcttcccttacattctctctaaacctaaccacctaaccacaccctgcaaggtagacatcttacacgtgaggaaatcagagtgcagggaggtgggtggatttgtccaagatcgtactgccatgtaggggcagagccaggatctgaattcagatcttgtcgctaaaggttatgaccattccatcgtcatgccatctcccactgcttcaaaatgggaaggaagtttcccatttttgaacaaaagcatctggccaatggatctcaaactttagtgtgcatcagagtctgtgttaatagaatgcagattgcggggtctgagccccagagtttctgattcattaggtctaaggcagggcctgctaatctgcatttctagcaaccccagatttgctggtgttgcagctagccctgggaccttgctctgagaaccactgctcttggggttaacagaagatgatgctactgcctcctcctcctcctctttctgttcattttgacatctccaaaaccgatccatttcacctgcctgaagaagagggccggggcgaatgctgccctcacttctgcccatctgtttcctgggagtctgtgtgggaggctataggctcctcactgacccagcgcagaggattcctggctaagccattggctcccagttgtttacagacacatctactctcaggtcactgctctctctctctctcaaccccagggggcattcccaggcctctctgggctttctgttctctcacagcttctctgcagactgaacctgctttcatctgcttagtcaagtgtggtttatgaactctgattgcctacaacaccctctcttcattagtcagactttggactgggaatgagagatcttttccagggtaatatgggacacacaggctgcttctgtcacctgggatccttgctgctctgggaaagataaactttctagcatcttgttgaccttcccaagttatagtttgacaagggaacatatgtttcaaaggcttgtggacttttagacttggaagagatcttggtggaaaaaaaggaagggaagagaacaaacacttattgagaatctgccaagtgtcaggcacaaggccagagacttaatatgtgccacagtatttactcttcacagtaaccctatgagatagggtttgggttttttcattttaatccccatatatagatgagaaactgagattctaagtttagcaactggtaagggtcacacagctagctagtggcagaaccaggatttgaacccaggtctacccatattctctcttctactgctcgcccagcagtccatagcattgatggtctccataatgtgatatccattgattgtcctggcttgctaagacaccgtgtgtcagtcatacagtggtcagtgctggggaagcaaggactagtccagttagagaagccggtagtgggtggtaggaggaactgagaaaacgggtcatggttgagtgctgcatgagcaggtgggaggtgccaggagtctgtagagttagtaacaagagctgctgggagcaggtcaaagcaagcaagatgacagtcatctccaaggaaagatgagcagccagccaggggcctcgactccggcaaagctagccagggctgctctaaagagccaggtgccagccctcccgcccaggtgtgggtctgcttgaagacagtccccctgccctccacgtccatcagtgtgtgctttgtgcccagcattgtgcccagcattgtgctaggtgttgacgctcctttttttttttttttttttttttgagacagagttttgcttttgtcacccaggctagagtgcagtggcacgatctgggctcactgcaacctccgcttcccgggttcaagtgattctgctgcctcagcctcctgagtagcacacaccaccactcccagctaatttttgtatttttagtagagacggggtttcaccgtgttggccaggatggtctggatctcttgacctcgtgatccgcccgccttggcctcccaaaatgctgggattacaggcgtgagccactgtgcccagcctcctttttaaaaataaaattaaataaataaaatattcttgttttcaaagagctcacagctcaggtataggtacaagcaactgactacacagccagataagtattatttttaacacggtgtttcgtagcttagactgtcaattcacatacccacatgatgtccagcgaccctcatgggaagcattcccgcaggggagagaggaagggccctgtgcgaagcattctgctcttccacgcctgacatcgcatggagccttggcacaaccccttgaggagcacaaaggagggagtcctaacatctccttgtgggggatgggcaaagcttcccagaagtatgggtagaagctcttcatgcagaaaccaggaaggcaaggtcactgccatttcttccgctgtgtcatttcagcgtgataggcacttttagctttagctagaaggagggcagggggcttgagactggcctcttggcctttccttttccactgccatctgaaaagccctaacttttttacatctatcttcctgcaacagctccctccagaaaatccagatgtctaaagtgctagcaagcaaagggctagtgggtgtgcttttagccgacatagtctggcttgtgaacaaatgttaagaaggtctctttttcctcgctctctgccatccatttttcctcaatgactattttcctagagttcatcatgtgataaccatgacagaccagggatagatgagggaggagccatcaatgagagacgtcatctgtcctcactgagtcagtgaaagaaaatgttaggctggaatcaatgacttattgagcatgaggtcagaggggaggagatttacatttgtctcttaaatagtggtgagtgagaaagcaagttctggattggaattcagcagaatggcttctccctaagcagctggaagaccaggagcagggaggacatgggaagggaccctcaaaaggaagcagagacattagctaggtgctgggggtctggaaaggcaagaaccttcaggcagcctgggtggtcactcggctgagccagcactgaaggagctctggaaggagggatagctagtcctcccgcccacaccaacaccagcaccgatgtggctgccccctctggtgtcctccatggtgggagccaggttgaatgctgctctaggacactttgtagagcacccatggggatactgtctcttcagtggacttctgactgaagcaggtggagaccctccctctcctcaccagcactgggatcaggctgtggccaggagccggatggaaaggcagtttcatgtttgctcacataagggtgactattcggggccaggggcggtggctcacgcctgtaatcccagcactttgggaggctgaggtgagcgaatcatgaggtcaggagttcgagaccagcctggccaacatggtgaaaacctgtctctagtagaaatacaaaaaatcagctgggcatagtggcgcatgcctgtaatcccagctactcgggaggctgaggcaggaaaattgcttgaacccgggaggtggagattgcagtgagccaagaagctgccactgcattccagcccaggcgacagagtgagactctgtctaaaaaaaaagagtgattatccaggctggttgcagtggctcatgcctacaatcccagcactttgggaggc

SEQ ID NO: 61933 - DNA, 856 bp, Homo sapiens
ttctctgtgacaaccctttagcagcccttcatcatcttaccttgccagcctcatctctcagccttccatccccttgtacatgactctccagccagactatcagtttcaatcctctctgagcccctttgagcttttgtagatactgttccgtgtgcctgggacactatgcacccttccccactccttccccatactttaccttcctaatgcctaggtctccgtcaagtctcaggtcatatgctacttcctccaggaagccttgcttgatgcttcccccacccccactcaccagcctgggttagttgccccttgtttgtggctaagaaacatcctgtacttccccttctagcacttatcacactgtgttgcaattgcctgtttgctagtctgtttctcttataccttgcctcatccctttgaggcttaatctgtgcgttgcacactcttctatctcaaagcctagtgcaacagtgatatttgttgaatgaatgatctagctcagatctctctaaaatgacaaaaatctaaccttctgcgccacctcccacatcaatcctcctctttgccaaggtctcaaaaaaacagacatttatggacggtctactgtgtgccaagcaccaggccaggccctttactggtgatgtcattttcacaattaaaaggcttaaagctccgagtctagacagccctttgactgaaactcagaggttctgatgtctaatcaggcaactaatgagcaaggggaaataagtgataccacaacattttccatcttggtagtggcaaagagatgtcaacagaatggaagacccgtgtagccctgagctgctgaatcttcagtgcctggcacgtggta

SEQ ID NO: 61934 - DNA, 5714 bp, Homo sapiens
atcactttaaaaaggagcacttccaacaacattcagtggacaaattttttaagatctgctattgctgaactaggtgctgaaaatcctcagatgaaaaaaaaaaaacaaaacacctattcccaagacagactgaaatgtgaacagaaaataacagcaccatgtgagaagtgtgcttgggtgagtgacggagggcttcccggaagaggctatgtgcttcatggggaaggagtaggagcagaccaagtagaaggggaccagacaggggaggacacggaggtatgaggaagcacaatttctatgaggggactatttgaaatacttctgtaacagttaaaaaaaaaaaagttataataaaagggaggggccaggtacctgtgagagcagtgggttttggattttttccaaaaggtggggaaccactgaagaattccagcagggagatgatgtgaaaggggtaaatgggaagtagtggggagaatgacaccaccagtattcctgagtggggaagtgagagctgggtggttggagcccacacccacccctctccatttatttagtcattcaacaaatagttactgagggcctgccacctaccaggctgtattccaggggctggaaatcaggcaaccaacagcactggcaagatctttgttctcatggagactgacaatagataagcaagtaaacatgcaaggaaatattagataggtgccactaggaaaattaaaccaggcaacagaagagtctctgagcggcagcggcccattccctgcccccaacacttaccaagcctcctcttgatataactttggtttcccaaggaggcgttgctcctagaacaatctctatggtaaatattaataattaagccatctctcggagtgtttccaatgagccttccctgggtgaggatagtcagagctagttttccccagggcctggtctgccttgtaattgttggttaaggaccatcaattctgccaaaagtcctaagtttaaggttttaggaaaatcgcggcaaccttgagacctttcctgaagtggttcccctgcaatatatgaccttgccctcccctcactaccgaccccacttccatgtatatacacaattatcctttaggagagaaacatttgatagtacggttgcaattttgcattcctcccctttgaaaaatgcaaacttttagaacaggcccgccgcttcgggcaggttttgccgcggaaaccaccctccctccccgcccccggatgtccagagggctgggtggggaatcccgggagcagcgcactcaagagcacgggagctggaggctggaggctggctcgtcaccatcagggctccctgggatgtaagtcagagctcctcagtgccagagggatgcgggccaagaataaaaacgcgaatgttgtattaaatgcagctgaagaaacgagggactgaaaaggcagatttcccagtgtgcctcatggtcttcccccatttgactcatttactcactgcgggtttctttttctccactcttttcttattatggaaactttcaaagacacaggaaagttcactattttagggaaatctagcaaacgccccaggagggcctctctgattttgcccaacttctctggactgcctgatagagcttgccctctggggactatcacaatcgggactaaattagggcccctgctcccaagggtttttattctagctggggagagaagtcactaatggaaacttttttttcccttaaaatagcttacaccttacaaagcactttcacattcctgattccgttaaaatcataaagctagaactgaaaggaaatttagagatcatctctaggggtcaaatattggcaaatattgggccacctgctaggctcttgcccatggtagacatggctaacataccgcacactcacccgttcatgtcatgtattcacttacttatcagacatcctccatgttctacattgcatgttagaaataaagcagaaaaccagacagacttgtttgctaccttatggacaaacaagaggaagagagacattaaacaaataattacacgcatgaagagtgtttttaggccgggcgcggtgactcatgcccgtaatcctagcactttgggaggcctaggcgggaggatctcttgagcccaggatttcgagaccagcctgggcaatataggagacactgtttttttttttgttttgttttttgttttaagtgtttttaaaagccggtgttggggcagacaaggacatcacacactgggaggtaccctgcgggtgggaaagggtcgggaaagactccctcaggaagtgatgtttaaactgaagtctaggggattaggaaacggagtctctgagagggtgaagaaatattacataccagtatgaagcatggcctgagtgaggtcatgctccagggccgaacaaggggttatggatgctaagtgggggtgggtgtccggaggaaacagaaggttggtggagcaaggccttaaagacaaataggttgacatggagagatgggtggaagaacttgagccaagggcagatattattgtttctcctcctcccgcttcccagggaagcagctctcatctagtgtcagtaaaaacaaatacaaagttataatttattggccacctagtatgtggtggcaattttcatgaattctcacatgttccttgcgagacaagtattcttcttccagttttacagatctagaaaaggcttggaacggctagagacgcttgctaagcctggccgtcaagtaggcagcagagctaagatttgaaagcatgccggcctgccttcctaggcagacgcactttccacaacgcatcactgccataaaaatcccaggccgaggcttgctctaacagcaaataccacttggaaaaggacagatctttgaggacccagaaatacttctggggaaaggatgagcagaggtgcccccggtgggtggataccattaggcagaggtctatgcggaagaggccgacttgtggcgtgggaggtagggaggagtaagaagtgattgacggggcgtccctggctgctctaggactgcattgcggggaggtgcccggctctaaccactgcccggcccggttaatcatttcctgaccttccttcctcctctcgctctggccgcaggattgccacatcagtcttccccctcctcctgctcgccttctggccccgaggctccttcgccgggttttacaaggagccccaacttggaagcaatatttgtaatagccccggacgtcctcaagtgccccagtgagatcgcaggctcgatccagggtatgccggcccaagcggccccttgaggcttgccctcttctctaatccctcactaaaaagaggtcagagggtcagggatccaatctccatacagatcaacaagttacagactcggtttccccctgcggtaaaaaggggatggtaacagctggtagggtgttgcgaggcttaaatgcggtatgggaagtgcctggctgggagaccttaggtatctaacaaatgctagatcccttcccttcttatcgcctggtaatggggagtttagcttgcccagcaatcccaggctacgtttatctcacttgaacttcctggcttgaaagtcctacgatgtgctggaggtaacgcagatggtgagtcacagtgacaggatttgaacgtgggttcatgggcgcccctgcgggcccacccacgcagcatctaggtggctggctaacgccacgtgttcagaacctagaaagggctacggatcgcacctgccgcaaggagcctaacgctaagtcgggcgggactgccctggcacccatgaaacccgctgcccgcctcccccggggccaggcccttggcctccccagcttgtttcttcgtgtataaaatgagggccacggtgcctgtctgcccgagaggttttaaagttcttctttacactttgcggagcggccggatttttaccacgaagccaccgagtagtccgcaccacataggttcagtatcctccgcccaccgcaggaaacgccgcggacggcccggggtgccctgctcggcgccccacccttcccggggccggggaagcggcgtgactaggaaagtcacttcggaacacagccggactctgcgccaccagctggagctcgccgggaccccaccccgcgggctgggcgggggcggacccgggggcggggcggggaggggccggcctggaaaggcggaagcctccagtctaggggtggctgcagaacccggatctcggagttacacgttctacggagcggggcgccgggagacggcgggcgagaaaacccggcgtccggaagcccgtgctttctttgacgcaagggctcgagacgcagccgccgtcggccgagcgcccggctagaagcgacaccagacggagcctccggagttcctccgcccccacctcgccgggtcctggagccgcagtcctcccagctgccctcctcgtggccatggagtgtccacacctgagctccagcgtctgcattgctccggactcagccaagttccccaacggctccccgtcgtcctggtgctgcagcggtgagtgcggccacgggccggccccgcagcgcacccgaggccgcggctctgccgggcctgccgtctaggggccgcaggcggccggcgcgcggactcggggaggggcgagggcgagccgggcccggcgggctggggagggtacgcgatgaggcgggcgcgtgcgggagcggcggcggctcctttgtttcccgaggcccgacggccgggccagcgaaggagagggccgcgaggggcgggagtccgcggaggcctcgagcgcgtgggggcagcggcaggcggggaccctggccagctgcgtgcgcccttgccccgccctgccgtggccgggggctgtgcccgtccgtgttgcggggtcgcctgtggggcgggtgtccggcccccgaggggcggccgcacgtgtggcggggcccgcgccgcgcttctccgcagacagggcgggaagagcgccgctctccgggcgcagctttgtctgggctgcggggcgcgcggggctcctctcctccgccgaacccggcccgggtttcctttcccttctccgcaggctcgggcacctcgaaaccccgagaggcgctgggagctcgggcggcggaggtcggggtctttcatccgtcagggatggtgaagtttgaaaacaggctgcgggctgagaagctcggaggctgagccaacagctgctttggaggggactgctcgagtttgtttttcagaccttttgggttgtccgaaaatgcgttgggattcccagttcctgtgttgtgaaacacttattagatttatataaggcttttgagtagcttaagcgttttaactcctgctggcccccttggaagccccagtgccctctcattgtctgctctaagcgacttcttaggatcgcaccggccacacggctttgcttacttcctggtagggccctggtgccaccgctagtctttgtttattagctttgagatggtcactggtatcttgggttatattaatagcgtacaattcgaattgtgcacttcagaaatctgaagttcatttgaagaaatatagaaaaacggcaatggtatgatttagctgtgacatgtctcattgtgggccggagctgggaagatagtttagagaatgccttag

SEQ ID NO: 61935 - DNA, 1914 bp, Homo sapiens
aaatgaccatctgcagtgttgttatcacaatgaatttgtgttcttttggcagtctgtatttatagatgggcaggtggacaatttagttgtaaatgtggatggggtagttaaaaatcagtggacaggtgatacttttttcacattaattctaaaaagtagtatttgagttttatatatccttctgaagaatttaaacttttttggtaatatttataaagcttaagtcaaatgtctttctagtctttctgcagtattcctccccaaccccgtcccccagaatcttagagcaatctcagcttatttctagagtctctaaatgattgctcatggatgtgaaatgtgtgaaatttagaatgtgctccatgtatgtgttttgtttaaagaagcttcagtatagagattgagcctaacatttacttgttgtgaagaagttttgacacattgatgagaagttctttccctaataatatgcttaatagtgtatacagaacatccttcatggtctaagcagaagaaatgatggagttgggggaagaattcgaactctttggtgtggtttcctgttatttatcctcaaaataatttattctcattctttgcttgtacaccattagccttaggctcgtgtaacagcctcctttttcctcattgaaatgtatgtaatttccttctccactggaatataaaagattgattttggatccttcaagctagatttagaaatacttatgtttttatagtgtttgcagctcagtgagtagaccagtgagtaatttagtgtgtagctcagtgagtcatttaaattcctgttttaaaatttgagtccctcttccatcaggagctgattaacatgtacatttcccctaacctaacctgctcgttttttttctttttgagcttttctccccttcttgagcttgtttgtttgtttttaatatttttccttctttgaaaacaaaatgttagtctcctttgattaagctgcagtctctgacctacatacatacaggtttgtgttcaaccaaggcattgaaataaatagatttagtcggtagattatcattgtttgaagtggaaaaggtatgctgtttaacatattttgatattttatgtttattcattgcctctttagacaggagagcaattgcattctaggtgtgttaatagagctttcctggacagatggcttggaaggaagtactttgatgggttctcagtaggggctagtactttttggagggtgtgtttgtgattaagcttaccttgattgacagtttagaatgctgagaatagcattaacaacagtaacagcttgttcatcttacctagaattgtcttgtgccaagacccctcaagatgctctgagatttctgtgtagtggtttcttttgagaatgtaggtaagaataggtgtccttgagactgaaaagaaattcacctaaaattgttcattgtggttgtatcttaaaatctttggggtcgttgaatgaactttggcttagaaatttgtagagatcgtctttttaactgctgtgagtctgcagatgtgattatctatagtaattccagatgttttctcatctattagttttactgagtaggaagataactgagaacaacataaagtaacttcaaagcagtttgctagcatttaatcctgactaatttaattaattattcatccttgtagtttttcctattttattgattatgaaactgagacaaaggttacgagttgcccaagatgcttggggagtattaaagatagcccaaagcttaaactctaacactgttcagacttttagcttgctttttcttaaaaaaaaaaaaaaaagagtctttattttgttattcagtaacttaatgcttgacaatttaaaaaatacaaaatgtttggaacacatactttaaataa

SEQ ID NO: 61936 - DNA, 1062 bp, Homo sapiens
tgaagtagctgccagacctcaacattcgtgccatgagaatttaattctgagagcttaaatgcgttagtttcattttatttgctttgaatgttttgtttatatatagttttttttagagcctcatttaaaaaatatatgtatttctagtttttttcttcgaatatataatacagatttttgggaaaatgtgggtcatgtttgaaaattctatcgattgtaaaaaaaaattccgactcttggttttggttaaataattagaacagctatttagaaaaactgaaatagttaatggttttggagtttgcaggtgcctgttttctgaaatattgattatctatccctcgggcagagtatacgtatttgccaagtttgtatttcttttttctatttcttcaaaataagtcccgttgattttaaaagaataaagagtttcccagtaagtacaagtgtggtactttttccccctccactttgtactttagtgttaacctttattacataaccacagagaatgaggaagagaattgtacaatgcagatattaagcctattgttctccaaggaaagtctttgatgttaagaggtccctaaacctcttaattattttatttacttgtgagagggggtgcttccttaaatatatacgagtcttttcttatattgcatacacttgcaactattattttgaaataatagttgagtggtgtttacatttatgacctgattcatgtcttttgaagtgccaccactgtttcaccatggacttgcttactcaggttgttggcaacagcatggaattgcatcagatcttgctgtattaaataaatgaagatattagatgtcagaatttttaagtagttcatggcttttgtttttattttctatatgatcagcttcatagggaaagttatttttgaaacaatttgagctcctaataattttttgaagctatttgtgtctggtcttccaaaggcaaaaatggcccattttgactctgatttagtaatctcctttggctttagtggtttttatccttcctcccactatcctttcccctcgttta

SEQ ID NO: 61937 - DNA, 726 bp, Homo sapiens
ggttataacagttacatcaattttgaaataagcttattaaaattgagtatttggtgttttgaatataatttaatttaattctggtgtaggaggattttgagggaatggaactgacattcactgagtgctttccgttgattaggccctgtgctgtgtgcactttatgtagtttatctcatgaaatctttaccatagccatgtgaggtagaaggtgggatttgacccatttcacagagaggaggcaggctctggaacgaacttagcgtaaggtcatagaataaaatagtagagctacaactttaagacagttggttctgaagcccgtgcttgatacaagtcacatgacctgtatcatatttattttgagtctgcagtggaacaaattcctacaaaggcaactcattctgtttggtacatttttgtataaaagagggaaggaattcttctcgaagggttcaagggcaggtgataaaggaatttggctagttcagctaaaacaatgtggagcagagtttcctggtcactgtgccccttcctttttaggtcagttgtggaacaatttgctaggaattttgtgagaaaattgtgagtagttccagcttacaaaggcctgggatcaggcattgctgggcatgatggggatcaagtcatgctggctgaggaatatgtcagaactcttggggtaaagagaaatagaagcagaatgagtaatgttctcaagtcttg

SEQ ID NO: 61938 - DNA, 3000 bp, Homo sapiens
acacctaatccttataaccaccttgaaggtaacaattcctcccacttgacaaatgaggaagtgacgcccagcaaggttcagacatctgtcctgggtctgacagcaaataagtcaccagccagtcacctgagctgccggagccagtttcttcatgtacaaaactgggggtgcagaggttgacggggtgactaatgagggcacacaaacctgaaggaggcccgggctcggtgtgacacctggctgcacccaacatatttaagttccttacttccctcccctggcacaaaggagccgagctggcacagccaggggcagtcacggagctgcgggggaggctggcagggaaagggaaacgcttccccagcccagactctagctccctctggctgcggggagccaaggccccggcccattagtcggtccttctggactggaagcaggctggtcccgtttgtttccagggaaagcgggttaggactgcctgtggaaggccccgttgcaggctcctcacaaccccagtggtagacattattccccccacgcagaggaaatgaaggctccgtgagtgactgacacggcgataaaccaagtctaacttggctcaagatcttttctttgctgggaggggctggtgaggctgcagcagagggtcccccaagctttctggccaagcgacctgggtgggtgtccgtgactgtacctgctcagggcttgcctctagctgcctccgaaccctacccttttccaggctggtggcccaggggatgcaggaacagctctagtctactaagctgaacccggactcaatgctaacgcgtgcccccaccgccttgagggttgggatgggcctgtcactaggccacctccaaggaaacaaatccctcttcccactcacgtcccgccgggacattcaggggcctcagcttgaagctagactggagcaatcgccaagcaccgctcccctgcaaggcagcacatccagagcgaaacaaagagtcaagggttgtggctcctggaaccggcattccctctgtccacagccgccccaggactctgctgggccggggtcggggcttcccactaggggctcccaaggctacgagccaagaacccacgcagatgaaggtacggtggggtgcaggggcagaaagaggagggaaaatgggccggccagaaagccgacttggaaccctgcagtgtcatcgcagccaagtgtcttcacctcgcagggcccgagtcctcctcggtaaatgagtccactcggtcccatggggcggttgggtagctttaacaagccagtgagccccgggtcaccgcactctcctcacaggtgccccaacctggcgtccgtcacgctctcgggctgcggccacgttaccgacgactgcctggcgcgcctgctgcgctgctgcccacgcctgcgcgcactgcgcctggagaactgcgcgcgcgtcaccaaccgcacgttggctgccgtggcggcggacgggcgcgcgctgcagacattgcacgtggacttctgccgcaacgtgagcgcggccggcctgcgccgcctgcgcgccgcgtgcccgcgcctggccctgcgggcagagcacagcgccgccatgctgcccgaccagcccccgcgcccgcgcgcgcccgccgcggccctcggcaagctgctgcagcgctagacgccgccccgccgctgcccccggggaaggagcgcagccccagaccgtcctggcttcgaacccagctcttccaccttcagaccaccaccgcatattctgagcctcattttccccgtctgcacagtggggataagaaagcctacctcacgttacgattttatacataggataaacgcaagattaaatggatatttggaaaacactcggctggttctcactcaacaccaccgcctttcccctcttgcttccgccccaggctttctgctgtgcgctccccacggaggcgggaggcgcctgcaccgtcctcggggactccgatcgccgttggaccgaaatcacctcggtggggaggacctgaccactcggagttcgccgacttgcgctcgggggtgacgggggccagggctgccgcgcgcaggggtctggggagcctccgggcggagcgacccagcgagaccccgccggctcccggagtgtcctggggaccgccacctccaggagccccggtggtgatctcggtgaagcaggaggaggggaagcaggggcgcacgggcagaaggagccaccgagccgctcctccttgcggttttgcccgcacgcgcgtctgcccgcccacctttcctggggcggatgcgttcccgcagtgaccgcactcgcgattgtagaaaattcgctcccaattgttgaatgcttacataaactgcatagttacccatattttctactgttctcataagggaaaaagaaatgatttggaagaaaaaaaaagcctcaaactaaacaaaaacaaaaccagcagccctggctaagcttttgataatggaaccattataagctgacaagctagatttttcacctgttggatttgctggacatgagcacaagcctaggcttccaatttgaatttcagggctgtagtcactgatgtgtcacatttagtgaaggctctcggccccccggcagccgcctggtcctgggtcactggggagaattctgggtgggtggaagaggcgaggagcactgtgatgggcgctgttcacactccggctccacccagcgccagctgcgacaaagccctttacccctcccaggccaggtgtttcttctgtgtgaaagaggagcttgatccctactcacaggttccttaattcattgctcaaatagggaaacggcaaggaaaaagacaaattctgttctcatgaagcttaccttctagtgggggaagagacaacaggtaactggtatataagagggtagaagggccaggtgcggtggctcaatgcctgtaatcccagcactttaggaggccaagatgggcgattcacga

SEQ ID NO: 61939 - DNA, 509 bp, Homo sapiens
aataactacctttaaaaactatctgagccttggaatataaaggtatgaaaagttttatgcacccagtcaatagcagtctcatgtaaattcttgctccctatcgaaacagcagtgtagtcagtgggtgaaatttataattttagaagttccacacgtggaaaacattatggctctcctaataggcatagaaaggggctctcttcctcaccgctcagacgtcttcgaggctggtggacaacttgttgccccagaggacatattttgaatggccctatctgatgactcatgagtttcatttcatgatgaggctcagtgaagcaggtactgacattcctgcttccagagcttctcagccctgaatatgtaacccaaaagcatcagaatagtactagcacagttgtaggagcccctgtcagctaatacaaattgagatcaccagcagaatataaagtccttttagaaaaactatggagaaactttgcctttctctttcaagttagttcccctat

SEQ ID NO: 61940 - DNA, 2835 bp, Homo sapiens
actccaggagttcaaaaccagcctggtcaacacggtgaaaccccatgtctactaaaaatacaaaaaattagcagggcgtggtggtgcatgcctgtaatcccagctactcgggaggctgaggcaggagaatcacttgaacctgggtggtggaggttgcagtgagccaagatcatgccactgcgctccagcctgagcgacagagcgagactgtctcaaaaataaaataaaaaacaagtagtttcaatcttcatttccaatggtagacaactctaatcatcagaaagcctattttcctaacattcagctaaaatgattccccatttgattgttaccctttcgtcctagttgtgtcctccggaacaaggaaaacatttatttcctctcttacagagaagctctttaagtatttttaaggcagctattatgtgacacacacacacacacacacacacacacacacacacacacaaccccctccttggttttcacttctctaagctgaatatttttgatactttctagtccttctatgacataatttttggactttatcaatccaaggtattgcttaatgtccctcataaattatggcaccccaaattaaacaggataattcaaatgtggcccaatcagcacaaagagaggaataatcattcatatgatttgaatcattcaatttgttattaatatttatgcagccaactaaagtttcttagaaccaatatcacacttggtaaatgtgaggttaagtaaatctcaaatcttttcctttttttttttctgctaggaaaagaactactcaacatgtattgaacatatgcaataaccaaggcacatttttttctcacataaaccaatttagagctagctctcacagcttgcagaaaaacatagaaattaattgatttcaaactttacccatctgtcccgtgatgatgaccttgtttgaataagttcaaggttcttgcaagcaagtaaacgacttcgaactttgtatacacaacggtacacttctgataagtgtttaccaggttgatatctaaatgaagaaccaaaatagaaaagttacctaatttctgacatcatgagagcaaatatttgtctgaggatagttttaagttacttgccggctttctccacatgcttgactaagtaaatttgtgtgtttcagaagagctgcaagaacaaatctagacacagtgtccaagagtgactcattacttaaagttgcactgtcccaatctgaaaataaaaatgatgcattgacatttaaaagggctcagaaaacagttcagaggtaatttttatagctttagtcatccaacacctgaattttatcatctttctaaactgttacttaacaaatgcacctcattagatcccacttactgttccaagcgctgtggatatagcagtgaacaaaactaaatccctgatctaacagagcttatattattgttaggaggagcagggtgggagataaaatttaaaagaaaacattaatatgacaggtaagtgctatgagggaaaataaagcagggtaaggagaacagggagtactgtatatgtgggattactattttatataaggtggtctgggaaagtttctgataaggttacatttgagcagagatctaaatgaagtgggggaaaaagcttgtgaaaatgggtcccctcagaaaaagctagtgcagaggatctgggatgggttcaaggaggccagtgtggctggggcaaaccgtgcatgcacagaatgggtagaagacatcagagagctggctggggaccagatcccaacggccttgcaggccagtacaagtcctccaggttttactcggggaaaaatgagaagcagcattagaaggctttgaacagagatacaacatgatctgagatgtatttttgaaagctcactctgctgagtggagaactgacttatagggacagcaatagcagaagtaattattgcagtaattcaagtgagaaatgatgatgactcagaaaaaggtaagagcagcgaaggtaatgacaagtggctggagagtccacatgcattttgaaggcagaattgacagaatttgttgatagatcagatctgtgatgtgagaatatgagagaagtcaaaggtgattctaaatgtatttaaaatgtagttggcatttactgagaaaggaagaccacatgaacagtttcgagggtagggagctggaatcaggagtctagttttgaatactctccattagacattctagaggagatagtgagtaaactagtcaaatatacatgtatctggtatttgatgccataaaagtatatactgtgaatacaagtacatttaagtgggtaagaaatgaaacaacatttcttaaaacagaaatgaagacatgtagttgaaaaccgaaatcacaacattagatgatgaggactagtcaggtgctttttcttccctttttttttttttttaagagacagggtctcactcctgctgtccaggctggagtgcagtggtggctacatagctcactgcagtctcaaacccctgggctcaagcgatcctcctgcctcagcctcctaagtagctagagttacaggcatgagctaccacactcggcctcttcccattctttaattctatgttggcacaccagtattgtactttaacaatgtagtatattcagtagatttcaaatgggggtgggagagttattgtccaccctgctcccagagggactgctagtctccgttcatttgacagatttgctaaatatctgggctacttataaacaaaacaaaaccaacaaaaaacacgcttgaaaaatttttagcctcaaatta

SEQ ID NO: 61941 - DNA, 909 bp, Homo sapiens
tactcaagaaatatttatttactcaagaaatatttattgacataccaggcacagttctaggtgaaagggatacagccttgaagaaagtggttaaaacttcctgtccccctggtgcttacctgctagtgagggaatgctttcatattttttaaacaaaatttgcttttttaaaaatcaagatcaccttaaatcatgtgtttttataatccatattggttttaaatcaattttatttcactatttcattgtatatcagggcagagaaggtcattcagaaatgagctcagtttgaaaatattttagttgctgtggaacagccaaatggaggtatctaatgaggaaaggtttcagtttcacagtgttcccttctttcttttttcagtgggggaacttcaggggcagctggttttagataaacaataaattttggttgtcttttggataaccaagaaaagacacccagtaggcaattaaagaaaggctctaggactcaggaaaggtgttctcagctagatggaaatataggagtcattaatatgtaaatggttgttaaagacactgagactagataagaccattgggggagcaaagaggatagaaggcaaaattcggaggatcctcaacattagagggcatgtccaaggaagaggagcctataggaacccactgaaaaagaagagtcagaggaagaggagagaaaaaaggactgtgactacacagaagcccaaagaaagaatttcaagaaggaaagtgaaaaaatggtaaatgctgaagagaaaggtaaagaaagagcaggttttaaaaaaaaaaaaaaagagcagattaaaaaatctcactttctgccatttaaaattaatatttttgagtttatatcatccagtgcctttaaattaggcctctgtcatgcca

SEQ ID NO: 61942 - DNA, 1859 bp, Homo sapiens
taaactaagacaaatctgtccctgtgtttcacagctctctaagataacatgtcttttacataacctcctgggagaggtggtacaagctcctgtcctcctcgtgtctcccagtaacctgccacccatcacagaacagatttcaccatgttccccggggtagctcctgtcatcaccatcatcatcctcatctcacgcttaagactaaacaatgcgccccgcctcgcctcccggttgcaaaggctttataatttgttgttttattggggcgggagatttggagaaaggtttagcagatgatgagctgccctcacccaaaggcagaggagaggaggaagacacgtcgtcccagcctccaccccgctaaaggcggccggcgcctggggacaccggggtcgcggcactccccggaccctgagagggagtcggccgccgcccgcggaccgagccccagccggggcagaggagctggtcagcagataaaggaatgaagcagaaagagacgcgaccacagcggggccggggcacagacgttgtaagccgctggaggggcgggtctctcggccctctccgcgggcgcctcggcttctacgctgctccgaggcgcccgggcggcaggaggcctctagagccggggacccgggggatccgcggcgcgccaggagggctcccccagctcgcctgccgcccacccgggaccccagcagccccgctcggctgcagtcccgaaacggccccggccggccctgcgcggccggcaaagcacacacgcgcgcgcgcacacacacacacacacacacacacacacacacacacaggaccaggaggacggtagatgatgcgttaccgtacgtggctctggagctggcggggtggggcgcggctccggcgacccgagcccggctccgcagaggctgcggcggtcgcgtcctttatttttgctgcagcagcagcgacttgtcaaagggaaagacgtaagaggcggcggcagcagcggcggcgtcaggcgagtctcacgagatttgggcggaactctcgcgcagccgggagccctcgccccgcccaacaggcccagcgcgggaggtgaaaggggaaccgagaggaaggcggctgaggtggagttgggggttgagcgaaaaggggaaagggatttgggagcgaggggagccaagctaggtgctggggacactttgctaccgcgcggccctcacccttcagccgtcgcggaatccgggcagccccgaccgcctgcggggacctgactccacagatgaagcacaattgggggcgtttcacaaagggtggtgaggagtggggggccatgcagtgcgcccccttttcctcgtggtgggcagggaagaccccgccgccaggcgaagggacacgtgttacggccggcggcagggccagggcctcacccctttatctccgcctcgcacccggcgccccacgctctttatctctcatcgcagcggccccggccctccggccggctaagttcaatcacataaaagcgtttcacttgacctactcttccaccttgttcatgtctttgcgccttatgggactgccagaaccctgcagatgccagggcctggctcctcggttttcttttctgcttgggaacacagtagtgtcctttgggtgacttacatccttgatcatgacctcgacctccacgtgaaaccccatgaggggaaggacacagactggctcagtcctcaccatatctccagcgcctaacataggtccaagtggacattaaattgttgagtgaataccccatctccatcttcctccttctgtacctggttttactcctttccagccaccttcatggtgtctttccttccagatattct

SEQ ID NO: 61943 - DNA, 727 bp, Homo sapiens
ctgaggaggctgcccctgccatagctgctccacagcaaggcctagagagtagccactgcaccaagagccttgggccaagctctgagcaccctggctaataccaaagctggagcctagagcagggttcccagaaggttatctggggctggctttgaccacattggctacagcatggcctgtgggtagacatgctctgaacagctgaggctgacctgaacgttggcatcatcagcagaatcatcttcaccaagcagggtttgaacttgaggtcagtgaccccaggcagtgtggggagagggttcttcacctggctgtgccccatggatggacagctaggactatactctgggccctgccctatagctcaagaaacatcctttacccagaggaggcagagacatcccaactggttttgggaaacaaatatgagaggctcagatcatataaatgaaagcttgttaggcaccaagggaaagtgggcagaacggcccctccaccttacagatcaataaatctgactaaacaggagttcgatttacacagcctggccaacatggtgaaaccccgtctctactaaaaatacaaaaattagccgggcgtggtggcatgcacgtctgtagtcccagctactcaggagtctgaggtaggagaatcacttgaacctgggaggcagaggttacagtgagccaagattacaccattgcactccagcctgggtgacagaacg

SEQ ID NO: 61944 - DNA, 748 bp, Homo sapiens
ggactaatgccaacaatggagacccttctcagtctgcttaaaactctgaaatcttatatttatagaatactatctttatttgattatgttttgttttagattttaacttgcaacgtttgtttatccagggctttttttctgtctctctttctcaaagatggccaatgttggttggccattagtcaagtactgtgcccatgctgggcaaactaggctcctttgtcatgctgtgtggggagaatgggtgtggagctggcactttccctattcctgcccagcctcagcctggccctggggacatctgcccagcaggcctatgtggctggatcacatgggtcccactacagttcactgccctccagtccatgatgaggtcaattgctcagattgtccccagggctgactgagtggaaaggtgactcctgacagggcaggcctccagggttagtctctatgagatatgagtccccacttgccccagaacatcagcctcattgagagctgctgcaaatggccatcttcctttagggctaagcatcatcccctccctgcagggcctcacgaggatgaaggcgctgcaagaggactcttggatggaagtgacttgttgggagagcccatgagctctccagaaaggactcccagcctgcagaaatgttctttctgtacacatatgacacatgcacttatactcaccacctctcctgtggacacacctccacagtgtgcccctgtgaatcccaaccca

SEQ ID NO: 61945 - DNA, 1469 bp, Homo sapiens
ccttacctcatccatatctcacgtggccaggggaagcagctcatctatgggcaagctgaatatccacaggtgcgctcccagctcgggctccttaggaacaggaatatcctcctgcagaatattctccagtgccttccccatgctgggtgcatgtaaatgctcagatgttcatttcctgatgtgcgtttcccatcgatgtcctgctggaacccttccctcacaagtggtgctctcccaggtgtgctccagcgggcaaatgccctcctcacccctccccatctgatattaggaaagaacctgtgaaacccattccaaccaagaagcctgggactgaggctttctgcccctgccatccctggggaaacgttactgtttaaatccgataagcgtgaaagcctcgcttgattgcatggcagctaagcatactatgtgtagtggtgtttatttgctgattggttgatttggagaggaaggagaaggattttccagagtctagactcttatggctttgtggggctttccagggtcagcatcgattgtgaaagtttggtgagcttggcagtttgtatcatttaagaaaatctgcccgggcttcctcccccaccaggaagtgtcccatcagttccaaagccctcagcttagttattggaaaggcctgagaaagccacgacccagcggacccagctggggaacacctgggtctcagttcaccttctgccaacctctaggtcttacgagcattcctgtttcctctccttccctgggctacttgaggtcatgaccttctgaaagaatgcagggtcagccagcctggctgaaatttcccctccgtgggtgtgaaaggcgatatgtccaactgtgaacacacagggcccacatccttatgactcagcagatgcggctgtcctcaaccacatcgcccagaatgtcactctgacctgcctcagaggtctgacagcagaatagattctgcaaagcctgggcccaggaggcgctttctccatgagtccttttggacaacacacattcacccagacacacactcagatgcacacacacacacacagacacatccactacagagacagatgtgcacacactgatacccaaacgtaccccaaacgcagacacgcggacatgcacagacacccaacacacacatgcacacacaggcccccggacagtcagatacacacacaaagacatccacacacacaaacacccagacacatccacacacgtccacacaccccacagagacatgtccacaacgggtgcctaggtatgcccagaaacacacagttacccgaatacagccagacacacacacacacacacacacacacacacacacacacacacacacagactcctccagaggactcaggaagaatcagatctgtcccgtatgcctgaccttgaatgcctctgccaaccccaacagatggccactggctctccgacagggc

SEQ ID NO: 61946 - DNA, 945 bp, Homo sapiens
gattgtgccactgcactccaacctgggcaacagagcgagactctgtctcaaaaagaaaaaaaaatatccatttgtcggctccctgcaacgaggctaggagcatgtggtgagcagggacagagcctgactgtccattgcacaatggctgaacataggagaagctgattaaataccagcctgaagagaggttgttcacattccaaaggtaggcaagagagtgaaccctcttctattacctgccccttcaagctggaaggtgtgcatagagaacaggttatgggtaagggtgtggagacaacatgctggctgtgttcctggggcagtaaggaccctgagcttgggaaggagttaacagaatataagcaggagaggaaagtgaaaatccatcatggagaatgaaaatcaggaagaaaaatgtggattttatatggtgggaaacaacacagaaccaagaagcctcctctaagctaccagctggatcttaattgcatgatcccctccaggagacagaatgttccagccaggaggcatgcatacccacattctggctccaggaaacatgtacccgatcctgaggtaatccttctgagttccagctactcatcacttcctgaagttgcccaggtgggcctaggccaagggacccacgggtggaagaatcagaaagctcaggtcctcacaactctaaggatacctggccatggtggggactggcagcatcctcacctcacatgcatccagagaaaacccagactgtttccaggtaatggaaaatgtccaggttagccccggagcctcaccagccctcgccagcagttctacctagcaaccaactcagctctctgctggacaatttattaacagaactgtactcacagggtttgttttcctagtctatggggcccacaacactgtaacaaaagttctatttccttttcctctatt

SEQ ID NO: 61947 - DNA, 5360 bp, Homo sapiens
tgacaatcatggccagacgcagtggctcatgcctgtaatcccaacacttttgagaggctgaggcgggtggaccacttgagcccaggagctcaagaccagcctgggcaaacatggcaagaccccgcctctacaaaaaatacaaaaattagccaggtatggtggcacacgcctttagtcccagctattcaggaggctaaggcaagtggatagattgagcccaggaagtcgaggctgcagtgagctgtgatcacaccactgtgttccagttgggtgacagagcgagactatctctattaaaaaaaaaaaaaaagtgacagtgagcctaaggaaggaggaccatgctaaggggactcatagaaggtcaccctatcaggcagagtagagtaagagctggggtagggactcatatgggaactgagctcatgccctggcatagccactgtgagataatggacatgccagaccctctctgggccaggggcacaagccagaacttgggtgtcatccagaaccctgtcccctccttcatctctacctctaattaggcacctaatcaatcctcagattgacctctgcaaaagatcttgactctgtcctctcctcacatcttacctagattattgctttagcctcctagctgagccccagcctccaggctgtctccagcctatccatcctcccagccagagggatcactctgaaacaagtacatgcttacctcacttctctgctcacctgaacccttatctctcagggtaaagtgcaagctccttggcttagctcccagacccttgtgtctgcttcctgcactgttcctggcttcttccccagccactcagcacacacttcccatgcctgtacttccctgaatgcattgtgctgttttgtgaccatgtattctgctggcctttcttccttataaggcccttctcttcttctatttcctaccaatccttcagaactcaactacatagcactttttccagggagccctctctgatatcccggttggacttagatgtcccctcctttagcctccccacccaccctgggcttccttctagcatagtacttagagttgctggtttttctatctcctacactaaggttcctggaaaagatgaagtaatctcagacagggcctcagtgaattttgtatcagcagcaatacccaagcacccagcaccatgcttgaaagaccacagggatttctggatagaaaaatgaagggatctccccagcaaacaggtcatagaattgatcaaagttagaggactttacacattaagtatctgtataggctcatcagtctatgcaactgagctcagttactaagggaactgatccttctactttgaccacattcttgctttatgaagtcctatgtggtcacagtgaactctctcagtcctgaataccagtcaccataaatgatcagtggcccctacaagcagttttatgaccacagtttggagcacagtaggggttgtgagttggggagggcagccagtggtccctgggctccaggatttacaagctctggtcaagggatgatggaggctgcactatgaatgggtctggcgagccagccaacttcagcaatcctccaaacatttctagttttttgttactgaaaagttcagtcttgtgaaaggtgtttggtttcaagtttcctgtcactggtctacttatttagaaagtgttcccccctgctccctgaaataaataaggtgcctgaagtctgatttaagcagcttcttgcagtcagctccagtgtgcagaaaacctgttatgaaaaatgaaactgagaaggtggacatttccgtggcatcatctttcccatgagctcagggtttttcactgtaagatgagaaagaagggctggtcggcactgggcccatcctgggaaagacaccaggagggactaagcctcttcttcctaaacttgattcttttccctttctccccttactgaccttgagatcaaagtgagcaattttctttgtgtgaaggtagttcaccccatccaggatctgcttaatgaagctggtggcctcctcctcactcagtgactccttctgggccaggaaatcgaagagctctcctccagacactctgtaaaacaccagcggggggaggggaggcccaggcccagtcagctctgcatgtcatgaggctgggctgataggggcaagccctcatcctgaccccccagggaccttgtatggcagaatccccctggcttatttctggggctttgtctgtccagtgccagggactgactttgctcctatttgctttgttctttcttttggatcacaagggcaggaatcaccctggaggtgttgtcagaagagcctctgctcccactctaggccctggtcccagtcaccctggaggttgccctctcccctccatatgcctgagatggcaggggacaaaaacaagcagattatttagcctgaatgtttgcgttcctccaagttcatattttgaaattctaacccccaaggtgatggtattaggagatagggcctttgggaagtaattaagtcatgaagttagagacctcacaaatgagattagtgcccttataaaagagaccccagagggcttactttccccttgcactatgtgaagttacagtcaaaagacagccatctatgaggaagtgaaccttcatcttgatcttagacttcccagactccaggactgtgagaaataaatttatgttgtttgtcagccacccagtttatggttattttgttatacagcagcctgaatgaactgagagaggaaattggtaccaagtgtggagtgctactgtaacagacacctaaaaatgtggaagctgctttggaatcagctaacaagtagaggctggaagaggtttggggtgccaactagaaaaagcctacattgccatgaatgaatggactgtaagggtggtcctggtgagggatcacaaagagaggagattctcaatcttcttagagaatacctaagtggccatcaacaaaatatttgtagaaatacagatggaaaggccattctgataatgtctcagatggatatgaggaacatgttactggtctggtcaatggaggaaagggcatccttgttataaagtagcagagaacgtggctgaattgtgtgtgtgccctagtgttttataggaggcagaacttgtaagcaataaaaatggaatatttggctgaggagatttctaagcaaagtgttggaagagtgtcctggttcctcttgactacttaaagtaaaatgtgaaaagaaatggtttaaagacaaaattgttactcaaagggaagaaagcttaaaagtatgcaaaattctcagcctcctcatattggaaaacataagaaaacctgtttgggaaggaacaaaggtatgaccaagcaaccatttgataaaaagattaatatggctctccagggaagccaggtgctattcatcaagacaataaggggattagtcagccatctaaacagaagccaggacctattgtccaagacaatggaagaataaccctgaagtcatttcagagatcgtgggggtgaaaagaggggtgtccctcccatcacagattcatagtgccagagcttagagggcagaatgatatcaaaggaggggcctccactgcccagtgctgcctcacattgtgggctttgctctccaaactctgttgccatactcctcagacataccaggtgtggctcctggagggcaacagtgtggcaagctctgtgccaagcaaagctggtgggtgtgtggctgctttcacctggatttcacaagatgccttagagagctggtgggcccctgggcagagaactgcctttggtgtgggggccaatgtttggagagcaaagccttatgggcagggttgctcaaagctgcaggggcaagacctccattccacccccatgggcctggagggcagagcaatgagccaaagattcttctcaatgttttgtactggctcagaacctgtcactcctttattctttcccattcttccttttagaatgggaatgtgtatcctctgcctgtcccaccatcatattttgtaacacgacatgtttgatgtcattggttcacagctggagagcaacttgcctcagaatgaatcataccttgagtctcacccacatctgatttagatatttagatgagactttggactttaaactttggagttgatgctggaattaattaagagttttggaactattggaatggaaggaatgtattttacatttgaaaaggacattaattggggtggggggcagagacagaatgccagagtctgaatggactaagacagatgacaaagcggaacaaatgctgtgccagaaactaaagacctaggttccattccagccttgccactgaccttggacaactcatttcccttctccaggcaggccctggtttcattacctacaaaagaagcagactgagcaagacagccccaaagccccctttcttcaattttataaaagatggcccctttatggggctcaagagaatctaagtatggcccctaacttaagcataagaccccattaattatattcatttttaaagactctagaatactgtttttgatgtttgatactactttttcacactctacattcttgcttcctatagttgatgtgacagagcaaaaaaaatctcccctgagatttagaattgccagataaaataggtttttacttgctaaatctggcaaccctacttgggcttatttatcctgtcaacaaaaagagtcaaactctgtaaaatatttaaagatgtttattctgagccaaatatgagtgctcaagacccatgacacagtcccagaaggtcctcagaacatgtgcccaaggtagttgggtaacagcttgattttatacattttagggggacagaagttacaggcagaatcaataaatctaaggtgtacattggttccatctggaaaagtggaacaacttgaaggtgaggatagggggttgggagggcttctaggtcacaggtggattttctgattggcaattggttattattgaaagacctggaatcaatagaaaagagtgtctgagttaagacaagggttatggagaccaaggtttttattatgtagatgaagtctcacaggtggctgcccttggaggcaatagatggcaaatgtttactattcatattcttaaaaggtgctagactctcagctaatctcttcaggatcagaaaaagacatggaaaggaacagagattctccacagaatatagatttttcccacaagagtcagctttgcagggccatttcaaaatatgtcaaaagatttattagggta

SEQ ID NO: 61948 - DNA, 916 bp, Homo sapiens
tttgcctggatggggcagcttggtttagacaagtgttctgaggactttgagcaccttagtgggatagagactttcagagacattactgcccctcttcaagggtggagataggggtctctgctaggcctcaatggaaactgctggctggtttggtggggtctttcccctcagcttgcataacaataattccacagtgggccccttggtttggcagcgggctttcgcacaggctccagggcacacatacaaaagcactaagcacgtgcagcaccgctcctgagtcatccaaggacacaacccaatgatcctgtaactctgagagccacaccctccctttcagcagccacaggttgttctctgaccttacactcttggcttcagtgccaaatcagtgatgacttatctttcctttgaaacgttaattccttctactcccagagttcctttgagatgaaggttttcatgagctttcaaaacactctcttacctaatcctcctagcacttaagtaaggatgaaaggtgactagccgagagaccccacttcccaaacagggaaactgagcccaaagcttaactgatccacctgctgttgtgctctggcctcaggcccccacttcagggtgcaagattgtgggtttgacaagacaaagacatgtcttctgagtgaacccaatacccatccttgagtggtgctctgtcctgtggtctcagggaagccaagaggctcttctcaggaggggtatccagttagctcagggcaagtcatcctacctagattttcccaaagagcagtaatttcaaaccctttgattcactttcaggctctgtgtgtgaggttgtgtgtttgatcaagggtttggtaagttcagccaccacagatactagatacaagagcagaaacttacctttccttga

SEQ ID NO: 61949 - DNA, 4624 bp, Homo sapiens
tggatcttaagatgagatcattctggattacctgagtgggccccaaatccaatgacagatgccataagagtgaggcaggcagagattagacagaagagaactcacagagacacacagggagaaagcaacatgaagatggaggcagagattggagtgatgtgtctacaagccaagaacacaaaggatcaccagcagccaccagacgctaggagacaggtatggaactgattctgtctcagagcctccccaaggaatcaaccctgctgacaccttgattttggacttccgacctctacaactgggagagaataaatttatgttgtttgaagccacccagtttgtggccatttgttatggaggccccagcaaactaacacagcagggaaagggggcatagggaggaaggcttgggttcttcaggaaagcatccgagaggacaaagcagcctctgctcttcagggcccacgcagcgcagggagggctggctccaggggactgcaggtcagcatggccataagcaggaaagtcctcctctctctcaggtactgccgccaccagcaggacacacggcctcttacagattctctgcccacagccatggtcctgtccacctctccagcaccttccacacctgaccccccttatccatgagtttcccaaagtaactggcactatccttctccagcaagtttcttagagtccattatcacagagaggcagtgtagttcagtggaaattgttctggctttggagccaaagagacatggattttaatcccagggtgacttgggatatgagtgatttgccctcagtgagcctcagtgttctcatctgtaaagtggggtaaataatcgctgccttgcaaggttattgtgacagttagaaatagcataggctgggtgcaatgtctcaagcctctaatccaaacactttggaaggctgaagtaggaggactgattcaggccaggagttcaagaccagcctaggcaagtagcaagaccctgtctctacaaaatatttataaattagccgggcatgtttgctcatgcttgtagtcctagccgcttcagaggctgaagtgggaagatcgcttgagcccaggaggtcaaggccacaatgagccatgactatgctactgagttctagtctgggtggcagagaagaaagaaaggaggaaagaaagaagggaaggggaaggggaaggggaaggaaggaaggagggaaggaaggaaggaaggaaggaaggaaggaaggaaggaaggaaggaaggaaggaaggaaggacggacatgtaaaatgcccagcatatggcctgcatacaacaggagcacaataaatggcaggaattttcatcaccattatttacatcatgacaaagtttttctagaacactggcctaagcccaacttgttctcattgctgttgtggatacaaagagatccacaatgttggggctgtccttgggggctctcactcagcagggagttctagggacctactgtgttcccttttcttacttgccttcaagtctcttcttctccagacactggctgtgacctcagtcccctaggtaccttcagtaggcacctaatacatatttgttttgtgactaatgaatacatgatgttgagtgagtcacctaacctcttgaaacatcagttccctcatctataaaatgcagctaatagtgtctatctaccctgctgcctcacagggcagttgtaaagaccaaatagacaacagccaaggaaggcataggaagagagcaaagcaccacacgaagccccacctgcacctcaaaggctgtccaaccctccaccgaggtggctctgctgggcctaggacagtcacagtcaggtctcaaggtgcttgcatctccctgtgcctagagagccgcattccaggacacgggcaggtccacaccttaacaggtgcaaacctccctgctttcgctggtctggagtcagaaagccttgactcaactatgatgctgcctcttcctagctgtgtctccaggccacttaacatctccaagcctcggttttctcttttgtaaaaaatagtcaattatccctgcctaactagaaatgtagccatgagcattgaaacagacaatgcatggcaatgtgctttgtcaactgtacagttctgtacaaattcaggtgattattacaatgattcccattgtgttgaaaagcagccacactggcctgagcctcagaggaatacagactcccggagaaggaggagaggacaaacaccactgctccttgcaattcctgtaactttgaaacctgctccataaaattgcaaaatcctatatgcctttgccaggagaccaaaaatattcaaggcacgactctagagaaccacaagatgagccatttctataatgggtactgctgggcttcaatcaactcagctgcctggcccaaaaaagtcattttttaaaaacaccacacaccacaatttggcctctcccccaaaacatacatcctttctcttaagaaattaagtgaaatccaactttgatgaaacccaactctgaggcattcattctcagagagcaggcccctggttccctggtgaggcgggcagacaagcattctcaaatgacggtttgcaggtagacagatctccagtggaggtggaagaaatcagcacttggccagtcccaagggctgtgaggacaggacctgtgagcccaaggaagcaactgctgcctcagactcagaaattagctctactaacccagcgaaaaagctaaacagccttaagactcttttactggttgttttaatcaaccaggtacgaagaaggtgagagaccaactcctcttcacccacaggcctggatgccacaaccccacactccaactccctgccccgcaacaaatggcctcccccatcacataggcagccagcagatgaaagtccctcccagactggaaatggccacctgtcccgtggttctctgggtcccacaacccaggccacctggcccctctaggttgcaccaggctgaggaaggcagacacacccagtcctggattcagggctaacaaggccaggatcctacctgtagctactcgcccagcttttacacctggggctgcctcttactccaaaggtcctcagtcctggatggagacgcatgtaccttatttgttagctcaggctccctttagcagtttctgttttctgttgcaaaactctgaaccctctgagagacaccctagcatggtagaaagagcaaatgctttgaggccaggtttgagtccagggcctgctgctgactgcctctgaggatttagagaagtgacttctcctggccttggtttcctcctccctaaaaggtggctaatgcctgtccaataaggctttgtaaggttataacaatatgtggatggtgcctggtgtatggttggtgcttaaccagtggtaattattattataacgccattctcacccccatccccaccccaacattccaaatcctgaagtctagtcaatcctccagaactgattgctcccaccttcaggtcacaagcaaccatttaccagagtgccctgtctcagacctgcccacctctgggccaagcggagctagctgctgtgaattacagaatgcactcaaagcagttaagtgtctgtttacacagaaaaaaattctgaaatcttatatgattgcaatattttcccaccacatctgcttttatggatataaatcagtgaacacacttagatcaggatttattcggaagagtagcttctcttacatggacttttctcttttgataactacggtactacccagtgtccagtaggcaaaacacaaaggtctaaggtacttgcatgattctgaaagttccttcagactcttcagaaagaattatcttatgtctaatacattgtccttttcagattataaaagtaatatgtgctcattgtagaccatgaggaaaacagaaaaagtatatgaaagtacaaatctgtggcaatttcactgtttctagagaatgccacagtgaatgcttcggtgtatttctttctagcctttttttcctacatgccagtgtgtatgtaagtatccattcattttaaagcgaacaaatgaataagccagccagacagtgcagacaggaaagcagctgttaattgcccatggaatgcttccttgtcttgttttccattctccctgcccccaaacaacttatttattagtgacacacctatgcgttgtataactacatcttatcagaggttggtgaacttctatcctctgagtgagttgacatagtcatctctgctttccattttcatgccacagagtcaatatttactagccatgttgctaaaaacaggcactggtcacagacttggtgccaaaccactgtgtctaatctcagcagaagcagtctcagtggcacccgcaggctttactgtgccataagccatggctctagatgagtgattcctgccccagctgagtagacagcccatggcccagtaagaacacttcacataatcatgaagttgcaggacactaagtgccagaaggcacttatatgctagagatgggggaaaggaaactgaggacttgcctaagcacaggcagctccagag

SEQ ID NO: 61950 - DNA, 692 bp, Homo sapiens
cccaaaattagccaggtatggtggcacatagtcccagctcaagaggctgaggtgggaggattgcctgaacccaaggaggtcagaagctgcactgagccatgatcacgccactgccctccagcctgggtgacagagcaagaccctgtctcaaaaaaagaaaagaaaagataaaaatgaaatgcaaacaccacgaagaaaagtaaagtgcaggagagaataaggtttgaaattaaggggaaagtacagaaaacttgaactactttaaatttccccacagtgaaaatgttaatgtatctttacaaaattcataaactaacaaaaatacacaaaaacaataaaagagtattggcaaagccacaaggaaataagtacatgctgatgacactgtaaagtgattcactatttccagtttaaaccattaagcaaatcagtcataacctttgacctggtatgcaacctctgggaatacacccaaccaaaataatgcagagaggaaattaaacaaatatgttcaccgaaacaccaatatttttagcagtgagaaacaacaggggaaagttacctgaattgggcatgcctggatagaatattatgaagttagcagaagtacataaactgtatctatctatctatctatctatctatctatctatttatattttttgagatggagtctcactgtgttgcccagg

SEQ ID NO: 61951 - DNA, 1526 bp, Homo sapiens
gcctcaacgaggctcacctctctggaccttgttttctcttttgtaaagtaagaataccaatttccaccgtgcagagttacggtgagggttagccagacctatgcaagccttgggacctccaaaatgcctagcccagagtcctagtcaactgttggcaacgcccttccaagccgttccaccccaacctgcagcacacctgctggccgcccccacgcccatcctagctctaccccaggccggggcgcctgacggcggggaccccagcttcattcagccccagaggaagctcagacatctgagcaccctcctcgcatcacatccttgtgccaggcgggagcaagaggtgagagagtcagcccaagctgagaagacttggccgggagccgggcgtgctctgcccgttccagggggcctaactcgatggacgtctgtctcccatctccctgctgggtgcttggctctgcccgccgcctctaccctgtctcccaggtcaaagtgccaggctccggagggcgccccagggcagcggcgggcagctcccgcgctcgggtgccggccacaatgccccgggccacggcgtcaggcattggggcggcgggcccgggatctgcgagcgagtgccccggatctcttcgccccgccagccccagacccgggcgctgctgccgtcaggccgcgcgccccgtcccgcccatcgagcccgcagacgggtgctactcacggcgggaggctgagctgccgcggtcgcggccgcggcaggcgcggcgggagcggcgggcgcggcgggcgcggcgggcgcggcgggcgcggcgggaacgggggacgcggcggggtgcgctgggctcggccctgcagtcctctcctcccagagcgcccggcacccgcccgccgagcagcctaggagccgagggggcggagcggccagccccgtcccaggcgccggctggaggcgcgcccggctgcccgggacggggctcggggcgccccctgctggagccccctccggacagtcccggggcgagagcccagcttcccggccgggtaggggacacctcagggctcccagactcccgggagagcggggagagtcggtagcaagaccctctgcgcgtccctaccggctctaccgcgcacatgctgcgtggccttgggcaagtcggctaccctcccccggccttatctggaaatcgatttgaatgagcttatacgtatgacatggtctggcacaatcctcagaaaatggtacttgtgtgctcctctccccaccatacacaccgtgagcgaggaagccccactgaggaataggccgtctcctccctcccagccagagcgctccctacaccgcagactctcctggaaacctcaagcccacagcgtacagcaaggtgggggctgcgatgagaagggccgctctgctcctcactgcccccgacccagcctgagagcggcctgccctcgtttgccctttgtcctggcacggttgctgagtgaagcccccctctcaccatcacgccttctctaataga

SEQ ID NO: 61952 - DNA, 649 bp, Homo sapiens
ctggatggaaggccggcaggaagctgcttcttcccaaactgacctggtggcctggcttctcagcccttcccagccatgcccactctgccctgtgccatctgccctcctagatgggaggtgtggagcaggcttggtttggcaacctttcctgctaccccccccacccccgggggcactggttcttgcagccagaggcagctgcttcagcctctagccttgctggactcagcaccacagggatggggcagggaaggggaggagagaagggaggaaggagctgggggatgggaggccttgcctctctctagagaacctgggggatggggatttcctggacatgtgtacacactcttttactccgcaaacattcaatagtacctcctggggttatgtgctggagtaggggcaaataaagacccaatgccataaaaggtcagatctactccagaaggagcctccagagaaaaggaaagcttgattcaaacttgaaagaagagtagggatcaccgggagaacagaaaagtccacagtggggcaagggaggcagggcacatggggtgtgagcagctgtgcatgtaaagggctgcaggtatgaaaccacttgtcattcaccgcccctatttccacctgagccagcacagggcctacg

SEQ ID NO: 61953 - DNA, 3620 bp, Homo sapiens
aacagtaacaacaacaaaaagcaaaccacaaaacctagaaatattactctaactttcccccgcctttctgtgcatgagctggccataaagaaattctctgacctgccttatctaacagtaggtcataagactgccccatacccaggaggaaggaatgctacacagaaaggccaagaagaatctgaagagatagtccttgctgggtttccccacttagtccattaccattagatcgcactttttgtccaatcacatttctacacaattgtccactcttcgtcaaacctaagcagaaaaataagacagttttccctgggtctttggattcttcctatctgaagcctgctgtgtcacataaaacttggattgaccacatttgttatgcttttctcttgttaccctgtcttttgtcacgggggtgttggccatgacctttatgatgggtgaggaaaggtatcacaccttctgcccctatactcccaaagttgtgaaccctcagggctctggggggttattaaaggaggggggagcccagtgctcagctagcattacttgtaaagcagagttattaacccggggtccactggctccttagcaagtctgtgaatgtcctggagtcacatgcagtttcatgtgagtgcctttttctccctagggagagggcccattccacatcttttatctgattttccaattggtctgacttttcagaaaggataatcattcttgtaaatcaggagtttgctaatggcacacaggccaaatccagcccaatgctggaattttgtacaacccacaagctaagatggtttttatatttttaaacggttgaaaaaattaaaaaggaaaatattaattcatgacacatgaaaattatatgaaattcaaatttgtgtccataaagttttcttggagtgcaatcatgcttatttgtttacagactatcagctgcttttgtgctacaagggcagagttgaatagttacaacagagcatatggcttgaaaagcctaaaatattgcctatgtggcccttttccaaaaacgtttcctaacccttgccaaacatggaccagataacactacttctgactatatatgtacctctatttttcacttctatgtagataccattatgattaataaagtttaaattcatgttctaatataattaatgcagtagatgttagttttttgacccctctcactctactatagaattcccaccatgtgagtcttgctggggggacagagtccacctccccacaccaaaggtcagattttcttttctcccgccttcttggcagccaggacatggacatgtgacttgagatcagccgactagagatctcagctaggactaggaagctggagtgagtcacacaaaaatgagaaatcactctggcagtagcggagacaacagaagtcacatctagcttccaggagcagcagggccagcagttcaggtgactcctgtagcaatgatccacttggagttgcatgtcagtagtgtcctcaccagacagtccctaaggcatggttttgtctttggacctgctgcccggcttctgtttctacttggccaggacgagctcaggcagtagataaaactgagtccgaatcactcactgcctggagcagagagaagctgaaggtccaggctaataagtatgaactccaggaggacagacaatggctgatgtatctttgtgtccttggcacccaagacagtgcctgggtccagactttgggagctaggcagttctgcatcaggagttcactcacatggtttgcaaattgctgctggttgttgttgggaggcctcagctgcactccgtgtggaattctccacagggtggcttgagttctcgtgacatagcagctggattcctacagaataagcaatccaagagcctaaggtgaaaacagcaataccttttatgatctagcctcagaagtcacccattgtcactctgccattctttattagccacacccatcagctccaattcaatatggaagttaactatacaagggcatgaataccaggaagtgaggatcttgggggccatgttggaggctactatacttcacatgaccattaacccctaaaacaaaccaaatgaaggacagataaagtgcggaccatacatttaggttggtttaatcaaaacttctttggtggacttcttgatcttcaaaattgtgtatgccatctagccttctccacatttgttccttatctatgaaagggtccaggactctccttggaaggaaggaaggcccaatcttaagggttccttttggttctcagatctctgattctacaaaataatcagcaaaaataaagctttgaagatatcctttaggagttgacatttacactggaatttacaattcaataaaaacagtgagtcattataagaatcatctgcttatttattttacagagtaatgatttaaattgagtacatttgggcacagtagatatttgacacgaaaaatagttgtatcagaatgagcatcagaaaaatagcaactcatcttgcacataataactagaaaatattattctgtctgatcatttaagtgttacaaatcctgagaatgttatacattgaacaaattaggtactaccttataattaaatctcgcttggaaagaatcctttaaaaaatactctgaggtacaaatcacctatgtattaaacatgagtctctgacattatacaaagagtttaaacaaatatatcaaacaattacaggccagtggctcttaaaacagctatcagtcaggttcaaggacacactgttccacaatttcccgtaagttggggttttccattgcagctgccactcgctctttgtcatttatctgcttattgactgaaaaatacacagacaaaagttagcagaagaactgtgtcaatatacagcaccagacagtatttttattagcctgctgaaacaaaaactttaactccttgagaacttaaacctgtttttggctaattactcataatgtaatttcccatctagaaggcagacttaagagaaaaatatctactagaattctactacttaaccacatctatttttttctttccagtctttgtccatacacatatttttatacagttacattcagagtaaatataattttgaaaattgctattttttcccccataagcctatattttaaactacagggttatttaacatggtaaaagtcttaagtgttctaaagtaattatgaagactatgctacaatgaatacctttaaacatatagccttctttttggaaatattctcaaaaatgggattatttttaagagtatgaatatttttatggtgtgattcatatcattgatttacttcctaaaattactcaccagtttatattgtcaacaccaatacatgagctatcagtttggcaacaatacctggtattattatcattgttattattattctttgagacagggtcctgctctgtcatccaggctggagtgcagtggtgcaatcatagctcactgtaacctccaactcctgggctcaagagatcctcctacctcagcctcccacaggcatgaaccaccacacctggctaattttcaaatat

SEQ ID NO: 61954 - DNA, 2541 bp, Homo sapiens
cctagaacaatgttcaaccacatcttcacatttaaccacaaaccctatcctatagccccatctatctgtcatttcctatcttcttacctccatgcttttaagtttcctcttagtatgccctctgaccctctacatatctagatcctaattattctttgaggcccaactcaagtggctccttctctttatttcaaagtctttctagatcccctcagtcagagactagtatctccctttctctgaatttctgtatctcttattcagtctacagccttctattacatactctatttttgcatatatgggtttccttcaatatcagtttgaagactagagtcactctcttccaaagttgtatctccagtgccctaccatccctagattatgtggacagagatctggcaggacagggatgtggtctgctttgtggagatcattttactcacaattatcatctgcctggaggctgattaggtaagtcctgcctctagtaagagaggtcaaccaaattagctcccagagtatttcctaaccctggcttccttctactggcctataatccttacttgaattatatttgtattctatggttagatctctcaatattatatccagtcttttcggttttcaaaaacaatacaacataattaaaaaaacaaacaaacaaaaagttgtaaggcaattgtgaagtggtggaaagtgcattacggttagaaccagtaggcacagcctttgctttttggctctgttccttactggcagtgtgacctccaggtagttctttaacctttgtttcctcatttgtacaataaagatggccccaagggttaaacagaaaatatttaatatgcaacatggaagagtgtgtatgtgtgtgtgtgcgttatgtgtgtgtacacaaggccttgctacaagaagccaatctcgttctcttctttcggggacctctgcttactgactttgccggatagagtggctgtgaccttgggccagtccccaactcgactgtcacccacaagcgccctcagcggtagcaagagtgcgtgtccaggagctagagaacgaggctctagtagtgcaatcaggccagctttgcttcctaaccaggcaccctagacttgtggtctccccacaagtcttggaatggttactaagacgtaggccacacgtggagaatgaagcttttaagacctctgggttcggcttgccccaggtttacgaagagcccagttcccagaaagacccacaccccccacgtgacttaggaccccgaagaaagcgcctgctacgccccggacaagatctggccaaaaacaaacaaacaaacaaacaaaaaaaaaggtctcccctcccagccctcaggtgaggccatcatccccgcacccctcagctccggcctgcacctataacgccaaatgctgtgctgggtaaaattaattaccataaacttctagcgctttctcttccatgatccggggctgccgggcagctcccggctcagagaggccggagagccacaggactctgctcagcgtccaggagagcagcccggacacccgctgcatcttcacgctcagccatccctggcgactgtcccaatcgcgccaccgtctctcagcagcctcgggattgatcaacttcctggtcttcaaatgggccgagacaagcctaaaggttcaggagagcagagaaaaggcggggccagacggagtagctcgaaggacctagggaaggggcctcaaggactacaagttccagcgtgctttgctcgatttcggcgggacaaaaacaatcttcgcggctcgtcagcacattgcatgctgggatgcgtgagctattttcttcggaaggcagcgaattgtattctgggacttgtagtgtccgcctggtagaagtggatgtaacggtctgttaaccgcgactgactcactcagtatccgtgataagttaaagatgaatcctgaaggggtaggggaaaggagatcttgagttctccagcacggagactctttacaattatttctccgcgggatccgctgacagccaacgtctttcttacttcctgatcggacaggaagtaggtttcagttgctgtgaaaagggatgtcatgggaagccagtgaggtagtcaggtatggcatggggagggctttttggctttctcgtctcctaagggactcagtccagcacagcttcccacctttgaacgaatatttctgctaatggcctccaaagacaacttagaacataagttttcccgtgtctaatgtgtacagtggtgacataatggagatcgccatccttaaaagtgtatcttggccgggcgcgatggctcacgcctataatcccagcactttgggaggccgaggcgggcggatcacctgaggtcaggagttcgagaccagcctggccaacatgggcaaaccccgtctctactaaaaaatacaaaaattagctgggcgtggtggcaggggccttaatcccagctacttgggaggcagaggcaggagaatcgtttgaactcaggaggcagaggttgca

SEQ ID NO: 61955 - DNA, 1838 bp, Homo sapiens
cacaaagggccctagaaacctgagcagcccctaactcctacttttctgcccctttggccccactcgttaatatctcagcatcgcgaaccaggcctcggatttgctgcgcagcctcagctggccgggtgccgccccgcccccagcgcctaagccccgcccctaggtctccgcccctcggatcccacggggtcccttgcggccctcccactcctcgcaccgttggatcgctttgctcacggcgctatctctcgataaagttgttgttgcggcttccgccgcgggtggaagaagatggcgtcgggtggtggtggctgtagcgcttcggagagactgcctccgcccttccccggcctggagccggagtccgagggggcggccgggggatcagaacccgaggctggggacagcgacaccgagggggaggacattttcaccggcgccgcggtggtcgtgagtttgcacccctcggggtagcaggcgggagggcaccccgaaagggaagagaggctaagcgagaatcggggaggttgggcagagtgggcccggtgagaccttgcctcggtgtcagcagtccgggccccggggaccctggatgtgctcgaagcggtagagcttggcttcccggcccccaggcgggaagagtaaagaatgagggttgtggtgccttcgtcggctagctccctaacagccgagaaccgccgacgccgtcctttgaccctgcagtgtggtgacactccacggatccacggggttattttgcaggtcgtgtcctgccaaggcagattcagtaggacggaataagcgaatgggatgcagacctttcccccgtcttactgcttctaagatgaatagcgttatgtggactagcctggggtggtgacccgcccaccagttctttctttagcccagcatttaccgataataaccaaaggccctttctggatcttagtttacaaaagttatgttgattcttctgatctctaggaaaatcaggccagaggctggtggacagaaggcactgccagataaatcactacatagatcagaaagctttctcctttttaaagggatgtgttcaagtgcccacgtacctcactgggagcaaatctgaaatgtgatgaggaaatggtgtttcccgtaatgttaccggtaggaggcccttgagtgtaggttgtcgaggttcttggcattttgaacaaataattggacaaaacgcacaaaataacaaaggaatgaaacacaaacgaagcagcgaaagcaggaatttattaaagcgagaaagcaccccacagggtgtgagtgggccggagcaaggggctcaagagcccacttacaaagttttctggattttaagtgctccttttatggttcctatgggttaccccttatctggatgaaggatttggtctgtggctaaaggccgaggtgaattggcgtcctgtgcagatgaacggatggtccctgcttggcctgcggccagtctaaggcactctccctttccatgtgagacgtggtggatggggagggttgcagggatagtagcctttgatcctttgccactcgggcgtgggcagatgggttttttccttttggtttagctttaggaagttggccttaattggccttaggttccctgcccccaaacccagggggttccttttgggaattcagctttgggaagtcagcacgaattggccttagattccttgcccccagaccttggtgttttctcttttagaaagttaacgtaagttgacctcagattccctgcccccaaaccttggtgtttttccttgattcagcatgaattgcccttaagttccctgcctccagaccct

SEQ ID NO: 61956 - DNA, 529 bp, Homo sapiens
cgtgcctgtaatcccagctactcaggaggctgaggcatgagaatcgcttgaacccgcgaagtggaggttgcaccactgcactccagcctgggggatacagcgagactctgtctcaaaaaaaaaaaaaaattaggggcttatgagagaaacaataaaggttgccgtcagacttctggtttctgtaagggttgccaacccattgtttacttaggtggtaaggccactctgacaacttggccatttgtagttcattagtttggactggagaaaagaaaaaaaaatctgatatctcttccttggtcctcaagcttctcagcactcaagtaacttttgacataaataaatcatgagtagttgatagttactagagcaagtagccgtaagtatctcatctccaggaaaagctgttgctcaactttttctggcttattcttttgcttcgtcacgtggacagctggagcttcattctgctttcagagcagatttgaactgggtttgctttttcaatttagaaggtaatccacccatt

SEQ ID NO: 61957 - DNA, 2306 bp, Homo sapiens
agtagtgagaagtggggaaatatcaaacaagggtttcgatctgtaactgactgtgaacagtcaattgagataactcactaccttcagacctgctaacagtttcttttctgaaatctgtccccaatatttagatgaagctatttgcaaatttagagtacccaaatagattgtcatttcactttgttgggtcagaaaaggtctgtctccaaggaacaaattccctcagatttgttaaggaagtgtgtcataaaaggttccttaagccaggtcttttaactgatctgcccttagggtctgacttcacaacactgcagtgccataccatggctttcgaagccacattctcaactttcagctcaggttctgcacaatccagctttgttcactctggtaccggtctggggacccaccccacccttgtttgccgctgatcactgagctttgaataaaggctatggactgactgtattttcaccatgtgctcactaggctaagcatgattagtttttattctcctagcttgacacagtgtgttattgaaaattgtatttgtgtgagttaaggatgaaaagataaattttacttttaacagcattagaacgtagtgttataccttcctttgcgtgtcagatgggtcagtaatatccacacagctgggcttcagttaacagtttagctgaggctacagagtaagcatgggtcagagcttgagttctggactccagtgtagtatcctggtcactagaatgtgcacagtcagcatttgaaagaataaaggtcatcagctgagaaagagaaatacatttggacatgttcttttgaaaattatctgtgtgtacacatacccatgttggtatcatgtgctttggggtagggcatttgagcgaggttatgctgttagaaattaaccctaaaatgtatggacttatttttgctctgtcatgacttgggcagcacttattttactaataacgatttgctgcttattgaactggctgactggtggcaactgagggaggcattaaaagttgctttctaggcaagttgggtttgtttttcatggtaatgttttattcagagtatctctttgttttcagagtaaacatcagtctccaaagataactacatcccttcttcccatcaacaatggctccaaagaaaatgggatccatgaagaacaagaccaagagccacaggatctctttgcaggcaagtttggactcaaaagttactctaggaacctcctaaatggctttgttaagttgctgagttaaagtcaaaaccaaaaaaaaaaaaagtattgggaacataactttatgtaaagtacttttgtggaggattccaaagtacatgaaatacaggccctgccatcaagattctttcagatttagggagtaagatataaatacacaattgtttaagaaggtgagttaaactgttaaacaataacagaaatgcagttggaggaatgatagaaatactaagtcacaggagctcagaggagtgtgagaccagtgactaaagcagtgcgtgtagccttgtgtgaccaagactaggagtaagaattgcatttggtgtcataatccaaaaatgtgcatactggtacaaaacagaaacaaaagttttattaaatgacttgcccttactacttctaatacagcctgaaactttctattgtttcctttttcagtgctctttgcaacacattgaattgatttcacaatccaccaacaagctgtaacctccagtttgaaaaacactagtataggacagtttctcaaccttagcactattaacattttgggctggataattctttgttgaggggtgctgcactgttctcaacagagggggtgcttttgccccccagaagacatttggaaatggttggagacatttttggttgtcacagctggtggtagtactactgttatctagtgggtagaggccatggatgctgctaaacactctgtacacaggacaggccctcacaacaaggaattgtttagcctaaaatgtcagtagtgctattgttgaaaaaaccctgtctaaagtgatcttgggccaggcacagtggctcacacccgtaatcccagcactttgagtggccaaggtgggtggatcacttgaggtcaggagtttgagaccagcctggccaacgtagtgaaaccccatctctactaaaaatataaaaaattagctggattccatggcgcacacctgtgctcccagctactcaggaggctgaggcaggagaattgcttaaaccctggaggtggaagttgcagtgagctgagattgtgcta

SEQ ID NO: 61958 - DNA, 2490 bp, Homo sapiens
gggattttaagtgtgagccactgtgcctggtcagggccccattactcttaagaaagggcaatactgtgttcccagggcaacaggcagtcggtgctcagtgaggtccacgctacagatcggctgaactctgcaggtcagtttgctgccatccccagtgccaatttcacttcatgtgagttgactacccctgctccagccacttacctctcctgtagctaaggccacaaaattatccactgtttttggaacagtctttccgaagagaccaaagatcacccggcctacatcttcatctccaattcgtaggtcaaaatacacctgaggaaagagaccatttccaacttagcttctttaaaggggcgttgctaggggagggaaggtacaagaagctaacctgaggatgggagagagaatagagccatatttttagagaagtggttctgaatctgattttggtgacggtaaaaatcctatgagaatctaatgaaagctccagacccttttcttggaaaacatgcttatctataccctccttggactacaggataacaatatttgctctaaacagctaatggacccagattctaaaaattaacattagaaaacccataaggagcggagcctaagttcaccacttaagtttgaagtatacatactgtgctttgtaattggaagtggctaaaatttggcttaaggagagaaaggattcggaatccggcaggcgtgatctttcaccatctccccagcactgaggggtgtttgcaaaaagcctgctctgagactgccagtgtcggccccagatgggtatccggggatccaactaactccctgggtcagggcaggggctgggggtgtcggggtgggtccgggtcgttccctggactgaatgggcaggacggcccagacgccacgaggccacagacagaagccgagggaggaggggctgagccaaggccaagccaaggccgcccgggcccgagctccggcaccgtaaatgccgcggactccaccggaccttgacggtgactttgggccccttcttcttctcatcggccgcagaaggtcccggcagcagcaggaagaagacggaccccgcgatgagggcggcggcaaggagcaccttcatgttgcgttcggagaggcgcagcatccacaggcggaggcgaaagcagcccggacagctgaggccggaagagggtggggccgcggtggctagggagccggcgccgccacgcgcgggtgggggggactggggttgctcgcgggctccgggcgggcggcgggcgccgtttcccccctccggctcggcgccggatagtaggtccccctgcggggcgggcaccgacgcgggctcgtgggtggttgccacgttattgctccctcattgggctcccggccgccctctcccgcccacaggaaggccaccggcggaaggcggcctcgcagagcacgggcccgggctccgagaagaccacaagccccggcatgctccgcggcccgccccgcccggagcgctgttccactggcctgcggtagctggcgcttgaggttagcaaatacgtgggcctggacaaggggcacgggaagcttgtcactgttttgggccagtcaagtgtttgtcaccgccaaattggctctaaacgttgtggcttccaaacacttcagggacatttatccttaccgagcgtggccttgtacggctcctccacttgtcttgcaaaacttgctgcacaacccacttccttttttactgaggccgtcaagttactacccatttttctctcccttctgtaatcttgctgtgcttactgttgtgtatatcaatggacatcttattgtatacgctgttcttaacttcctttaccttttcccccaatagactacatttttttttttttctgcggaagggactgtgttgcatttactctgtccacagctccctcacagcgcggcagtactgagtgcccaacaagtcctggttgggatagcttcacatccgcactgacatgagaaataatttatgccacggcctgaggatacaatgcctttttccggaggtcaggaatagttactagatgtccccacagggctattttaggtcttcacacacttagtgttgtcccaatctacaacatagatactttggtactgggagtcttacacaccaaaacaaaccaaaacacaaacttccaaaatttggacctatggcgttaaaacgtctttaaaactaattttcaacgattaacttcgtagaaattccaggtcgtcacagcacagattataggcagggctccatttacataaattatgcaatgtagtcttcatgaggcgctgacctgagactgaagttatgcaaggccactggcattaactttgttgttcattacagcggccttacacaggttgtagagcttcaagacagttctcttatttcccatccttgcacctcaattcagacaaccccaatcaggaggaagttttaaacattgt

SEQ ID NO: 61959 - DNA, 676 bp, Homo sapiens
agcacaacagcttcaatgggaactaataatgatgggaaaggctaagtcattgcacaatacgttcaaatgagtagttatttaataccacagtgccaaaaacatttccactgctataagatagagaatggtccctgatccattggatcttcccaaaaggatgcctgaaagtgcagtatcataaaaggctcaaaggatggctcactgagctcaaaggccaggctaacataacttgttacattatctggttcatgagcactctctatgcttactgccatagccacatgggctatttggaactgttgccctatggacaactcagactgaagaggcaaggtcacagagcgtgcagcctggccccaggccagcacaactggccctcttttcacagggagtctctatagttttttgttttttatcagctggagaaaagtcaacagacacttagtgtttggttgctgataagtgctgatgaaaggaaaagggggaaaaaacacaaggctgggttttccccagatttgaaattcataactattaagaagccaaaatccagactttctcacctaagtggcaaattgtgaatgaatttcctttataaagtgcattgtaaatatgaggcattcactaaatatataactggtaccatgagaatagtagatattaaataggattacagacg

SEQ ID NO: 61960 - DNA, 1134 bp, Homo sapiens
tttcttccctgattatcttggagatatcaattcttaagcattaagtcttgaaaatcttggtggtaaaactgtaatcaagaaacaaagcttgaaaagtgtgaccactcactagaaaacaaagtggaatggaagagaaagagttagagatcacacaaggaaaagcagagacaatgtggaagacctccaaccagaaccacattcacaattacccagtgctgtcatttttgttctatctctacataattagagaattggtatgaatttctagatcaggtcatcaatgtgaaactggggtccaaaaggccaaggtaatgattaagagttgggtactgaagaaaatggtcatagtcccaggacaacaaaaagttcctattttaggaatttaatgtctcaagctctggatatcacagcaataggtattctttaaattcataatcaatcatttttcccaaataatttcatacatttataagcaatgattaattcactgaacaaacctaagtcacaatgggctttttgtttaagtattcattgtcaggaaatccaaatattttataattcactggacagtaatgaacaatgacagacaaaacactagtgagtaaaaacactaattatgttactgtggtctttgtgtggctttggcacaaaaggttgtttatttacaatgctgcaacatcaccttggtaatcaaaagagtggcatatgcgcactggctgctcaaacattaactaccaatgagtcatacttgcagctgagaacttactctgaaaaaatagggggaggaatgctgtgcctctaagttaaaaacaagctctggtgttcatgctcacatttacaaggacacatggtgaaatcttgtctattttcttgtcaattgatcttctttcaaaataaatttcctttttttaaccatcacaaggaatatttttattaataacattggtaaaaatctaaaaaggcaagcttattaaatctttctaacttctttctgccactgaactacttgctgactgctatgtgacagaatgacatcacaccaggccttaagatacgcttgagatacaagggtaaagaagacacaaggcttgttttcaaggagcttataatcttatggcagggagtggggagagt

SEQ ID NO: 61961 - DNA, 418 bp, Homo sapiens
aactgcatataggacctagaaggctttgtgacctttacatgtttgttagaaaaggtactgggagacagaccaacgatggccagcctacctgactatgagtcaacagttggcctaaccagtacaacagagccctcctattcccactcatgacaatgatggatataccagtctcagagattccagtttttccttgctgcttaagtgaaaagcaatttgtatagtcacctttcctctaatgccctccctgtttactcctcgctttcagtgcacagagaatgctgaaacttcaagagcttgcaattttctgtatttgggaagagtaccaacccagcagcacagatgttattcctacctaacaaatacattagattttttttggctctatattgaaaagggaagattggtctgatttggtgga

SEQ ID NO: 61962 - DNA, 1592 bp, Homo sapiens
gcaacaaacccagttccactctcttttacattgtgatgcctgcccacttgggggacattgctcctgtaggacgtgggggcgaggaaacagtaaaggaagaagtgggggaagcgtacggaagttgggtagaggaaagtctcattacccactcttgtgccctaagctccgccaagggcggctccccgcggtacccagtcgactcagaacccccacaaccttcgaagtccagctctgtcccagcggggtgggtagggaaagagggcaatggaagcacgggatagccccagtcaccctgacgagatctgtgccctccttttggctcccgggggatgctccccctttcagagtaagccctccaggtggcaaactcccggtccacaccggctagagtcagtttctcggaaggggcgcctcctccgcctacctctaccccgctaaccgaaactctccacccgctgtgtccctcagcccctccattccgcccccgcaaccctccacagacacaaacgccagcctgcgccccacccgggatcacggcgtcccccacccacgcccaggaaagggccccccaccaaccccctcagacacacacacaccccctcagacttcagcctacagaaccccgacgaagccgggcagatacctggtccagcagtgctgcaaggcgcaaatgaggcgggcgcggtcccctccccgaggcgccaagtgcttctctacccacccgcagcggtggtttctctctttcccaggagcgggagggaggggagaaggcggacgggagggggaaggcgaggagccgaggggcggctggagccgaaccggaaccactagcgcggccccgccctcgtcccggagtcgcagagtaccctggcgggcctaataggacaaactttgggcaggcagcgttaaactgacaccatcacttccgggttatccccacggctgccccctccttagcaaccgcgtggggttgctaagcggaagtgccttcaaagcaacccacccccatttcttctgggactaccagaagatatatcgggagcactgagctctgctttggcaacacgctcttaccttctgctcaagatcttagaccaagtacacgcttcgctgccagaggcacgaaacccatcccgcttttcccttcaactgtactcctccaccaagcccccgtctctatatactcctgctccctcccacccttaatcccgtggctgacccagtggctgttcctaaggctccaggctcctctctcaggtccctcgagggaattattttctgacggtttagcaagcatctccctcttgtggatttttaattgtgtttcaaccagatttttaaaatttctttcaatgttgtgaaaggtttttcatgcacttagttctcctgtgacagcccatgaagccgaatggttagaaaaatgttgtcttcacctacattttgtaagagctgcacatgtttgtgtaaggtctggaattaacctagccaaatggaataggcaaaaaagattcaatgtaactcgacagttattttaatccttaaaacagagagcagggcacatgttctcaggacctcttgagactgcgcctcgg

SEQ ID NO: 61963 - DNA, 1436 bp, Homo sapiens
ggtgtgaatctagtagtcgactacagggggtattaaaaataaacactccatcccggttaacacgtgaaaccgcgtcgctactaaaaatacaaaaaaaattagccgggcgtggtggcgggtgcctgtagtcccagctacttgggaggctgaggcaggagaatggcatgaacccgggaggcggagcttgcagtgagccgagatcatgccactgcactcaagcctgggcgacagtgcgagactccgtctcaaaataaataaataaattaattaattaattaaaaaattaaaaccaccaccagagcaaaaacttacagcgcttacaataccttccacgtgctgttttattttacataaaaccatgacgattaaaaagctggcctctcagctttccgggtattggtttgttttccccctaaactgtcgtttttataggcacttgcactgtcttcttagcagaattgccaatggccttcctcgagtcctacgtttagcgattggcaagaatcatgcactgacagagctcgactccggagggcacaaggaagtagacaacaaagcaggaagaagcaggaggcgcacagatgggcgggatctgcactggaggcggtgcgaccttgcggggcggtgcaagctggcggaacccgcgtgagagaggttggtgttgcgaagggaactagtccggtgcaggacgtggggcttttgcagctcagctggttccggctggggaagatggcggtggctggggcggtgtccggggagccgctggtgcactggtgcacccagcagttgcggaagactttcggcctggatgtcagcgaggagatcattcagtgagaacagttcgggtccaagcggggaaggagctctgggatgtgcactgcctgagcgaaccgggaagcggggaggactgaaaagttaagagagaaatgtgataaaggggctgcagtctgtagtctgtaggcgtcgaattttggcctccacctttgtagtttagtttctggaatagggtgtccggctccacagtctgccggtcgggcttttttcctgggaagacgcccaatctgtaataattagaaatgcaaggctgtcccaggagccagtttcctttctagagagaaggggcaggtcaaactgtatttcctaactttgaaccccttactcttttatttatttattattattgttgttattattgagacggagtctctgtcgcccaggctggcgtgcggtggcgcgatcttggctcactgcaacctccgccttccgggttcaggtgattcacctgcctgagcctcccaagtagctgggattacaggcacgcaccaccacacccggctaatttttaaaaatttttagtagagtcagtgtttcaccatgttggccaggctagtctccagctcctgatctcaagtgatccgcccgcctcgacctcccaa

SEQ ID NO: 61964 - DNA, 1906 bp, Homo sapiens
gagattttgtttcatgccagacattacagaatgtttgtgtgttaataggattgatccagtagagaggcaaaaactattgacatggaagaaggaggagagattggctgaaatggtttatggtgttggaaaagcagagctgttgattgtcctttgcctcaatggtctctaagccacagggaaggaaaaacaggaaaattaaagagatagtaattatgaatgctgctgctctggtctctgtagaattaggtttggagatcttgatggcagcctctggttttatttgtgccaaagcacctcagcatggatcttgtgcagagcttatttccttctaatacccagcaataacagctgggccctgtttttctttggcttctgaagataaaagggataagaaagaagagggtttacctttgtatctgtagccttacttttctaccgtgaacatttgaccctgcctattaatatgattgtggctgatagttaatattaagtttgttttattggctgggtgcggtggctctctcctataatcccagaactttgggaggttgaggcaggagaatcatttgggtccaggagtttgagatcagcctgggcaacatagagagaccccatctttaaaaaaaaacaaaacaaaaacaaagtacatgtcccacctcttccacactgaaagccatggtgtatgggcagggccagatgctagtaaaaatcccttctgttttctccacagcatcacttatcatgtaggacaagagtggtcaataaagaagtttaactattcatgcttctagttacagagaaatttgaatttccttactttttaaaatgaaacttttagtggcttagactttagaaggcttatcttagcagtcaaataagggtggaaaatacaggtaatttcatactttttacggtagttactaggagaaagtcttctctggtaatgaagtctgacccagaagcctatgagtcatatttgttgaatgtgctaaacataagacatagtaagataggaaataatgaaattccagctcagccattgctaacccccaattgttcttaaattgtgattgtgtagccagcatagtcttactctaggttctgtgtctgtttttacaaaaaaagtaaaagtcctaactattcacacagatttgtttttatgataagagatccaaaggaggtttctaaataattttcagaattgctctaaccagttaccttttcacccgaagtagatctggaaagcatccagcaaaacagcttttgcatgttcatacctttcagaatgaatcatcttccttccctttagctagagaagggctatgtgtactgtttctggcagaatttccacagatgttttatttttcttaagtcttccagtgcttcacttgagttgaacctagggggtacctgatgttccccaaggagatctctgaatctcctgactcttggttgtttgtgataaaagagcattccgttctgattcttctgggaggatttcaggtatccttttttttttttttttttttaatgaagttgttcccactataggaaatcagagatggcaggcaatagactgtataatgctgtactaaggattgtagaaaggtgaaggtttgttcttgcttgttgagcataatcctctttacctgtgaaatggaaagtagtatcatcagaatgttgaggtgaaatctgggacatcttctgttctccttaaattcaaagcttgtcccaactatcctgaactttttatttttatatttcacagtttccagacatcagtcaagagtctgattctccatttgttttcatctgcaaaaatcctcaggaaatggttgtgaagtttcctattaaaggaaatccaaaaatctgtaagtcatgattttttttctttaagactagtcaa

SEQ ID NO: 61965 - DNA, 2270 bp, Homo sapiens
ctgttctttgtggatgcccatgttcagatcccctacggccctttcctctctgtggttgaaggacaactacagaagaggtgtcttctgtgttataaggtgcaatactccccccagagacctctctatgaggaagtctgatccagcgagagttctactgcccacgaggggacagcgttaggttcgagctctctaatccaggtttctttgagtttatcttggttctaaccggcacgccgggttttccagcattccctgagctaagactccctaatctgggctccgggtgagcgcgcattccgagacccaggatttcgctccttcatccaggttccgggtttcccctgcgctcaccggctccagactccacacaagcgcggaatccggatccgagggcctggcagtccagtgtccgcgtcttccgggtgactctggttgtcccggatcgcggcggcggcggcggtggcggcggctgagggacccgcggccccggacacagcggcaccggccgggcggggcggagaggcgcggggagggggcagagagccagagccggagccggagccggagccggggtggggtgggggggaggggccgcgggaacggatggcggcctgggccccgtagcagcggcggctctacggcccggggccccgggcgggcggaggtggcggctcccgggaccggccgcgcggtgagtccggagctttgtgtggagccgggactgggggaggaaagaggcggcggcaccgatggggcgcggggctgaggggatctgatgggggccgggggcggcggcgctgcctgacggaggaagtgggggttgggggggctggggcggagcgaggggaaggtgtgtagggggggtcgttgcgtgggtgggggagggggcgtcgaggggcgcggggtgaagttcaaagcgtggccacggccggttcaggctgagggtaggggtgcccgggaggggattagggtctggctaggttatgggagcaggccagagagtttctgaggcgagtctgggtatgttgagggcgctcggggcgactggggccagtcagggagttggcgggggagggggggcgggggcggtggtggttgttcagagcatagggtcggaagcaggacgtgtgcgtgacctaggagtggggagcaaggtggctgggatcctgcagtaagtaggttgtgggtgtgtgcccctaacagtcttcaggtcacatttactcctgtccttttcttcaagatggagggatccctgggcctggacctcaactgctatccttgtacccccgggagggtttgtgaccctatcctgtttggaaaacccatgctgccctcttttccctttatgtgtaattacggttggatcatctctgtgctttgctcagattctccttcctccctctggggttgaggaggaggagacacatctgaccaattaatgtgtgtttgtgaaacaggcagcagcaaacagtcatttcagcttcgaggaattaggctcacacagggtggagagatcagagcccttcagggggaatatttctgaacaaatcacggatgattaaattctctaagaaacagctccctacctaaatgagagtgagaaagatagggaagaaagcctgtctgtttccagccatgtgtccagagcctaaggggttgaggagagtccccaagcccctacaggcctcccttttctgtattaggctttgctctgcagccttgagttaatttcacccctgctgctttgtcttgggggagggagtgctggtttaggctgttgtgaggagatgactgttctgctgccacacacaatagtcgtgtcattttatcgggagcgctaccccagggctgagaactgctgcagcagagataaaccggtccctctcacccgcctattgtgtacacagtgaaggtcataggttcaagtcttgtctgagagctttggatatgctccatctcccaggctcctcagtgccattttcttccttttccagactggggcttgccattggaggaggccagagagaaaggctcttctttttgagtgaggaacaatgcagagctcattggcacacatttttcagaagaataagggatgccagccatgttgtgcctgcctctttggctagcctgtactaagttgtgaaggaatagtgtctggtagactcaactacgatgtttgtttcagacccttaaggaagaagacttcaagggaaggttctactcttagttgaatcatcatatttaattcttttatatgaatggaacac

SEQ ID NO: 61966 - DNA, 434 bp, Homo sapiens
cacctggctaatttttttatttgtttgtggagacagggtcttactatgttgctgaggctggtgtttaactcctggactgcagtgaccctctcatctcagcctcccaaagtgttgggattacaggcatgcgcccctgtgcccagcctatggcatgattttagaagtggtttatgactgtatagcctcttcctgttcttgcttgttttctgagcctgattctccagacttcctgggaattcagtgagtcacccactactaacctttcatcttttgcttgaatcaactagggttcgtttctgtatgcaactagggaccttgagttatatagtttctgaattttgagagtaaaaaccacaatacatattaaagaagtgcaccatctaaccagggagatgggacttaatgaaatactagaactggccgggctcagtggc

SEQ ID NO: 61967 - DNA, 679 bp, Homo sapiens
tataattgtgaactgaaagagatcacttttggctaaattatagagctcagctcattttcaccttttcctaaaaaggtgactctaggtaaaaggtagctgagcagaccacagcaactcttgttcagtttgattattttaaactaggaaaccaggtaactgcagtagatgcctgctattatgagggattagataggagcagtgagccattgctcagctcctgttcagtgtgggggttccccagccagttcatcacaggtatcagagggcaaacactgtgacaggagctgtcaggaggactatacaaagagaaagcattattgacatagcaaagacatgaggtgacctagatgtttgtaagccactctggcagctacagctgagggagcaggcctggttagagatttctcacaggtgttctccagacccgaacactgtagttttatgtagattgctcccctcttgggaaggaagtagagctgttttgtttctattcacgtgttatgtattacctctctcactatctcattaaccagtgttgtcaccaccacacccaactctgtgtactaaaatttgttgttcagaaattaaaaaaaaaaaaacttaagacatgaaacctgagagcccagtttacatttttcttttatttatttatttacttagagaccaagtctctctctgt

SEQ ID NO: 61968 - DNA, 888 bp, Homo sapiens
aatagtgatgtggtcagaacacacactcagatgtgctgggtgcaggctatgtgctgggagaggaggatacgtgctatgacctgagtaaagaatccaataatcagacagattatagcaggtaaaaggctcctaaaagagctgtcaccttactggccaccttgattttcggatggacccaacagggctgtagatctgctcaactgtctttgaatccaatttagtggttccttagactgagatgtagttcattccctaggccaagggcaagtgaaacagagaaggaggtaaattgtgtgtgtgtgtacacaccacgactcagcaacaggcctgttccccagccaccacacatcagcctcagagcagctggaatgcactggatacatttagcgggtattgcagtggtgtgctggggccagctcacacaatcgtgcacatctcttgccaaatatgtgtttaatgatgtcatgttggtagcctgaattggccaaaggaggagtatttacactgcgaaagtccccaaatgctgtaagtcagggcttttttttccctgaaagccattgtaaaacggtgtgaggtaactattcttcacactgtcctttgctttatatagcatggcatgccaattttggattcttctaaatgaagagcaacaaaactgaattcacacctaacatggcaatggtacagtaaccaaaggggcagtcctattagcagaactgtatctgcactccagctgaaaatgcaagtccaaacccgtcactgctcagctcctagggtctgttctctcaaagatttcaactgggggcctacaagtatacttggaaatttctttgagaaatggatttcccagggaagtgtccatgggtgaggagcagcatcagtatctag

SEQ ID NO: 61969 - DNA, 1806 bp, Homo sapiens
gcgctgggagactgggaaaatggggcctaactgggagaggggtgtggagaggggaaggtgggggaaagatgaagctgaagtatgggaccaggaggaagaggctggacatctgtgtaaggactgctaggcctgaagagaatggggggagggtgatgagtgggggtaaactgagaactgaaggatggaggttgactttgcggggggcagtgatatgagaagagtctgggtggggggtgcagttttcatcagggagggaattcaaagggaagggtgaagtgacttataaggggagtaagaaagatttgaggaagacaggaaacaatttggggaatctggatgccggggaaagcccagtttggggaatggggcacaattcggtggggctgaaagaaaaaaggggacttgcttggaaggttgggttccggcttttgggggctttaggggaggagaaggcccggatgagggggatgggcccggctgaagagggggctaaaggacagaagaaggcccagttgcagggctgaggaccggactagggtggctgaagtggtgaacggacctggctgggggcggatggccccgctgcggggggcgggggccggctaggggtacgtgagaggccctctggagcagatgagggaggatgggggcggggagcctgggccgggccgttacctgtcctgggtgtttatcatcctcggcggctctgctcagggtgggaggaggcggcgcagggagtggatagatggatgagtgggtgggtgtggggtcacgcgcgcggggtcgatctctgcgggctaagtccctgtcaggccgcgggccgagcgcctccttttgcctcagcgagcgcctgcctccaactgaccctccccggccgccaccgccgccgccgccgccgccgccccgcccccgagtgcctcatctgcatagccccaccccagcgccgcgcggtgtcctgggaaactggggcccacaacaaagggcaaagcaccgccccgcctccgcgcaggcgcaccacggaccgatcgtgggggtagggctagggggtccgaacgaagggcaggctgtgcaggaggccatgaccaaggcggtgggtctgcccgcagctgcggcagcgcggcccagaagatgcgttgtgtttccggtagttttctgtgaggattgactcaacctggtcctcatccctattccttgttggcgtggggccgaacagggctgtgccatttgggaggatattaaaacaaaatcagaaatcttaagagaactacacacatattagcaccattcctagtctgagtccaggcccacagatctgttatctcagctcataatgcagatcaataacctcagctgtcagggtagatcaacaatctcagcatctcgcacacatctcatgtcaatcgtcaaggctgctccaagcactggcttaggtcatctgaagccagaactctgtagatcatgagcacagtcacaacaagacagtcgtggaaagcgtcgtcactaacttgttcacggtcacttcagatcacaatcagtgcaagttacttcaatcgatcatgcaaggttactagttcagtcacctccattcattatccctactggtccttatgacagattagtgcctgaaggccacagtcaccggtgcgcagacccctcagatcacagtccttgtaggttacaatcacagacacttcaacacaatcatcaaaagccccgactctgttcacagtcaacccagattgcaatcaagagaggtcacattatctcagatcacagtgggtcactctgtcacctcagattacatcc

SEQ ID NO: 61970 - DNA, 1284 bp, Homo sapiens
gagacgaggtttcaccatgttgcccaagctggtcttgaactcctgacttcaggtgatccacctgcctcggcctccaaaagtactgggattacaggcatgagccaccgcacccggccaacaaataattattgaatagctacttactgtatgctccaggcatgtgctagagtccaagaatacgccataatcaaccaggcaaggttcctgccttggatgtcacaatccggtcaaggggagagacacaggtcatcacaataccaggtaagtaagtgctcaatctgaggaatgccacagagaaagtaatttagggaattagggacagctttgcagaaagagtgataactcagagaaagggtgacactccagatcggcggtcactatgactttcagttcacaaacatctcacattggagtcatctcaggatatggttactctccttcacaaacagcatgcttttgggttttggatgatggggatggaggcacagaaggaaggctggagctaccaagctaaggctttttcaacacaaattaaagtggtaaatgataccgaaactgcccggattatcactagatattcaggcaaggctggtctcatactctggttcactttaagatcctccactttgtccctcagctatccctacctactcctccaggttcaagtcaggtatgttcttacattagtacttagcaaaattggacatttaaacccagccctgatctaccccatcgcatagtcccagagacctgggcaatcctcctggaccctcagagggagctggaatgtctcacttctgccagcccattcctggccaagtaaccctttaacctgaaggacagtttttgacccatgaatcaacaaatattgagaactcactatgtcaataatagcgaccatttattgagcatcatgggtaaagtactaaattttagaacagctctccaccctcgttttaaggatgaagagaattaaacctcagagagatttattctgtcatccaatatttattgagggtctgtctataccagacatgttaacatgctagctttaattcaaagcgattaagtggtatagttagaatttggatcccaagttgcctgatcctgtgctttctctggatctgcatggtggaagagtcagaagctctctggacagctttctgtttaaaggagtggccaccctgatagccacctggtcagcaagtgaaaaattcacaaaaactgaggtcttcaaatctaaattaattaacatgaaataaagttaaaagttcaattcctcag

SEQ ID NO: 61971 - DNA, 2241 bp, Homo sapiens
ttacaggcatgagccactgcacccggctgacatccaggggtttaatcagtgagatggaagctgacttgatttcctacgatagtcgggacacctgagttttgtgtcaagcccgcataaccaaatgagctccgcacatctttctgcttctgaaggctgaagcttctccatctgtgaaccgaggcaattggatcaaatctctctgggcccaatattcacttttgtatccccagtgccagcagagtgactactagcatgcaagtatgcacaaatgcaggaggttctccatgagtgtttgtgtttgttagtgactaactgcctgactctgcctctgggaacagaggcgcccatagagtccacaataaatgaccccaggcaaaggttaatctggaagagcaaaagggaaaaaggaaaaaggtgggggcgtgtcctgaatgcgtgacactggccatcagcccttatgcggtagagaaccatggaatgaagttcttctaacctgtgaaagtggcgtcttggcacgattcacctggcggccgtagacaggagagatttcagacgaggtttgtgagcatcttcaaccacgagagggcgccccaggatcacacagtcccgccagctcccaaaggaaggaggctgtgccagaggcacctgcctagtgctaagtcttaggtgagcagaactttctccttggtcaccactgggccaagacaaggggcctgagatgtaaataaaggtgagcataggagaaggaggggccaaagagagaaagggacttgctggggccacagagcatgtctacaggtacatcaggacatggaacgagacccaggtggggtcagtttcccattaccttgaagaggaaggcaatgcccgatctagtagagaggaaaaagctgctctgtagtacaagggagatgacggtggttagcaaatgtctccaatcacagggaagaaggggccagaagccaggtgggggtgtgtcctgaatgagtgacactggccatcagcccctatgcagtagagaaccacggaatgaagttcttctaaccggtgaaagcggcgtcttggcacgattcacctggcggccgtagacaggagagatttcagtgcgtaggccctggggaagcgcatatgaatggatacttgggagtgtggccttgggggagaaccctgggggaggccactgctccaaaaggaagtggcttttgctcctcccacccctgcccctccccccagcccctctccctccatgtctttctggagacacaagttagtttttaggaagcacactcctgctttcagtaatgagaacctgggtctggaaagagacacaggcccatctgagaagcctctaatctaagagaccaccttcagcaggggacagagcctgagggtatcctgctctggaagctgcagtcaccctgaggtgggagatgaggcatgttcctctgtgcacagctcttacaccacccatgcagttctgcgaggccaagcacagaaccacgataccatgggacccagagcagtactctggacctgtgggtaaggtgggcagcagcccagcctccggggaaagagaggagcggaagtttagaaccaataacccccagctttccctgcttgagtagctccacagcccagactcccacactccaggctgtgcatcacctgagaacagaaactgtgccttatcctccatctcagcaccaaacacaggctcagcaaagggcaggggcacaaaaaatgtttgctggaaagaatgactggacaagagaggatgcaaaggtcagtcagcgtgctccttcccccttgagggcagcagaccagagctcagggctctggctcagctcatcatgatcaaacatgaccttggcacctttctgaacttgaacttcctgtccatgggatggaaatgatccttcgcaaacagccttcccaggacagcttcgaggatcagggcaggactaccttgtagcagcctatggacttagctctttccttctctcttattccacttggtaatgttaagtgattgagaacaaactcaattcacctcaatttgccctcacatattcaagtggttgcagggtttttctgtttgatggtttttatttttgttttcagcctatttctttttcatttttttttcttgtgagatggagtcttgctctgttgcccaggctagagtgcagtggcatgatctcggctcactgcaaactccacctcctgggttcaagcgattct

SEQ ID NO: 61972 - DNA, 1850 bp, Homo sapiens
ttaaattgtgggctcacctctgccaaagcccaggttctggggctgtgaagaaagcccgcccacccccatgacaacagctcgcaggaaccgaggagccggccggcccaggcctccaaggtcacggggagggggtcagggcggaaaaggcagtggagtgagggtgccgccctcgggccgtgctaatcccgctccgctccgtgccgccgaggcggggtcctggccacgcaggaggtgcgcctcggaggagggcggcgagcggctacggggtggggagcaaggggcgcgcgggcggcaggcatggaacggacgcggcgcatctcgcccaccgcgggacgcccggacggcggccggcgcgcgcggcccgcctcgagcccgagagggcggggagacaatgcctgtccggcggggcagtccaggccgcacgctcccgcccgcggacacgggccgctcctacccgggcgagagggcagcggcgggaaggcgccgggagcgatggccaccccggccccgcgaggcgcggcaggccccgctcgccctctcccgcgcccgcctggcgtgcgcttcacccggcaagtcccggggccacagacccacctcctcctccagggcgccgccggagcccgcgccggagccggtgccggtgctgccgccgtgctcgccgtccggcttcaggttgctcatggtgcgggggagggggcggcgggaaggaacgcgagggcgagcgcggcgccggccccgcgggaagtgggaaggggcgcggggagcggtgcgctcgcgggtgcggagcgggtggcgggggacccacggggcagtgagaggggcagcctccgcgtcgggccagggtcacatcaagtttggcgggtgcggaaggtggggagggggtgcggcgggggaggcagtgggagccggaggggccgccgcctccgccttttcactgcgaccggcgagtgcgccgcggcggcggcggcggcggcagcggcggcggggggcgggcgccgggggagggggcgggcgccggcggcggggggcggggccggaaccggcctcagctggggcccggccagccccctcccccgcccgccgcgcggtctccgggggaacgcgcagccaatccccaccgcccaccgtgggctcgccccggccccggccgcggggcgccggcctccggccgggcctttcccctctctctcgcctgggtcagcgctctccctctctcctcttcccccgcgcccttctccacggcgagtttttaaactttgatgaactcgcccggcgaactttcttaaaggggccgcgcgctgcgcgccccagcccgcgggaggtggagccccgtgccccgcacccagcgccccggtccctgggcggccctgcccgggcggcctcgcgcttagggcacccgcagcgaggtttccgggccgtcgactccccttgtatcttgatctagggttttggggttcccgacgcactcattctgcccctaaatccagtcgcgcagacctcagctccgggggaccgagttctgggggtgatggccggggggagggggttgggagacacctgagctttggcccgggctgggcgctgttttgctgagtgaccttgaggaaatcacttcccctctctggcctcaggctcccagcccagagggtgggacttaggatctcaaactcccttcccactcccagtcactatctgaataggacttaggtggggattcgagtgttgggaccccaatggtcattagcgagggctgcctcgaatgaccaagaaggttctgttgcccaccttgccctcaacacgcctggctttcgggtcttctcgctcctcccccgacctcagtgcccctcaca

SEQ ID NO: 61973 - DNA, 715 bp, Homo sapiens
ccctgtaatcccaatgctttgggaggctgaggcaggagtattgcttgagctcaggagttcgaggctgcagcaagctctgactgcgtcactgcactccaacctgggtgacagagctagaccctatctcaaaaacaaaaacaaaccaacaagagggttaatgagcacaaagcagataatctgatggaagattatttaaaacttccctgctctacactaactcagcccccacctcctaaagtgtccatgcaccccccacctaagcccagagactgggagacaaaggctctgcggttccctgggaaaggactgaatgaccaattggcgccacctagtggtctgcagtgcatggggagcgggagggcccggctgctccgggattgggggttaagtaagatcattagcccagtgcggatgggaaaaatataccaggacgtcagaaaggatggggtcaggcctagttggcaccccactgaagacagggtgaaggagcgcacagggctcagggttctattctagttccagttctgccactaagaacctctccaggcctcagctacctcctttgcagaatgggagtaaacattccttacctctcaggtcactgtccaagcctttgttcacttatgaaacatttaatgaagcatctgctttcaaaagtcatcctgctgagggttgtgaggacacaaagacatctcagctgtgtctctcgggatca

SEQ ID NO: 61974 - DNA, 1091 bp, Homo sapiens
tgagagccaggggcgggccgccccctaaagggaccccggagtcccgactctcagctccagctcttcctgtgacaccaccctccggacagagacccaagctccaggcccggccccgcccagaggttccagggagaagaccaggccaccgcccactgcccggcgtcggggaggaaagaggaggagcctctgtgtgcccacatctctggccgcccagggcagctcggctcggtctcgcaaccccagcccactggttcgggagacctcaaaggctccaccgccagcgcccccagcgctcactgtgtgcgccccaccccagccctgcctgcgcgccgctcccgccaccctcgcctcagtctctgggccggaagccccctctcctcccccgccgcagccccctcctagtccctctccctccgccgatgcgggaaaccttctccgccccgtcccgccctcttcctccagttgcatctccgcccggctcctccgtccagtctccaacccaggccccgcccctccccacccatttcccgccctgggccgggcccccggccccaccgccccctccccggccccgccccggcccccggaagcctcaccccgcccccggccccgcccccccgaagtttcttgggcccccggcagccggcgggacagaacgcggagagtcgccgcctggccgggcgtagacgcggtggcagagcccgcgcggcgctggaagcgagtggcggagcggcgggacctcggcggactcgccatggaggaggaggtgagggcggggcccggcggggcgttgggctggggtcctcgagcccctcacggggattgcggtcctgggctcaggccctcgttcctgcccgccccactcccgccagtctcacctcaggaagagcctgggcaaatggggcaggggcgaggggctggatccatatcggggacttcgcagaccgcgtcctccttcattctcgctgactttctcaccagttgtggggcgtcgtggttgttaccgttcccattggattgaccaggagactgagactccagcgagattgatgacttgctgaaagtggcctgggtgactgggctcgaacccc

SEQ ID NO: 61975 - DNA, 590 bp, Homo sapiens
aaaaactgtgcgtccatactgatataaataaatgattgaataagtaaatggaggagaataaacaaatatcccatgcggaagaatttcaaataatttatgtagatatcatgctctcaaggaggtgaagcagaacctcccaacaccttaagtacaggctgtgcatagtgacttcctgccagaaagtgcagtacgggaagaggaaaagagtaaccttactctggggaaatctgacaaacactacctcagccaggtggtcaaggccaacatcaacagtgatgagtcatgttggcagtatttacccttgataatggtgtgatgaaaatgatactttatctctgtaatcctcccccaaactcctaaccccagtctaattccgagaacaacagcagacaaatcctggttaggagacattctacgaaatacttgacaagtaattctcaaaatgtcaaggtcatgaaaaacaatgaaagtctgagaaaccagcacagccaagaggagcatagggagacatgacaactaaatataatgtggtatcctggatgggatcctgcaacagaaaggatattcggtagaaactaagggccagacgc

SEQ ID NO: 61976 - DNA, 647 bp, Homo sapiens
cagagggagagatcctgtctcttaaaaaaaaaaaaggcaagctgaggtaagacaagtgctcagcagagtctggcagatgttaagtgtcctagaaatattagctattattattattcacggcatcctagtttaatttttgctttcacttttggtggtatttagaaaagtacattaactgcttaaacatttgacaatgcaaatcagtatttattctactttcatattaaaaaactcaaggcctccaggctcttttttctgagagctcctcactagcagggctatggactccacagtgtcactctgtgggtggcagcacactaaccagggtcactggcatcactaggagcagataaatggagcaaggcaaagtccagagaggcctaacagttccctttggacttccacaggtcacagatggtgataatgtatctcacgctcatgtttttgtcctgtgtatcttgccactcacattttttcttttcttttcttttttttttttttttttttgagacaaggtctggctctgtcacccaggctggagtgcagtggcacgatcacagcttactgcaagcttgtcttcctgggcttaagcaatcctcccatctcagcctcctgagtgtccgggactacaggcgtgcaccaacacg

SEQ ID NO: 61977 - DNA, 1536 bp, Homo sapiens
gaggtcaggagatcgaggccatcctggctaacacggtgaaaccccgtctctactaaaaatacaaaaaattagccgggcgtggtggcgggagcctgtagtgccagctactcgggaggctgaggcaggagaatggcgtaaacccagcagacagagcttgcagtgagctgggatggcgccactgcactccagcctgggcgacggagcgagactccgtctcaaaaaaaaaaaaaaaaaaaaagttactccttaatttgttgaatctttgtgccaaaaggagctgaaccagtgtaggtggagacaaaggaagcagcataaatgtctaacttataactccccaggaaaacgagaagaggaaaaatgagacactccggtcccgctctgttcctcatcccccgtttacaaaccttacacctggcccacactcagtaacaacaaagacatctatcactttcaggccgaggtcctgtctccaaaattactggcctctgctcacagttcttaaaagtttgctgagaaaaaaaaaaagaaagaaagaaagaaagaaatgttcctgggctgcagtcgtgtagccccaggatgggtttacaggaggatgccccggttaagccctgtgccgcccccacctcccgctggagactcacacacagctccccgccagtcccaccggtgacagccacacaaaggcagggtcacaagcacaccgaccaccccacagcccagattcggccccagacacacactcacaagggcacgtgatcacgtgcgtggtcacatggaccggcccactcagaacacactcacaaagtcacaccaaccaaggcagccacgcgccacacacacacacctacaaccccgcataccgcacacccagccgcttcccagggcttcgcccaccctcacctgccgtggccgcccccacgtcccttcccctccttcaggaggccgctcttcgctccagtacgagcgcgggccgtggaggcggctgggcccgggtcggggcgggcggcggagcactcgggacccacgggcacagcaggctgcgcggtgcgtgcgggaggccggcctctgagggggcggggcgcgtggccgagcgagcttgggccgccgcgctccccccgcccgaccgccgctcagctggcgcgagactcccgcttccgggttctcagagggcggggccacgtcgcgaggaaggggcggtgctgcgtggccccggcggtcgccacggcgacgggcgcggggggaggctccgtgggatgcttggctgcggctggcgtgaggagagggctgagttacgtctgggtcagccttagttctgccctacgtacctaggaggaggaggaggtggaggaggcgcctggccccttgggacctgcttcttctttcagttcgcgttttctctgtcgtgtacagctttggagggacacctttgggttccagactttgatgaacacaactttgtatactcttttcttaggaacattttttttcctttggcacaaccgtagacgctctccgtagtcctccactcaaagcctc

SEQ ID NO: 61978 - DNA, 1201 bp, Homo sapiens
ttcaaataattttctttcccagtaaacaaaacttgttaaatattatgaatactaaatgtatacctaacagttctgatttataaatttattcttttgaaaacaggtcgtttttggactatgtccttgtatacaaggagcacagggggagcaaaagagcgagacacgggtgtgccgaaggatgggggtcaggaggaactgcaaagcagggaactttgaagtgggacctggttttagtccgaaccacctcggctgatgaccttgggcaatcgcataacctctctgagccacggattccccacactcaaaacgggcagggaggccgtgggactggcccgggggatgcaggcagagcgcccagccccagctcggcacagcgtgggtggcagggcgcctggagaacccacagaggcggcggggagtgaggggcgcagaccgcaggtactaggcgcccaaaggctgaccggcgggaatggcgcaccttctgggagccagaagacgccgagatctgggcccacaccgctctgccgcccatgctttccgcaaccagaagtccaaaaccctcggggccggccgcccgggcgcggcctggaggccttcagcggccgggtccccggatccctggcccgggtacctggcggcgtgcagcgcccgcagcgcctcgcgggcgaactggtccgtgccgaagaagagcacccgccagggaggcttctcgcggactctggagtcccggcagtcctcccagccgagtcgggccagtgctcgccactggggactcggcctcccacgcctggcgccatgagccagcggaggaccccaacagcgccgcaccaacaccctcatcgcctcggccgccggcggccggccctgcgcaggcgcatcggggcggggacaagggtgcagcctggggagggcggggcttgcctgcttggaggcggggtctggttggagttggtgaacgaatttgcccgctacagcggccctagatttttgttctgtttatttgcactatgtagccaatcctccagaataagtctttcttttctttttaaaatcgctttatttatttatttatttatttatttatttatttcagaaagggtcttgctctgtcgcgcaggctggagtgctgtggcgcgatctctgcttactgcaacctcactgctcctgggctcaagggatcctcccacctcagcctccggag

SEQ ID NO: 61979 - DNA, 1593 bp, Homo sapiens
aaactgaagtgatgagacaagcaaatggagacgtttagtagaaaactggaatgcaggagtggcctccatgactaggggctgggagagctgatctgggaatgggaagaggcaacaagcatttccacttcctgttcccgtcatctcaccccactccatgactatatgggtatttctgcagggtgaggataactaccacagaacagaactccagttagtaaggtggccaacgcctaagtccacaagaacccctgcttgtggcctaggaggcaatgccacatttgaccaggggaaggactgccacacataggtgtcagcccagtgccaggggcaggaactgacctcaggggcacagtccagtgaagccttttgagatgcagttcctagcgagccactccatgtactgccatcgcctgcctgtggttgtatcagatgcccgcaaggaggtgctgcccaccagcctgtcccgtcactgagcgtgacggatagtccgtttgctccagtacctctgacagaatctgccctctgtgttgttactgccctgtgtggtccagtagatgtcactccctaacctgtccagcctctctgtaaatcagggccggggatgaaaggccacacacagcagtgtgggtccacaggactctccttgataaggagagagactggagaggttaagggacatctaaggggtatcaggaaccccaggaagcgaagccagatataccacaggtaggagaagcagcctaacaatatggacgtttcctcattgctgctgaggggcatcctagaaaaccaagagaatatttcaaagtacacttaaagagatcaaatattaaaaactttagttcccagccctttacccccagcaaaaatgctagacagtgttaacaaagctgtatgttgttaacaggaggaaagactagttagtaaaatagctacagctgtggccagttcttgttcttggacacctatgtttatatcggaaaacactttttgatgctgttctctgaaatcaggctccacatatggagtgataaaacagaaatccttttttaaacaaaaccgcctttgctacttcctagacagccactagatagcaccacagccttgcttcctcaccctttaccctcacgtgggactcaaagaagagcgattgcatgcaattgattagctccatagtttctaatcagctgctcactagcatgcttcctttatttaccaggttcagaatatgggaaagagaggctgaagctaccccaaggaagttttgtatagattgttattgtgaatatatatcatgtatcctgtgtggggtggtagcatatttctgtttgtatgtaagggctatcaataaatacacttctaagaaaatttttcctagaagtgtaataatttggttggttggagatgcttgtggtatcctctttacattttacaatatagattatcattctctggagatttgccaaaaccttcaggtctataatacatccctctgtgggggataatgatcatctcagtccttatgtaacagttatagaaaggctcatttgcttatatcctgctctcctgtgggaatcctacttgcctccaatc

SEQ ID NO: 61980 - DNA, 1920 bp, Homo sapiens
ttatcttttaattatgcttttgcttacttttttgttggctatctcccctggagtttgagctccaatggagcagggccctcacctgtcttatttaccatgtatctacacagtagatgctcaagtaacatttattcaatgaataaatgaatgcattacaaaatgaggaggagctggagttccaggcagcccctagattccctgttgggtcttctttcctctgccccatgcacacacagtacacactgttgactaatgtttaactcatagaggagtttgggcttgacatgtgacctcactcagcctctgtttcatttgtgaagtaagaaataagagtgggcggctgggcgtggtggctcatgcctgtaatcccagcactttgggagtctgaggtgggcagatcacgaggtcaggagatcaagactatcctggctaacacggtgaaacaccatctctactaaaaatagaaaaaattagccgggcatgatggcacatacttgtagtcccagctactcaggaggctgaggcaggagaattgcttgaaccggggaggtggaggttgcagtgagccaagattgtgccactgctctccagcctgggtgacacagcgagactccatctcaaaaaaaaaaaaaaaaaaaaaaaaggagtgggcttatttcacataagcccactccttgctaaaccaacaatgattgcctaagatgcacggagccagttggtggaaaagtccatagactatcagagttgaatggtgctggtcaggtgggaggagcacctcattcctgcttccccatcaagttacttgccttggcctgcttcctactctctgggtcactggtgctcacacagcctttcccaacccccacctccaaaggtcatattttacagctccttgtgaggaattcacatcatgccatgaccttcactatgagaaagcacaggctgtaaaaggccagcctggctccctgctccgtggttaaatattgatgatattgggcaatagagacctggagtgggcacactacatatccccctgcagtgatggaacccacagaccgcaggtcctctgcagtccattctcctgcctgtccagaggatccggatgttttctctttacttgaggccaacacataacaatgaaagcactgggctactggtgctttcggattgtgaaagtcaggtggagcctgtttgcactctgagtgcactcattcaagaggtcagtcaccctggagtgatacagaaggctccaggcctgggcgtgtgctaaggccagagctaccagatgggtccagctgccgcaggctctccaggcactgtcccctaagtgacagctgttactgcctgggagagctcaagtgcaaagactatcctgttctcccataaagaggaggaaaaggaagatacagaaatcggtgctgctcccaacagcagatcaaggcagtcgtcaggaactcaggatccggggtgagtgtcctcatcttgccttggggatgggtggcccaggtctttggcagaagtcacagtccaatggcacgatggttaagccctgtttaaaatgcagagatctcccagaggggcttaaggagacaagacaactaaatgcagtatgacatcctaaatgggatcctggaacaagaaaagaacattaaaggcaaaactaacaaaatgcaaataaggcataaagtttaatttaatcatgcaaatgacaatatgatgctcactttagaagcaaactggatacgtgctttgatagaaatatgtctttggccgggcgcagtggctcacgcctgtaattccagcacttttggaggccgaggcaggccgatcacctgaggtcaggagttcgagaccaccccggctaacgtggtgaaaccccatctctactaaaaatacaaaattggccgggtgcggtggctc

SEQ ID NO: 61981 - DNA, 2189 bp, Homo sapiens
gaaagaactctggggctccttatgctggacaacctacagtccctcccttttatcctcattgagacgccaagtgttggaaataccccttcctggggcttctgtccattggattattttaactagattttccttggataaactgtggggtttgtagcctgggccttctgtgaagtcagcagatgacaggagggccaggctctggcctctgaaactgcagccgccctgcctttcccgtccaccaggtggcacaaggaccccaggctgtcattccgcaggctgttctcgggcctgacattgacagagccatccacccagaccatccactaaggccacagctggcccaactgtagctggagcaggaagggctgatggcagcaggatagacactgcaatttcttcctacttaaggctgaccccaggtctctgggttgtcacagtggctgtttccctctacggccacagacgcggtggttaccatgaagaccaaggcctggagggaacagaagcagcatccctgcctgccactccagctcacacagtgaattgagtgtagggacactgcttggtgctggaggcggggtctgctgtccatcagacggaaaggctggtggtgagaagccagtccctgtcctgctgcagtcctgtccagccaccgagcctaggcttcctggggagggggcctcagaagatcttgaagcccttcaggagagtcagggtaggcgccttgcgcttgctctgggcccgggatgacttcacggtgaccagcttggcctgggccacagtgggcatctccttcaggttgatggtggagagcgtgttgaaggtgcagctggccagcccatgccgcgcggtgagcggggcctggtggggcagggccctctcctcggagatgaagaggggccgggtcagggggctcttctccagctcccgccgtgcctctcgcactgcctcgtggaagacatgctgcacgtgctcaaagtccagacaggcagagacctcgaaaaacaggcacccaaacctgcctgccaaagccacaccctctgccttggtgacttgcctggtgaggaagcagtgtgaggcagggagttaggagcaggctgtgccaagtcaggcagaccagctcctacacccagcgccccatggactagctgggtggcctggggtcatcttcacctctctgagtctcagcgttcttatcagtacagtgggttactgccctctgcctctcagggttgttaggattacgaaagacaatttgtttcaagtgcttagcacagtacctggcacagagtcagtgctcaataaatggtagctgatgtcacccaggccagaattttgggatgagggtaagggtaagaagctactccaaatcccctatgctagaccctgcctgtggctggaggaagcaggccattcccagccccatctcttctctaccccatcgtgggtccctggggcaggaaacaggccacccacagctctggcttgtgggatcagctctagagagaagcagtcgtttggactgaagggttagaccacagaggtgactccagaagcctgtggttggcagagttctcagggctcctggggtttgtgtttgtgaaaattcattattcaagccctcacaatgacaaagttgcagattcaagctcatcataaaagcaaataataaaaccagggcagaggcaggagagggcaggggggacaacatttcatggtgaggagggcaaaaggagagagggggcaacacctattctgccttggtcctacaccacctcccgtgaagggaggatagaatatccggaacttgggaaggtcctggaggcttctgacctgaaagccatgggaatcgaggcgggaagaaaaagaagactggccttgcataggtcggatgtctacaagagggaagagatgggggggtccctgagatcttggggccaagactccactggctggatcttcctgacctactgctgagctgtcccgctgcccattcccgaggataatggcacagccactagatgagaggaggcactcgagtgggccatggtgggaaaagtttctgagcccaaggctgacctggcaggagcaggggctgagagtgggctagcttcccagagtgccactccatggtgaggcacgcggtctcagagagagtgagtaactgggacaaaaaagagtcagaggca

SEQ ID NO: 61982 - DNA, 1566 bp, Homo sapiens
gccgtggtgccagtaagctcaccgcttcctgaggaacccttttggaaagaacacttgctattatttgcttttatgatgagcttgaatctgcaactttgtcattgtgggggcttgaataatgaattttcacaaacacaaaccccatgtgtgcgtgcatgtgtgtgagtgggtgacagaggcacagaacattgtcctttttcttattttgttgcatcctagggaaaattttatcagtggcttgggaagcatcaacctaaccgacattttacccttttaacagtgagacagtcgtgggagacaatggccaatgctcagctaaaagttagacttcctgtgcttcccagaatcctaatctactaaacttgggacttgatcgaagaatgaaataggaatacattgtcctgagttgtttttagggaacgggtgggatcagcttcatttgagcatgtatgctttgttatttgctcccaaaccattttagacaatccctttggcaaagattggggtcaaaagagtgatctgtgcttttttccctgtactgaaaactggcctactcacaatccagtcttctgacccctaagagggtctgcaattcctcaaagactaccttcagcagctttcaggtcacatgacttccctcattctctgagacacaatttgcctaggtctgagggcttggccacctttgaaggcctctcaccatagtcccctttcacggtcccacacctctctttttcccacggcccatctgacccgttctaaacaaagggtcccttccttgctaacaccagtcaatgtgcccttggggcctagggcagcaggactgaccaaccgtgaacagggagggatgagtggctggtggaaggggctatcccttgcaggtagactggccacagaggacaaaggtcagtgctggagaaatccagtggcattactcatcaagttcaggcatcacagtgtcaaatgcttcagggccaggcgggcaacttgaatgtgtggaaagggtggaggtaaaccacggggagtggtgaggcctggggtcggctggagagagcgtgccccacctcaaagcattccaattctaggtcttttaagacactatgccagccaagcaaaatatggctgcagtattcttcagtaatgcatcctctggcccagtctctgacctccgattcgagtccaaccctttctaagagaacctgccctcagcccagccaactgtgggagtgagagtgggaggctgcgtctgggtgaggtgagagccgattggaccagagcagacacctgaccaaggagcccatcagagcctctctccttagaattggaattgggcactagaccagtcagctgctgggagtgagatcggaaggtcagatagattcatgcaagaagggtgagtccaagagaatccacagagacccaagagcgcggaaggagtggccactcttctgactttcagggtgcagttgctgtgtgacccagaagcgtttcccttcaagtccttggctgcctggaagaccaacatctaccatacccttacaacataatccctgtggtcgggcacgg

SEQ ID NO: 61983 - DNA, 1276 bp, Homo sapiens
ttttttctaggaaagttcctctacacacacaccccattcagcacgcagattcagcagatggagacaaaggagttagtctctaatggtatttgggcacctgggcccttcagatcacacactcatgcgtacacacacacaattttgccaactctataggaggtcagaaaccattcgcccaacatgcttctctttccaggtaacatattttcattctaacaggagtcttacaaaaatacgcctaactgcaaagtcctgattagcaaaggtaatttcaggtgctcagagagggagctagcactgggttgcggtggaaacgagggactgaggactttgtaggtgccactctgcagagggacagtgctgcctgcctgccagctgattttgcagtcaaatgctggctctgacagggacttctgtttgaccatgggtaaattccttaaagttgctgaaatgaatgaaggtgtctcaactctaaccggagatgataattccaggagggttgtcctgagagtgaaataagagcttctagaccagcatacgcaatcctcaccttccaagttccttgccctggttcctcttcacactttcccctccacccattattgacacccttactgtttggaaggcacagttttggtgaatggactgtgttccagcagtctgtgcttatcgctcatgacacagcaggatggcatccaggggacctgggtccatattccagctccacttgccagctgtgtgatgttgggcaaatggagatgatgatgagagactgttatagagtctctgtgcagattatgtgaagtgcctgtagtggggccagagaaataggctggagtctgagtgtgaagagccttgaatgccaggctggagaacttgggctttattctgtaggaagtggggaaccacagtaagtttttgaggcagtaagtgtgaccgacagagctgctttttgtattcagatagcaagcccctcatccagccctgggctgacggctccttgtccctgcagatcagcttgtccctccagatcagctcctttctcctgctccgcaccccgagaggtggtcctgtctgggtgatatcactggactcccttgactggctcccagtacagagcagcagcaaaaggtgggaagtggggaggcgtatggagtcagggaacttagttcctggctccctccctgtggggtgatcttgcactgacctttttccttcactgactcaagtccccgccactgtcagctggtcttttccttacagccgtctgtctcca

SEQ ID NO: 61984 - DNA, 3750 bp, Homo sapiens
tgtcagtgaaccagaaacctccctgccctcaggcatgggcagtggagtatcttggcgatagcagtcagtctgacttcagatggagaaggcaattaatgactgcctggtgtagttgggagccccaaagagttttggccttgaaaggatctctcatcattcctcctgattagggcattgtctgcagaatatgactctagggacaaaggctggtgccccctctggtggagggaggacagtgctttgctggacaggcaagtgtgtgagtcctctcacctgtgcaggcagcctccccagccctgggtctgactgaagatccagatgctaagaacttggcatccctgtgacccatgggccccagctctgtaactgaggtccctgcactcctggggagctaaagacgcttctcttaggttcagtctcctaccttgaacccccaaaacagctctggactgcctctaggcggtctcatgggccacctgcccccaccaggcctggggttgatatgacaaatcaaagctcctcatcacaggcacggggtggtggcttccttgcccagcagcacccactgctctcctcagagttcaatctgctccactgccgagtgtggccactgctgctggcctgctcaaggacagcaacgcacacttgtctctgcttgccttgctgccatacaaaaggtgccatgtggtttccaaaggagcacagcacagggggtgtgaaccagctggaacctcactcccttccatgggcaccagggggcctgtgcagatcaacaccaggaccctcccagcaacgacagggatcccttcttcagccccagccctgcagtccttccaggctctgaagtctgggtgctgaggaacgggggtggctgccttgtttctcggaaatcacctcactagtagtcatcccaagtactagaccttccttgaatcccttctggcgggtctttcagctggagttcagtgacaaccctttggaaggcagctcgctttcagcatgggccactcctcaggtgactctcctgggcccccctctccccccactctttttcttattcttctttcagcaaacactctgtgcacatcctctaaccagaagctgtgccaggcgcaggggcagagagacaagccaggttcagcccctgcccccagggcctcacagtagagcgaaggaggcagccagctcctgcagcagttaggaccacaaggtgagctccctgatggagatagcgtccctcctggtggcagcctcagcccagggttccctcatccagcttaacataacttcctgtaagttcacagggagacagcacacactctctgccccacttgactgccactgcctttacttatgttctcttgcactcagcagggtgctttggttgtcagccagggaaacctttggctaagttcaggagaacaggatcttactggaaggactttgggtagctcagtgctccctgggaaggccagcacacctggctggaaatggacagtccacagcatcgggagctgcacacagtcccactgaggctgccccagaacgtgtatactcaagattccagcgctccagcccggtgttggactggccttgtgtgggcaccatgcgctcaccccctagacagaggaccacagggcactctaacaacacaagaagatggcccacagctgggggagggtcacctcccccaacttcagtgggtgtcacttaaggggaaatggcccgcacagggcctgctggagttcttagaatcgttcagctgctggagtatttgggatatgtggctaagtcacaccctggggctgtcagtcctgggtccctggctcccaagcaccctggcattcatccttctgccctcatctggcacccagttaatgtctctgctcaacctggaaacattttcttaacgacaaaaaaataaaatcataagttaaaaatctcgagcagtaaaacagcagatgacgttgtgtgggcagctgcccagaggacacagaacgcacgtctcctgagcgggtggccttataaggacaggttcaggaggagaatgggcaggagggagggccacccaccaggagagtaggaggctggggtagtggtgggtgccccaccactgggctgagtgtggagccagcagggtgcctggccaggacctgactccacagagggacttggctgcgtgcaagagccagaggcccttgtgggccaaagcctgcccgtccctccgccttcactgtgtcactgccagcacaggcactgacctgctctcagccagctgccacgcaaacccacctggcagcctcaccctgggaaccccctccctccagggcaggggccatttcctatccttcatcccaccttcccccactcctgggcccagcaggcctagcaccagctggcatgacgtgcagtaaaggtttgtggggtgacagaattaggaaatgaagggttctctggtagaagttttggctcatcacctgggctatagcacctggaactcagggcagcgtcttctctcctcagacggcccaacgtggggctgaggaggtgggtagggctgggcagtcagtttttgccctgcccaggatcacctttgtccccattgtgaagacacacataccatcaacgtcctcctgatagggtggaagagtttcactcccccgaggtcaaagtgtgtgtgtgtgacagaatatgtgtgtttctgggagagtcctgattgtctctgcacttttctgaccccagcatcactaggattaaagacctggcccttgggatctgagggtgagcagaggagcgccccaggaggtcctatactgagggaaggactctggaagcctccccaaaccctcatttggaaagatccttccctgagcttcctaaagccccacgttcctctcggggtgagtcctgcatagacacagaatggatggtcatttgaagagagctgagaaggtcacgccttccctttgacagcttgcactgtacctaaaaccccatcatttatgagccattatccttaaataagcattgccttgtcccataagttctctcttaaaaggcaaagagtgttccctgcagaggtcaacaaaggaattctttaatctccagataagacaggaggacagagcagctagaggcagcctaggcagcctgggcagcatgggggatggagagtggaaggaaagggctgagagggcaggagggtcccagaagagggaagtggctccttacctcagttgatccttggaggccaacagtgacctgagagtgtgttccctccccccagagtggaagggtcagggctgataggaggtgctggcagcccctcagctggcgctgctcccatgccagaagaatgtcatcagctgcggaaggttgacttgagatgaagcaagagagcagaggtgagagaggatcggcggcagctgtgtgtgctggagcctgcctggaggcccagccttgtataatacaaatacaagacacaaggaaaccccctgatacaattgtctgaaatgccaccattacacatatattattttgggttaagcagtgcctctctgtggtaggctgaataatggccccccaaagacatccacgtcctaattcctagaacctgtgaatctgttacttggactttgtaggtgtgattaaggattttttttttttttttgaggtgaagtctcactctgtcacccaggttggagtgcagtgctacaatctcagctcactgcaacctccacaattctcctg

SEQ ID NO: 61985 - DNA, 1516 bp, Homo sapiens
gtaccacacatcattaacacaaaattaacatggtggtatgagctgggaaggttagctatcgcttcattttgcgcgtaaaacagaggcttagccctgggaaatggaagtttaaagcctcctgctgctccaggttccaaccaccaccactcctacccccatgagcggccgctgctctcacccgcttcttctcctccacctcctgcacacacttcaccctccagcggtcaatctcctgctcgcgttccactgcccgcgcggcctctgcctcccgctcggcctcgcgttcccgggccctctcgcgaagccgcagccggcggcgccggaccctctccagcctcctccgcgcctcgcccacataggcagcctgggtcaacggctgtagccgctcggccagttccgcgcgcagcggcgcggtctgggagtacagcaggacccaggccgcgccgtcggcttcggcctcgcgcagggcctggctcaggccgcgcagccgccgcaccaggcgcagagcccggagcaatcgcgcgcgcacttcgccaaggctgggcccggcatgcgtgcgctggggcaccggacagcctgcccgccgcggggtcccgaacaccgcctccagccactgccggtcgcgcaggcgttggagggccgcatccccgagcacgtcggccggcggcggcggcgcctcaggccaccgcgggctccagggcggccccgggccgggaggcggtggccgcggccgctcgccggcgtcggtccccgggaagggccgacactggggcggcggaggaggcagcggcggtggtggcaccgggtagaaggcgccagcgccgcctccgccgcgggaggcctccgcggaggctcggggctgcagagccagcggaggctgaaggaagggggcggaggcccccggaaaagggccgggccgctgggggagaggcggcgggaaagccggggagggcagcggcggtggcggacagccgaaaggagcaggaggcggcggctgcgggggcggtgggcctgggcgaccctggccgaagaatggtggcagggccatgttcacgacggagatgctttgagaagtgacaggaatctgagtggctcctcatgagaaccttccgacggaagtgacgtcgttacgacgcgcgacccctgtagactcgtccctccggaaggctcagtgcataagtgggcagtcgttcaaccttctgtcgttcagttcataaataccgttcttattgagcatcctaggtgcagagctacccactccgcatacagtgagactgagagatacagagcttctcttcgtggaactatctgcctagtataacacactaatcaattaatcatggtgagtatcttcgagaagttggagaaggttatcctaagaaactgcggctgcagctgagatctggaagataaatagttaaatagaaaaagagagggaagcacagtgcagatgagaacatgtgcaaaggccctagtaaataggagtgtgaccaactacccattttcttagaaaaat

SEQ ID NO: 61986 - DNA, 552 bp, Homo sapiens
caatgtaaatgtccaccacctgatgaatgtctaaacaatgaaatattattcagccataaaaagcaatgaaatactgatatatgctgcaaactggataaactttaaaaacatgctaaagaaaataaggctggtatgaaatgccacatatcgtataattccattgtatgagatacccagaatagacaaacccattgatagagaaagtagttaatagttaacagggctaggaggggaggagggtggagagtgactaagggctatggagtttctttctggggtgatgaaaaatgttctggaattagatagtggagatgatcattcaacttggtaaatatcttttttttcttttgagatgagacaaagtctcgctctgtcgcccaggctggagtgcagtggtgcgatctggctcactgtagcctctgcctcctgggttcaagagattctcctgcttcagcctcctgagtagttgggactacaggcgtgccccaccacacaggcgaattttttgtatttttattagagacggggtttcaccgtgttagccaggatggt

SEQ ID NO: 61987 - DNA, 2812 bp, Homo sapiens
cagaaagacagatagtagatggaaagaaagacagaaaggaaagaaagacaggaaggaaggaaaggaaggaaggaaggaaggagaaaagaaaagaaaaagaaagaaaacagtcgttttgaaaagaaaaaaaaataactgcctatctcctatgattcaaaaatgttcacggactcttggctacaagagatcagtaacactttcaaagaagccgtccctgaccaaagggaacacacacatacttcatccacccactggaaactgtattattctttgtctactccactagatttaaacatgagggtgaggacttattcaccactctacctccagcactaaaagaaggcctgacacacagtggacccttgacaaatattaatatatatcagataaatggattaaaatatgtcactttaaagtgtttgcaaatcgaattcctggaatcgggacatctactggttgaggcttaacatcgatttaggattaaatttactcccttacatttatatatcattttacaaaatgcttctgcccacgttacctcattcaatccttccttctgtagtaaagaaactggaagatatatttagtaaacaataaggattttataattggcttagaagttagataaaaggggcctttttaaaaatccatccaagggtcataaaccgataagccaaaataaaacgaatttgtctagaagtcagtcattataacaggatctagcctcgtggtctgacttccacagatttgaggaagagaaaaaaagtttattttccagactctcttggctggggcgccattctttcacagcttcagataaacagaaagaaaaggtaaacaacatgcgccactcttaggaaactacctcccggtcaagttgggaaagccagcaaaggactgctgaaacacccaagtacttccgaaccaactcctgcgggacttctccccatctctcccgccgctgtcctgcgggccccggggcttgcctgacgccgggaagtattgtgaaccttgtttatgtcccagtgtcagggccgcacagtgatagtaacatctcgggtatcgcgcggcttgcgtccgggacggccagctgggtgccccgagtcctgggggaccctagtagggacagatcctcagccgagcccctcctggagcccccaacgggcccgagggggatcccggccaggctgcggaagaagagccgcagccatggcaggcggcggtccccggcagggctgagtgggatctggagacattttttaataacaggagcattttgtgcctttcagggtttctacaaagtggccgcattccggccccaaagtcagcaggcctgaaagcgtgcaggcaggcgcgtgggaaggagtttacttccaatttgagcaacggctgctccagaggttggcagagccccattccacggggaaagtggtgggtgccgggcgaagcgccgcgcattccctcacactccccgggtgcagcaggcctcgtgccctccccggggcccccaaccattggccagtccaccccccccccgacaggctgagggctcaggagtggcactatttcgttacctctctgcgcggaggcgagtgaggaggtgatgagccggacggccgccgcgccgcaagtacaagcaccgcagctgggcatctccgcgaggcctaggccggggcttcgccccctgaggacctccgggtcacagcggcgtgaatcctgcccgcaaggcgcgctgactcggttccgaaccctttcgcgggccctagaccccgtggagagttcacctgcccggcagccaggccttcacgcttctctgccccacagccgtctattcaccagagtagacacccaacccccccctcccttcccctccttctccttctacccccacccccagcctactgggcccggggagcttgcgcgcgcctgcgccctaggcccggggagggggcggagggcgtgggcacgcgccgtgtttgcgagctggtgaagctacgtgaggcgaaggcgagggggtggtgccctgggcgccaatgagttccctacggcaagcgtctagccccaactggggcgactacaggtcccgacgctcaaggttgccaaaagcccttttatcctaaagttgaaaggttttgcgatagacgcggagagatgcatgccgggacttgtagtcccgagtcgtcatagtcgagctcttccggtcacttttagtgggcggcagggaaggtcaaggtgaggctggtggcttaaccctccagggggaagtctctaaagtgccttggtaggcgctggatgcttcagattcactaaatttcttcccccggaattccacatcctgtgttccttatcttctcattctccttagtttcatcacttgtaacatggagttggtattgtcagttagttccctgagcagcaattgttagttggtaacagctccgtctccttgttctttcaggcctcgtggtgataaagcttctagctgttgctagtccgtgggtgctttaaagtcttgagggttttcttttctttctttcttttttttaatttagtaaagatgaggtctccctatgttgcccaggctggtctcaaactcctgggctcaagtgatcctctcgcctcgccctcccaaagtgctgggattacaggcgtgagccaccgcacccggccgtgattaaggatggcactgcatagataacctctggtcaggttcctatcaggccatcctctcaagttatgaattcaaaagcacagagccggctgggcgtggtggctcacacctgtaatcccagcactttgggaggccgaggca

SEQ ID NO: 61988 - DNA, 1672 bp, Homo sapiens
ctactaaaaatataaaagttagatgggcgtggtggcaggcacctgaatcccagctactctggagactgaggcaggagaatcccttgaactccagaggcagaggttgcagtgagccagtgagccatcactgcactccagcctgggtgacacagcgagaccctgtctcaaaaaaaaaaaagcagcattcactgtcgtaacaaagttggatacaaactactaagaggacaaggtgggactcctgttgcgtaggggctaaaggaaaagggggtggggttgggaccagcttcacagaggaggtactgtatgatctgggtttgctatatgaaaccacagaagtataaaagcgcagcatgtagctggggaagtgggtggtggcatggttaattgtgcagttctcccaggcatctggggctctattcctctactagctgtgtgacctttagtgagatgtttgacttcctgtgtctcagctttctcaaatacataattgggataatatcagtagctacttcatagggtcccggtggagattaatcaagttaaacaagtgctcaaaccaacaggaaagtattaagtactctaatgttagtgtgactgccatgactgtcatcattaacaacaggtaattctgtgtggctggaacctagagtgtggggaagtggctgccaagaggaagagtgggaaggtgacctcaagtgaggtcatctcaaatgatcctgtgaaggaccctgtactccacttgggaaccccaagctttgttctgtaggttatacagagtcactgaagacatatcccaaatggtgtaccctcaggtagcttacccatacaggactgctgcctgcacagtccaaagggcactcatcccccttccttcttttctattccttgttatctcagagccagagctgagtcatcttctctccaaagattactactattcccatcactcgtgtcctcaaatcccacctgtgagtcacagcccttgtcaacagtccatatctaggcccagagagccccacaaaaggacagtcagctagccaggtgcctttcagggactcagtctggacaaaggggagagatgcctcctagctccaagctggacccaggcctcttcccggccctcctactgcatctgcccagacagggtccctgctgcatcctgccctccttgctccccaccatctgtccacactctttaattcctcaactgaccttctttatgtcccatttcactttgcgtgttactctgaaaaataaatctgcttcaacaatttaataggattcttcctcttgtgactaaaacctgtctgcattttagcagggccttttgggaaccaggcacacaagtagggttgccatttaaaatacgctctgcccggttaaatttgaatttcagataaacaacaacaacaacaaaagacccattttgttttttttaaagacgggatggggtctcactctgtcacccaggctggagtgcagtggcaagatcacagctcacagcagccttgaccttccaggctcaagcaatcctcccacctcagcctccagagtagctgggactaaaggtatgtgacatcatgcccagctaattttttgtacagacagggttccaccatgttgtccaggctggtctcaaaactcccgggctcatgcaatccaccagcctcag

SEQ ID NO: 61989 - DNA, 1506 bp, Homo sapiens
atatttttctaggcaattccaaacatttggattataaggataactgatatcttgaatgctgacccagaggtgaactctgcaaaaaaagtgcctggtgaatcagagaaataacagcttacatatgtactggatgttacagtttataaaagtactgcccatagatcacctcatctgaagaccaatgtctgggcggctttggtgactttttggtgtctaattatttgcaaaaggatggataactttctagctaagcaaaacagctgattcacatcaaccctattcctggccaggctagaaaatctgtggaggactatgcaactattcctcacttcagtcctcggagtcatttgtcattgacaggagagaagcagccaccaagtgccttgggagtgagcgttgacatgagggtgttagcagtgttcttagctcatggaaaccttccccaaggcaaggcaagaccaagctgggaatggaaagtctggcggctgtcatgtttactaatgcggatggaactgcctctacctgtggttccacagggcacttggtccaggacgcagtgggcagcgccaggacaaagcacactcaccagggcttcaaagtccttacagtcgccgcgggcgtaggacgcggggaagggccgcagcaccgagtcgcgcttgtagctctgcagggccgaggcgaagaggctgcaccggaggtcggcggccagcatgtcgcggcccgccgcctccctggcggccgcccagcctgagggctgcatcccaggtcactgcgcgttgccggggtagacgcgctggttaggggcaagggcgagcgtgcgttcagcgcgggggctgggcccgcggacaatgggccgtcaggggccgggttcccaagcctggggtggagctaggcagggggctgagatgacaggggtgagaacgtgccgacaagtgtcctctgccggggtctgggccgcggctcgccgccgaagagagagaccgaggcctggaccgcgggtcggcggggaggttgggcccagggataaaggaactggggctggtgggggggaggggttcccggcctaggggaagggctatgacaatggaatgacaaccgcgggaacgtgctgacacgtgtcctccgcggaggcctggggcgggaagcagcccccgggggacggcgggcagagcccactctccgcgacgggcgaggctgctgcgccgcgcgcgccttcctgccccgcctcccgccgcgccgccgaagtcccgcctctcgccaagctgcccgcggcgccacctgtcttccgcctgcagctcacgtccgcttgccttgcccggcctacctcccctcccgccgccgcgctccgcccggcccagccgagggcccgccccttcgcgccccagccagctccaccgtacgggttgtgcccgcccctcccagaccccgatcacccgcagctacgagagttgccgccgccagtgtgtgccgggcgacgtcgcccacgcccctgccagccatcctcac

SEQ ID NO: 61990 - DNA, 1497 bp, Homo sapiens
ggagtattgctaggagggagttttctaatagttggggcggggggggggggggggcatttaagtgcaaaggaatggttaatacatattccagatagtgactacccatatagcgagtgaggggtatgataggggaaatgggccaacgaaggcttcaaagatgttaacaatatactttttgaactggatgggagacatcagtgttttattacttttgaattatgtatgcacatagactatatacattatttacgagatatacttaaaaatctttaagatgtttctatattttagagacagggcttaaaagtcctgggcaattagctgggcacagtgtcgtgcgcctgtaatcccacctagttgggaggctgaggcagaagaatctcttgaacccgaggtagaggttgcagtgagccgagatcgcgccactgcactccagcctggatgacagagtgagaccctgtctcaaaaaaaaaaaaaaaaaaagtcctgggcagcaaggcctccacttcaccccctaaaggttgccccaagagcaccgtgtgactgctaaggtatttccggagtctaaagacgattattcaggtctcatttgcatacccataatacactgcaaacagtatttttttcggaaaaacatttatatattgcttgacatttttaagtatgagaattttgcatgcagaatttttttgtataaactttctcaggtagtaacccttgggattagtagacaccatcagtgtactaggaattgcagttacccgaaaattgagttacagaagtaactggtatactctggtttctcttcagatcgcataaatctttcgccttttactaaagatttccgtggagaggaacaactctgagtcttaacccaattttttgaggccttgctttggcaaggctatatgtggtaatccaacaatagaaattatttttaagtttgtgtgttcctttttctgttcaatggtgcttttgatattgttgtaaagcagtgactagcagattctgtgtggtaaaagcactgaaccctgtttagttcttttctccctaccttattggtaattatttctgtgtatatatgttccaaagaaatgcggcttgtatattcatgcttttcaactttttgtgatagacagttgatacacaagtagtacctcctccgggatcttcttagtcaagactgtttggtagatgcatgttttttgttacttgtaatgtacagtattcagttcattttctttttgcagcactgtccggttgaaacacaacgcgaggatcgggcgtggtggctcacgcctgtaatcccagcactttgggaggccgaggcaggacaatcaagaccaatcctggtcatcaaggcaggagaatcaagaccatcgaggtcaggagatcaagaccatcctggctaacacagtgaaaccctgtctctactaaaaatacaaaaaaaattagccgggcgtggtggcaggcgcctgtagtcccagctactcggga

SEQ ID NO: 61991 - DNA, 2426 bp, Homo sapiens
cccgagttcacgccattctcctgcctcagcctcccaagtagctgggactgcaggcgcccgccaccacgcccggctaattgttttgtatttttagtagagacggggtttcactgtgttagccaggatggtctcgatctcctgacctggtgatccgcccacctcggcctcccaaagtgctgggattacaggagtgagccaccgcgcccggccgaatggtatactttaaatggatggatcgcttggcttttaaattatatccagtaaatctattttttaaatgtattagacaaatttaaattacatgcatgtcaaatatgattgacttgctagcaaaggagcagcaaagtgaaaaaaagtgttggtttagagaaggtgtgaaagtcgggaaatgaaatgtttacaccatcggctgtaaaagtcttagtgctggctgggcgaggtggctcaggcctgtaatcccaattctttgggaggccgagatgggaggattgcttgtggcccgtaattccagaccagcctgcactgctttcctttcactggttgccgagtgagcacattccttagaaaggaattccctgtaggctggtgagagccgacagtgtagctccgagggggagagggcagcactatgtttttaaattattattttttgtagagatggcaggtctggaactctgggcgtcaggcgatcctcccgcctagaataaggagacacgaggtctgaaactggaatagcaagattgcatccccaacagcagattccggtcgggcaggaaacctgaaacagagcgctcaagttccaattttaaacaggacattgccgggaattctcaaatggcatgcaaaattcagtatatccccggagtgcacggttaaaaataacatcagaacgcccctgcgcccaccacacagtttaagaaaacggaaattgtcaaactttttaaacccctgtgcgcccttccccaagtcacatctctcgctcctcaccgaagggaggaaccactattctgaattctgtgttaatcattgacttgccaattttttctctttcaatttaatagcagtctttatttaaaagaaatcaaactcagacgtacaaatacacaaaacagataaaacccgagtctctgaccaggaaagcgttattttccagccagccagtcttcggcttcgccccctaacggtgacataaggcactctgtgaaatgctctgttccggaatcaaaagattgatccgattatttgcatacccataatgcactgctcacagtacaaatttaaaaaggcaaaatcaaacatttttattctaagcatattctgtgaaagttagacttttgtttaaacaatactcttaaaatttttttctaggtatagaaccttggcattcactagtcaccatcactatactaggagtttctgttacccgagaaacgagttatgaaattaacaagcatactctggtttctcttcagatcgtataaatctttcgccttttactaaagatttccgtggagaggaacaactctgagtcttaagctaattttttgaggccttgttccgacaaggctatataaagctgttaaaaaatcagattgacttcatttagggtgtttcttacagatatcgtttaagttttcggttctgcttgtaaacgcttcaatcgctcatgcgtttaaactttgtgtaagtgcaagcgttctttttctagtgaagcttcttccaacaagttagaagtatttacttcagtgtcattaatgtgaaagattcttaaaagtgttctggctgggcgcggtggcttatgccggtaatcccactgcattgggtaaaccaaggtgagcggatcacttgaggtcaggagttcgagaccagcctgggccaacgtggtgaaacccacgttgtacattgttttcttagtcttctgaatcctgtgtatattttgcatttagcgcatctcaattaggactagctgcatttcaagcgctcaatcggcacacatggacaatgactaataattgccctgtgcacctctgctaggtgtaaaacgtttgaacagagcacagtgtgtagatccgttctcccttcctgtaggttttggggttttgccagattttggccattggaactccttgaacctgtgcaaggttatatttccttaaagtgtggaatggaatggctggctgggtcttagggcaggtaggtacctgcataataattttttcccaaattatgtacttatttgcattttcacaaatggcctattatattcccattgcttctcacccttactggccttgaaatgctcagaagttgccgggcgtgatggctcacccctgtaatcccagcactttaggaggccaaggcaggcggatcacctgaggtcaggagttcgagaccagcctgcccaagatggcaaaaccccgtcttta

SEQ ID NO: 61992 - DNA, 735 bp, Homo sapiens
gttggtttccagcaaattaaaatttatctctcagagaggaaatgaggggccgggttttttttttttcttcttttttcctttctccttcttaatgggccctgatgaaggaaatgaatgcggggaagggatcagaaatacgatccaccactcgctggcacagaaaggtcagggggctccctgcgcccttagaggggcagctgggcacagtatgttttattatataattaaccttgacccttctgggttcaaagagagagattagttggaaataaatcaatagtctggtctggtcacttcaaaggccacagaacacgctggaaaattccacactggctcagtgtgtaaattgaaataggctatgcaatgcttctttaaaggtgggagggggctttcggtctaaaattgaaattaattgtgtatccgcttcctttaatcaggcaatcaggagtctttattgtgtatcttgtgggggttgcggggaggcctggagacagcattgtgacctccgagtgaccgctgggccaggctccaggacaacaggcatctcttcaagcctagggagctcctccctctggtagcagtgtgcagtcatttactggacatctggaattctcagaatcacccaaccatcaccatcgcaatacacggcatttattgagtgcttactttacaccaggcgccaaggattttccagttatttttctcatttgatcctcataacaacccaattagata

SEQ ID NO: 61993 - DNA, 817 bp, Homo sapiens
ggagagggtgagggaggacgggtcggagttgggtgggatgtgccgcccctgccagcatgaaagggaccagcccagcgaaggcctcaccttatcctggtcccagtcccacttggccacagccaagccgactggcctcttctccccacacggggatgtctgggtctcagaggtctccccagctccagggatgaggagggagctgggtgttctggctaccctgggtcacctgctgggaggccctttccttcgtgagaaccaagctgacctattccgccgggatatggaggcccatgtgcttccctgacagccaaccattccgtggaggagggagagaggccctagcgtccgcagccggctccgaagaggaggtagagccatgctcgcatagccacgcgttgtgctctgtcgccccctggtgtcctatttagaaaagagccgcaatgtggggctctgacttacctttcttttggagtgactccggccttcagaaacaccgccacccataaggctgtgcacttcagccctgtcctccacgtctgagggtggcggggaccagtcctggggatgggggtgcacaagggactccaattcatgggcagctggggggctgggggggccaagccgagctctggagtacagcgcgggattcccgggggtggcggtggaggacaggcctgggagggattccctggaagggaagacggaaaacaaggcatagcggtcagagtaaggggtcaggcggggctgggatctggtccagcctatgtctctggggaggttcctgcccatctctgggatttgctttcctggtctgtgc

SEQ ID NO: 61994 - DNA, 1430 bp, Homo sapiens
gtgggaaaagctaagtggcaagtgcaggaaaaacagcgaggttatgccagcacagcaacaatggactaagatgtcaagacacctcatagcactaagcccctcactcagaaatagagcatgttgactcagaaaatagctttaggactcttgagtttggatccactcaagtgaaattccttaatttttaactcaagggccaaacagccgtccacttaaacacctaaagcctcactgaagcctagctatctcattctttagggtccacacctagttgagagattcaatagcacagagggggcaaagaccttgaaaaactatgaatgaggaacaagaggagaggcatagcagagaatattgagaagagagatgggaggaatgccaagtcttagaagaaaagtgtgtgagaagacaggtgtggcaggaaaggaaagtgtcctgctgcgagtgggtggaacagaatgggagagggcagtgagcagggagggaatcgacctagcatgaggcaggagagaaaaaagaccaccagctgaaaaaccagaaaatctgaggccgaagcccatctgccaagtcggacttaaggaaaatcccttcgcctctgtgggcttccgtttcctcatctgtaagcgctgacaatacccggcctcccaaccccagcgagactcaattaagataacggacgtggaagccaggaggccagcgcccagagctcaaggggcgcccagtgaacggtggttgactcggaatctcagagcctcggcttcctcttccggcaagtgggggggaggggggaagggcaccaccggctctgcactgggcagggcggcgcgccgggtaaaccgcaaagcgcgctgaccctgagaacgcgccgagcagtccctccgtgaggcggaaagggcctggtgagccgtggcccaggcctcgccggcgcaggagaaggagaagggggcggatactgcaccttccccccggccccgcccggaccgtcccgacgtgcgctatggagcgggcctgcgccgcttcatgctgcgccgcctccactccggtcctggttgcagtggcttcctcggcggcggcgccggtgacaacccaggcggcgaacgcggcactaagaagcagcggcggcagtagcagcggccttggcctcggaggctttagcacttccggttcgttgcgatccgctttccgactggcgaaggcgcagccgggccaagaagggcgccgctgtctgctgggtggggtccaacaccacagcgcagtctagtggccggaggagccaaggaggcgcggggtggagactgggccgagcaggggatagagatgaactccagaaaggaacagcgacttgctgaaagtcacagggcaaaatgtggcgcgtctgtagtcaataaataatatatattgagtgcctgctcaaaatagacaaaattcct

SEQ ID NO: 61995 - DNA, 1393 bp, Homo sapiens
tggaacgctcttccacgctgctcccacaccatgtcccctatcaccattattatcctcatttcatctgtaattacttgcatcttttaataggctgggagttctaagacagaagggactgtgtctcacttctgttgttccagtgtttagctttgaaacccaggcacacagtaggtactcagtaaacagaatgcgaaggaccgtccagagacaccagtcccaaacccttttccaggctgatcggtcccccataagtctccagccttttttattttaaagcttattttaaagcatgtccctgaagacgagtggggagagcagaccacccgctgattccaattccctaggcggccgcggcgagctgcggcgtctctgtgccccggcctgcccctatcccgcctgcgccccgcccccgcccggctcgcgccaaggcccgctgctggcgccgccgccatcccggcgcgtcactgcgcaggcgcggcccgcgagcgtggggtatctcgaggtgccgggttgcaggcgctcaggagcgctagggtttgaggcctgctttctgctcgcgccagcagagcactacctgaggcagcgaggcgcagcgagcctagcctccccgcgccctgggcagtgtggccatggagaatcaggtgttgacgccgcatgtctactgggctcagcgacaccgcgagctatatctgcgcgtggagctgagtgacgtacaggtaaaggccgggtcgggcggcgggaagcgcgcgggatcgcggctccgggtacccgccaggacccctgccccctttgtccgcgtgcgcgccggagagcctgcagtgcgccaacaaggtcggcgacgcggtgcgcttacggcgtgctggcgcttttcgaggctcatctgcagatctcgggccgggggcacaaccccccgagggctgcaggaaccttcgggtccccagagagctcggcctgggcctctcaggctaccccgggcctcttctttgttcgcagtcggcggccttcatggagcccaggcccggccctggctgcctggccgtcggggttcgagttggctggggcccttcgagatgtgggatgagcttgttgggtcaggggtgcggttgtgacagcggcttgctgggccgtagctgaatgcctgccgctggcctgagaggtccagccaggcccctcggacgttactgaggctgggcgctgccggaggtgggggagggggaggggtggggggccacacccacctcgcaaccgttcagtgatggaaatcattctcattacttttaattttaaaattcacaagagctggaggaagtgatttccccctctgttctgaaggttgtgagctcaggtttgctgagttgcacagagaacttaaaaagttcttaagttacattaa

SEQ ID NO: 61996 - DNA, 1308 bp, Homo sapiens
ttggatcacccgtggatccggtaaaatgtaggtgctttctgagtgtcgacttgaatttattgaatttaatataatctttgcttctggaatataaacagttttcctgttgaaagatgaagacagtagtggccagaatgcctttaaataggctatgacattgcatggtgtgtcgtttaatgtgttcatccagactgaggctatacttttgggtcagagtatgagtaaatgttctgtgctgtctccctctactgctccacggtggtttaatagaataggaaaaaacaaacaaaatcttttgtagatggggatcaaagtccccgtctagagagggttcttccagcagtcaataaaaaagtacggaacaggccaggtgctgtggctcacgcctgtaatgccaacactttgggaggccgaggcgggaggatcacctgaggtcaggagttcgacaccagcctgaccaacatggagaaaccccatctctactaaaaatacaaaattagccgggcatggtggtgcatgcgtgtaattcactatgttggctactcgggaggctgaggcaggagaattgcttgaacccgggaggcggaggttgcggtgagctgagatggtgccattgcactccagcctgggcaacaagagtgaaactctgtctcaaaaaaaaaaaaaaaaaagtaaccatctaaaaatttttggggaaaaataaatcatttttcccccttattgagtttttgttttctctggggtttcacatctgtagttttgaggcacccatatttcaactaccattagtttaaaagcatgatgttaccctcataaaagagtgtttacatgtgttagcaatcctctaacacatgtaaggtagtacagatttacaaaggtgagtcagacccagcttttcaagggcatgctatctagaaggaggcgtatcatatacaaacaaaaagttttgtgtaggagtatgtttattggtagaattggagttggatgttgaaccaggtatctggtgttaaaggaatttgttacctttctttcatttagttagtgatgacttccagaaatgagaattatttttgtcaaactaagactgggagaatgttccagaaagagaaaggcatagacttttagacacttgtaatctctgacttaagccgtgtcaatgcccaaaggccaccaataacacacccgtagttaaacaagttgggtttattactcattgcattgagagagcatactccatggggaaccctggggtgtttcattaggagggtgttagaactgattataggatttgggtgttggtgattaggg

SEQ ID NO: 61997 - DNA, 2281 bp, Homo sapiens
tgcagtgagccgagatcgcgccactgctcttcagcctgggcgacagagcgagactccgtcttgggtgggggggaatccctgcccaccacagtctaccaattttgtgagcacaacactatgtattcctcacttgggtggattctgagcccccaagtctcccacccccacccccttcccacgtgtactgttcaaacaactagggctcttctttctcaggaacagtctgagaaataggccctagccacctatttggccttgaataccaagtgtccatcagctagacgtttgtaattcttccctgaaggtgataattagctcattcataaagaactgattctcagcagtctcgctctcaaagcaggattctacctgaatttctagtgcctcacctgctctttggctttcccgtcagcctccgggagtccctccccagttctcagatataatttcatctctaaaagtccagactgaaaatcacatctgggagatgtatttttaccttaaaaatcagtcaagaaaatgtgggatctggaagtctctcttggaaagagggggcagaggggagctgagcagagggcgaaatcgtgcagtttacgcggagctggggaccccgagcctcagagcgaggggaggccgggagcagcgccccggaactggcgcctcacagacagcgcggggcggccgccacggtggcgggaaggccaagcgctggccctgggttgttcttcacccataaccccttcacctgtaaccccaacaagcagcgaaaggcagtcccgggccctcggcctccccactcaccccgtgcccatcgccggacacagtccgtcggcataaactttccgtcggcataaactttccgtccgcgcgccacagccggaactataaggccgcgcgacagaagggaatccggcgcctgcactccgcgctgggcggggcggtccttggagagcttcagggtcgcccgggcagggttctggctcatcccggagggacgctagggggcgcggcctctcttcgcgatggccaatccgcggccacccctctcctcccacaaatccccaacttctctcgagccttggctgggtttcctgccgtgtctctctgcattgccctgaatctctccccattctcgggctctttccttccccttctgccccactgacccatgggcctcacctggcccggtgactctgtgtccgcttcacacttttgtcccctcactcccctgggccccgtcggtgcacgagcccaacccttcctgctattttcctcgtcactctttagccccctctctcgtatcctctgaaccggttgacagaatcctcttcctgttctttttaaactgcaattcctgaactacaaatcctggccgggcgtggtggttcaggcctgtaatcccagcactttgggaggccaaggtgggcggatcgcttcaggtcaggagtttgagaccagcctgggaaacatggtgaaaccccgctctctactaaaatacaaaaattagccgggcatggtaacgagtgcctgtaatcccagctacttgggaggctaacgcacgagaatcttggggggaaaaaccccaaaactgtaattcctggctgaggtatgctttgtatatccttcttagctgacctgagcccaatttacctcaagacttggcctcttggtctcctcagcccaaatgctcactttatttcccctatcccctctttgagggaagcagagggccctcgttcctctcaccctggacaaggcatgcgtgctcagatttccctgtaaggcaacatgggctcttgcctgccactctggccacctggtgtctccattgtagtctgtgcctcagtgaggtccttaagagggcaagaggtgactttctttctaaccatgtagggagccagggaatcccagctagagataggcttagatggatgccagcaggcccctgggtagttacggttcaaagaacaatgtggaaccacataggttacaaagtgagtacagaaaggcctctagaaggcctcaggcatttgcctttttcttttagctgataggatggggcgagattaggagatgggacgaggaaggaggatgctttgaactgaacagacaaatctgtctgacttctcacagcttgttatgtgggagattgtggggccagttgcttgtagttttttcctgtccctgggaatatccctgccagcactggggccagggccctgcagactgccctatttgcttcaaaacttctttccccaacctggctgatctcaccatgtca

SEQ ID NO: 61998 - DNA, 684 bp, Homo sapiens
tttaaaaagcagcctgaaaaataaaaatttataatttgcccttgaattggaaggaatggagattagggaaggaaaactactctagaggccatttaaaagtatgtatttattagaacatgcaaattcatgttgtctccatcagtggtcaccttgagggattagacattctaatggaatgtcctggctccaccctccagcatgttctcacccaacaatgacagttgagtggagtgggaagggaagtcattctaaagagtccaaagtcagtagcgccacatctggtttataaagtaagagatccagtgggacaatgctatttttgtatgccaacctagataggattataaagcaagactgatttcttctgtggtttatgaatggatcttaaggtaattacaaaagggaaattccaagaatgcataacacaatgacaacatggtgagaaaagtgcagtactacttccaaggtagctagtgtaaaggacacttgagtttttaaaactgtggttaaatgttttatgtggaatttgatgagtttgtatattaaataccactgcttgctgcttttactagaatcaagttaagggacacgttagaaatagaacagcttaatatcactggcttcagagcaaaatgagctcgggtgactgcagattatgatggtaaatatggctttaattacaaa

SEQ ID NO: 61999 - DNA, 958 bp, Homo sapiens
atacttgtgatatttaatttataaatgaggcacaaaaagaaattaacaataactaataataaaatagaacaattaaaacaatatgccagcatcactgctttgtgccattaagtaaaacaggagttacatgaacacaagcactgtgataccatcacagtgggtctgataacagagatggctactcaatgattaacaagcaggtggcatacacagcgtggatacaccgaacaaagggatgattcacatcccagatgggacagcacgaaatttcatcatgctactcagaacagcatgcaatttaaaacttatgaagtgtttctttctggaagtttccacttaatattttgagaccacagttaccatgggtaactgaaacctcagaaaggaaaaccatgaataaggagggactgctgtatagatatccttaaaaagtgttaggcttgggctggacacagtggctcctgcctataaccccagcactttgggaggctgagacaggagggtcacttgagcccaggggttagaggtcacagtgagccatgaccacaccactgcactccagtctgggtgacagggcgagaccttgtgtcaaaaaaaaaaaaaaaaaaaaattaggcttgttttgaaagaagtacaagatgtaagtgggcctaactcacaaatctgcttcctaagagtcatttccagtttattcttgaagcaatagcaaaaattcaagtacgtttaatgtaaattttaggagaaggcaaaaaaaaaagactcttattgctagcctgtaagaagaaaatattatttgtaaatacaactaaaacaattctatttatctaatgacccagagggctattaaaaatatttagcataggctgggcacggtggctcacgcctgtaatcccaacactttgggaggctgaggcaggtggatcataaggtcaagaaatcaagaccatcctggccaaca

SEQ ID NO: 62000 - DNA, 628 bp, Homo sapiens
aaaaataataacggccatagatgaatatatacccagcccttctaaatatagcattcccgaacctacaatcaagtaatgtttcaaaaatttatttgtaaattttttgtctagaactcacagcataccttcccatgaagaaagttacaaaaggatatgagcaccaggaaaaagatactgcctaaggtgccaggctactggcagagaaacaggaaaagcagagtacacaatatgtactgatggtccagaaagcaaaaaaagcattgtgacccagggtctgagggcagaaatcactattcatttatttacctttgtaatctcagtaactagcaaattatctggcatctcataatcaaagaccattgcctactgactgatgaagtaatggggaaatgactaagcagaggaatccatcaatacgtggcactgtcaacacagaacagctttggtggaggaaagaaaaagcttggagagaagcaatgtttaatgacacaaaaatccacatatgtaaaactattacaaggttagtgctggttatttatttatttatttttttttttttgagacagagtctcgttctgccacccaggctggggtgcagtggcgctatctctgctcactgcaagctccg

SEQ ID NO: 62001 - DNA, 2703 bp, Homo sapiens
aataatataaaacaaaaattaaactccacagtgaagtaggtctatgtttaatcattcagaaaaagaaaattatgtaacatattatatataatgatgatgataacatatgctgttctggactcctactgagagctgtggttcaaagggaaatcgtgaaaataaagtaaaaattgccgaaaatgtttaattctgcccaaaacagtttccaaaaaagaagccaaatataatattttattttaagttcaaacagggttcaaacagctcagaaattttgtatacttaagttttcagaagtcgaatcccagaaccgctatcaacataaactgaataacttgctcaagagtccttacttattacccaatcttaggtcccccagaatacttcttaaaataatcccaaatgtactacaatagattagcgtaaccggggctacgctgtttacaggtgtctccacctcctcccccaaggagagaagaggtatactagggtaaacagaaaatagaaggagactatatacacaccaaataacagcttgtaatcttctaagacttcttttacattcgggctattcttttcattaacgtataatacattttaaagaataacatattcacagagtaatacaatttctgccctcacgggtctctagctggctgacacgcgttttctcctcaaataaatacatgcctgttgactgatgcctgtcctgctgttgcaaacaagaaataactgtcctataagacaaaaacctctctctacggttctaggcgtaaccatacgtttgaattaaaagcacattggaacaacaacaacaatcttccagcacatctgtcatttaaaagcacgataatgaaaagctgtcgctgcgacccaattttaggtcacaagctttttactgtttttcctgccccccacctccagaaaacaataaacttcaaagggaatggtggtaaccaggaacagttcccttcccccaccacacacccccccaaaaagactagaaaaaaaactggtcaacttggacgctggccgcgctcacgcagaacccgtgcccgcgggccggggaaggctgaacagaccctgggaggaaaagtgggcctgcaggcaccccgggctccccccgccgcctgtctcagataccgagcaggtgggattccgggaagccacctccgacttacgtaacgggcttgtcaaaatcccagatccaggacctccccctccccgcccccactcccaaataacaacagccccaggccagcctggaatagaaaatctggaatgaaaacacaggagccccccacgcgtccgacgcagaggcgcgggtgctactctcagcaccgccgcgccatcccggggcggaccgagccgcggagcacctcccggatctcaggagctctcgggcggagatctcggccatccgtgcctcctccccgaacccacccgccccgctcccgcgcccccggctgtcacctctccgggccgtgacagctccacctgccaccgctgcccgggtcgccgcccccgcactcaccacccagctggctcccgtgcgagcagcggatcgagctcggagagcggcgccggaatcccgcacgcgcggtagcggaacacgaggggctgaatgccgcggcgctctgagcccgcttagctcatccccagcccggcgctccgcccttcgcggcacccccgcccgcccgcccaggcctgccgtctcagtcagacgggactccccctcccctcgcggccgccactgcctccgcctctttctccgactctagcctccgcggccaccgcgaccggcgccatcttggcaatgacggaaggggcgggggcgggaatcacgcccgcgagcaccaatcgaaggccggatctggcccgagtgggaggagagggccgagttgagggtcgtggggtcctagcgccaaactgataatggggcggtgaaggtgggcgggactaagtcgccttagtccgtgacgtgcggtgtagttggggaaacgcaccgtggttccccgtcgggtcaggagatcccgagccccaggctggcgtgggcgaagcgtacaatcccttcacctttcgtcacccagaggcacaagaatccagttcgcgccaactgacctgtttcttccttcctccccggcactctgggagtcctgagattgccttgctcggttcgtctcagacttgctagatctgagcagctgctgctcctccaccaagggtgctcacattctccaggaaactcccttaagggttagcaaccgccgagtaggtttcggtcccaagatagaaaggtaaagcggggaattcagggggtttctccgaaaagtacgttgatgaaacagctattgttgactgacggggtgtcgattactttggattaattggatacggcctacttaaacctgactgtggctctccaccattgatggctgttgacagatgaggttaataaagcttgattacccccatggggttgctcgggagttaaattctatagtacctgtgaagtacttagtatagtgcttgaaagtactcaataaatgttagacattattccatggacaaatgaaagaagaaacaggacccccaaaatccctctgctttaaagtcaacttttcctaaattgcatagccttttactaaccaagtttacaactttatttcctacctccagttctttcattgtattcattcattcagt

SEQ ID NO: 62002 - DNA, 572 bp, Homo sapiens
aaatagacaaaatagatggcatttggaccaaccctgagagaaactggactttctctgaaggataaggacatcgttgtttggggaacggggctgagggtggtacaaggaaggaaaggtgtgtttgtttgtttgtttttactttgcatctttataatagagctaacaaaagaaagagatgctcataaattgttgcaatactttgattgtctttgggagtggccagaggttcaaattctttggaaggatggatatctgtgctgacttgcaggaaatatgagtcagcttttctcatgaactcagcactgttgttatagctaggctatttgggaaacctgaagcagaacaaatcagacaccacaagtcttttctttttattgattggcccagacatgcatcctacaagggtggacaacaagaatgccctttttattgtcaagacttaaaggaactctgccagcaaggggaaacacctgcaattgagaataaactaaaaaaaaaatttaaaaaaagccctcctcttttctgtctatataatcactcagaataggagacacacacgtctttagtccata

SEQ ID NO: 62003 - DNA, 662 bp, Homo sapiens
agaattttagaatgttagtaagtcctatgtctaaaaacaatcaatgtaaaacaaatattcatacctagagaacacagtgaaactgtttataaggaactaccaaatgcaaaatagactctaactgatgttatatagagttttccaaagcaacagggaagtggaaaccagcacatttggggattagagtctattggaaatagttacagatgaaagttttgggaaaaatcgataatgcccaccccagttctcagaactgaggaattcaaagaatttgaataactgaagcagaagttcacatgggtaaacaagaatgccatctagactggatgtaactaagctgctaactagagtggctctgaaaatatcttccaaaaaactttgctcttgtcactactgtcactttgaattaagagagaaagatgtatggcttaaatgagtgcactgcctgtgagacaaggttttgttccatatgttaaccagctgtcgagtaaaatttgtcattttccaggactgaaacaagaaagacactagtgatatatgttttgtttggaagagactatgcaaagctttgtaccatgattattagcctatcattcctaggaagcttcatacctgggacctaagaaacctcactcaatatttttctttttggcctaaatttt

SEQ ID NO: 62004 - DNA, 1774 bp, Homo sapiens
aaaagaaaagaaaaacttgtaattccgacttaaaaaactggggtctacaggtcttcagatatgttcttggggctctgtgacttctcaaatttgagaaatactgaatcagactacatcgcttaataaagaaaaaaattgatcaggtcccactcacagttaatggaagcttctatgactagatttgtagcacaagctgctgtctttcttatctataaggagtggacatcttgttttagggccttcccaaatcatctgttcaattctttccaggagagggctgcaattagcagtatggttaacatttaactaataatactgacgtatgttggtttagcccagatgctggcagcttttaattctccaaactcctggcctgaatactgatcatgtttcctcaggctaaaagccagcaaaaagaatcacctggccaaacatcccctttcagtctgctttccttagaatggcctcccaggggagctctctgggcaaacaaagctgttgacctagtttgaaggcctggaaaattatcatgtgagtcactgggacaacagagcaaagtgccaggcccctgagaaactgtaagcacaggtttccgatgtcatctatgtcctcataggctgagagaggagtcccatagcggcctgccacttttcacccagctgctccttcaagtggtttccaagctccttggccctgtgcatggtgccgcaggggcccattcctgttttcctcccagcgggctctgaaaacagcaactcagagagtgacagctcagttgtaggaaaccaaaacaaaaccggatacttagcggaagtcctgtggtgttgtttggagcaaggccacaagccctctctgggaaggaagtgctgaagcagctacaaaaatttcaaactgaagaccaggaatccagaggcagtattttaaaataatactcacatgagcgaggcagggccttgcaaaagagcacctacacattacttaaggagtgttttataatgttttgaagatgctacttcctaaattacacaaagagctagagaagttagccagaaaagcaatgtgggtaaaactgttgttacatttagatgggttggacagtttgtagcctagatgtcagaaagagtgctgaaacctccatgggtcctcatataacttccctgggcataaaggaccccttaagaagggtgagtatcaaagcagaggcttctaaatattcaggatagcatgaagacagaaggaggacatattgacaggactaggtgaggagacagttcattcatggcttttttttttttttttttttttggtaacacttgattttttcaacacttatactagggtcttcttcatcaggaggatgtggatgtttaacatatcattaggcccgggatcatttaaatccatgtttggtgagtgctttaagagagtgagtgattattaaattccttccattgtaggaatggcaaatgaaatctccttaatggttttagagaataagcttttgtgcctggaagaactagaagacaattcgatcaccaagttttggtgtctttagccccactcctctcgttctcctcacttaacttctttcctttttcctttctgcctctgtctacttctgacagagcaggtgaacaaacagcaaatgtgcagaaagagggtgttcacttcccaccctggtgctgttgctgcagactgctttagagctgctgtctcctgggctcaggcaaagtgccagcatcaatctttgtcatcaaaatccccgtgtctgccc

SEQ ID NO: 62005 - DNA, 2760 bp, Homo sapiens
aattttcaagtttcactgaagcttttgaatcaaggcttgaaagcccagggttaaaaaaaaggcagtgaagaagctcattaagacaaccccccgccaggtagcagatagcacctgaaatgcagtgggaaatttgtgaggtcttcataggcaaggattaaattttacatctccatcttaagatgtgtcatagttgttcaattacttagtgaccaaaaaagtgaattaaagatgttgtcaagattaaaaaaacaaaaaccaatgcaggttccaccgagatttgaactcggatcgctggattcagagtccagagtgctaaccattacaccatggaaccgccacgcatgtgtagctgccttcggctgtctaatcctcagagaaccccgcccccatccacaaacccaccactcacaggcggtcccgcctggttccagcgagccgcttccggcacggtagctcgagaaatgagcaagcggccactaagactatggtagctaggagttccaggactcagtttcccctttgagcctcctttagcgactaaagcttgaagccccacgcatctcgactctcgcgcacaccgcccttgttgggctcaggggcggggcgccgcccccggaagtacttccccttaaaggctggggcctgccggaaatggcgcagcggcagggaggggctcttcacccagtccggcagttgaagctcggcgctcgggttacccctgcagcgacgccccctggtcccacagataccactgctgctcccgccctttcgctcctcggccgcgcaatgggcacccgcgacgacgagtacgactacctctttaaaggtgaggccatgggctctcgcactctacacagtcctcgttcggggacccgggccactcccggtggaccctcgtgccggccacccctgcactgatataggcctccctcagcccttcctttttgtgcggttccgtctcctacccagctcagcctcttctcccccgctcagacaggggtccccatcacatgccgctctctgagcgacctctccataggccttcgctggcctcagagcccctccctgcgtgtccttcccctggcggactgccttctcccacatcgtcgaattcctttccccgggttctacggccccgccgctcctcccaccatctctcttttcgggtgtagcgccccctccccctcggcgtacacccttcccagctcgcgtcctctcccgaagcccctctgacgggttcttcgcttccctcttggccttgccttcggtgcagactcccattacaggtctttttcttatctgccctctttcccccctcgagcgagcgtctcttctgtatctcccctccacttggacggccgcccctctaagcttctcccatcccgggtccaggaccccgtaaaatctgagcgggccaagggcctccgcccccaccctccgccccgcggttctcgcggtccttaaccttctctgaccgctccctctcccactccccatttggcaactctctctaccttccctccccaaatcgtgtttagagctcccttgtctccgttgcgacctgggtggtgggagggagggtaagagggatcgcccatcacccactcgcgcacttgtcgcagtgacccggcaggctgacattacttcccacctagccttttcttttcttgccctccctactcagtggcacccaacccgggataactctttactcggttcgcgagatgaggttgcggatgggtggtggctgttatccttgccagacctgaaggcctggttcctgagcaggaaaggttgtgcgctgcacaaatactagcttgctttatctctatgaactggttgcttcctgctgcaacgctgggaggatccaacaggaagggaagagccctagttagccacatacctttcccaaaaggttgggggtgggaggaagttgtgtgctcttttggttacattaaatatttattataagatacggaaacatgtagtgcccttggacagaacatattggagggtcagggttggttagaaagaattgcttattggttgagtccggaaggaatccggtttttttttttaatcaacgaagataaagggtacatttttcaatgagaagagagtacagtagatgctttttttgttcagtgaatgcactctcactctgatgctctttctctgctcctgaattgggaaggtagccatcagtagtgtgccgaacaaagatcattaccactgaggaagaagccattgctattaaagctttactgtggagggtggagtttcaagagtgttaagcatggtgactgtttctgtctttgccattgggtgctaagaatgattgactaaaccaagcaggaaagatttctttgctttcccaatactttgcaaatcttgttatactaactagtctgctgttatactcttatcatctcttactcctctgactcagaatattctactgtatagggtgaatacttttggtatccaccctccccctccatactggaaagtactttcagggtacttagttcattttacaaatacaaaactgaggcctggattacaaaaagtatatgacagcataccttttgccgaaggtatctgagatgatgtgaaactatttgaatctcttgagactttggggttaaaggttaggtttgtgttttgaaatatggtataatggtagtgtgcttttataaaggttgtctttgaagtaattaattcagaacaagatagaccgtcagggtatttctcctgttt

SEQ ID NO: 62006 - DNA, 2948 bp, Homo sapiens
catgtacgtttgtgattgtgtcacagtggcagtttaaaggagaaatcctttgccagaggctgcaaaagctataaaagttggagtggaacagtgcttcaagggaagagattggttttcattttatctgcattgtttgattatataagtacatgataacttcaatagggataccaaaacaaataaataaattttaaaaagaacatgaaaggccaggcgcagcagctcacacctataatcccaacactttgggaggccgaagcaggtggatcgcctgagaccagccgggccaacagagcaagacctgcccccctcaccctcccatctctacaaaaaaagaaaaaaactttaaaaaaagtacatgtaattttaaatgaatataactttttagaaatgttcggctggcagggttgccggcttatgtgctgagtcttttacctcgtttggagatagcgagagcaacgaagagaaaacattaattacccggtattagtattaatacggcggctccattcccacatggacctgggggggacaaacaaagtctcctaatcttggacagctgcgcccagcccttcttcacctgccgtccaggtatcatcctagtcttccctccgtctctggggtaggtcgtttccacccctccgccctggtccaggccactgagggaagggaagaaactaaggccgggagggccgggccccagcctggagcgtgtagctccgggcctcccccgggcgcggcagttacggcggttccggagccgcggcgcctagggccgaggggcgggtccgaggccgcggccttgcctccgccgcgcccgccactccgcggccgccgggagacacgccgccatgctgcagaagcgggagaaggtgctgctgctgaggaccttccagggccgcacgctgcggatcgtgcgcgagcactacctgcggccctgcgtgccctgccacagcccgctctgcccgcagcccgccgcctgcagccacggtcagggccggggcgggggcggggacggggccggcgggagcgggcggccgcagtgaggggctgagcgcggccgggaggcggagcgccagcggcggggacacggaggcgtaggccccgcggcctgcgcccgctcgccggcctcaccccccggctctctgccggtggggacccagcggcccgggtccgcggcttctggggcgcccgggactcccttactgctccgccctgtccaatgggagggcccgacagacccgcaccccatgccggaggccgggtggtttggctcctcagaggggcctgagggcgcggaagccgaggcctcctcccgccgcaacctcgcgccgtggagaaatggggaggtcccgagctgggagcccccgggagctacaggccagctgctgccgctgcgaagctgacatcgcctgctttgcagccacaggtttcctgacctgcccgcactgttgccccagacttttcccccagtggagagccacttcaccgtagatttgtgaactctctgggcccgcactggagcggaaggtcacggggaagttggactggggactcctgggccccagtccttggtttctaggccacaagggtggccgatagaacgatgcacgttactggctctcttcccccatgggaggatgagaatgggctgggggtccttgtcagcgaatgtgtggaatcctccaaacattgtgattaaggtgaacatttcagttagagcttggctaaccagctctcagatgcaggtctggtgggaaacctcacctctgcacgttgcttgcacggagcattttctctgttcaatctttctggcccttggaggctgctgagcacgtgcagaagcttgacacagagccaactttaaattgctgggcatcatacacaagtggtataaatgtgggggtgcttcatttgaatgtgtttgtcaatgatgagttaacactgaaatattcaggttatgctgaaaatgtgcttgttcgttgttaaatcagccatcctctccggcacctctggcaacaccataaaccacgttgagcttgtatttatcacagcttccaaaaaaatgagggtgctcaatatacctgaactttgggcctctaccaaagtagatttgtcttttaaaaactcccaccatggagttaagactggaagttattttgcatgccagagcaccgtgacatttaaataaaccaggtttgaaaacattgtctaatctcttacattttgaattatgtttcagatgggaaactcttgtctagtgatgtgactcattacgtgatcccagactggaaagttgttcaagattatcttgagatccttgagtttcctgagttgaagggaattattttcatgcagacagcttgtcaagctgtgcagcatcaaagaggcaggaggtatacgttttgcattctttatttctatatggcataggttccccccaccttagaaaaggtcccttgtcggagggggatgggaggaattcattattttgtcagaagggacttttaaaactaatttcgtattctctttgatagtgaggaatgcagtaacattattttatatttctgcttcaacacctggccaagagatctgactgtagattagtaaactgcagtgtccccagtatgtgggtatttaagattctagtgtgaattgtcttttggcttgcatttttatagtggcagggttattgcttatttcttgttgataatgtgtattatttaatcttatttatagatacattgtttcagaagcatacgttcttttcttggggaaaagagtactttatttttaaattttagactcttttattggggatgcaaattgtacttgtaatgatttattcaatgaaaccagaaatagcttgttttatttttagattactagtgtaactaccagccatagtcattgtatttgctaaacaaaggctttctaattgaacaagt

SEQ ID NO: 62007 - DNA, 1156 bp, Homo sapiens
tactcaggaactggccaagcatggggtggggcttgtcaggaaactggtatttctttcttctatttgtagtgaataagatgctcaatagacgacttttactcctcgtcaatggtcgcataactgtctctttttagacacttatgaaattgtctgaacttcctcctctacttctccaactcccagaagagtgaaggtaacaaatgttatgtccaaaccacggtttgttcccagaccctggtttccaatgcccacctcttttccaagaagtccaaagagacgcccctcatcgcaaaggaagtgctaccgtgctgcctcgatgtcccccttgggtgccatccctgaaacatcgaacctcccatacctcttctccagccgtccccctcatcctcgttccccgcctaccctctcttcaacttcattcattcatccaacattcgctgggggatttctacattgacacgccccggacagaagcctggggtaaagatgatcaggaacacgttccctcccgctaagcggcttggcagagtaagaggcatcccaaaacctaagcaaccgggacacgcgcccacctccccgcctctccaggccgggtcaggtcgaccccccaacctcctgacccccttcctgcgacaattaggctttcccgctagtctgtctggctccctggctcttccatctggctccctggctagtccgactcccctctccccgcaagaacttcattggcccgccagccagctctcacctcacgcagaaaacacgggacacagcgcggacctcggcgtgcagactaagcgcgcttctcgcgatactcgggaactcctggggcgagaagggcccgcagcgtttggcgccaaatccgtgcggggggctgggcggagcctgcaaaacccgcctctcaggttccgcccagcacgccggtcccgccttcggtcccacaatttccgccctactgaattcttcagaggaactcagttaagcctccttatttgcataaagttaatacttgttattctggggtttttcttttttttttttcttgagactaagtctcgctctatcactcaggctggagagcagtgattcgatctcggctgactacagtctctacctcccgggctgaaacgatcctcccacctcagcctcccttccc

SEQ ID NO: 62008 - DNA, 1057 bp, Homo sapiens
ctcagctctctataatttgacctgcccctgagcaagagggaattataaaaacaccgataaactttataatggctctgctgtataggtcccacatcctcttattatcatagttgcctgatcactgtagctcaaatggtcattctcattttaaatttcctgcttgtaatctttgcaaagcacttggcaggaaacggatgatgcaggggttttccattgagtggaagaaagcatgagggaaaaacaaacaacaacaaaaaaccccaattatgacatgtatttgaatgaatgtcctgggaaagagatttgagatttgtttactctcaaaccagacttgaaaataagaatatccgggattctggactgtgatttcaaaggaagtcacgacttccttctccacagctgccctcgaggaagctggtatgtcctgagtatatcttctttcactgcgctatccaagggtaaaaagcaaaataccacagtaccacgtctgccaagccagaacgaggtccctaccctgactcccaccaaaaaacaggtgctggatctgacatcctgtatggtttaagccacatccttagagagcaattgaaattgcatcatctttcaccttgttgaggcatcttttcctttaattaaagggcaagagaccattaaaagtggctctcaaaataacctagtggtttcattgcattcagaatgtcggacgtgaagaaccaaggaagcggatgtccttggtggggggctggaggggaggagggccagcaggggcatggggcggggtgcagaggggatagtaatatcactctttgcactgtaactctttactcagttactcaataggaacagctgccaaactcacaggagcttaaaaatccagacaatggatttaaaagcaattgatatagagccagagttctctcaggattaaagtatagaaaaatgtggtattaaaataagaaaaaaagtaaggtggaatttcttcatgtgaaataacttccgtgtgcaatgagcaagttttttttattttgaattttccaactgaacttttcataataaa

SEQ ID NO: 62009 - DNA, 2251 bp, Homo sapiens
ggctagtctcgaactcctgggctcaagtgatcctcttgcctgggcctcccaaaattgggattacaggcgtgagccaccgctcctggcccgaaagagtgtttttaaggctttaaaaaaatattgccaacatggtgaaaacccgtttctacaaaaatacaaaaaggatccgggcatgacggcgagtgcctgtaatcccagctactcaggagactgaggcaggagaatcgcttgaacgtgggaggcagaggtggtagttagcggagatcgcgccactacactccaggctgggcaactgagggagacaccgtcttaaaaaaaaaaaagttcccaagtctaaaaaaaaaaaaatcatcaatctgctctcaaaaactgtcgcaacaatttacaatctcatcagcactgagtatccatttccttgcacccttctcagtagtattaccattaaacaaacaaaatttatatgcgtcagtttgttgggctcaaaggagcctctcgacaagtttcctattccccacgctgcctctcctctggacacaggaaggggtccttttccttatttattttgttatttcattttcgtcaacacggctcggcttggggacaggggtcgggggcaggccggttaccgcagaggtggaggccgcgcggcacctggcctggagagctcaccacacagcgacacagacttcttctcagctgggtccacctgcttgcctcggggcgacagagggcgccacggcgtccgcgacggaccccgcccccaggcagtgcgccgcgctcccgtgacgtatttccgcgtcatctgccgccgaggcttgcccccattggttgtctgcgaggcaataggggcggagccgagtgggagtgtggaaagcgccgcatcccgggtgggaggcgaggcttccccttccccgcccctcccccggcctccagtccctcccagggccgcttcgcagagcggctaggagcacggcggcggcggcactttccccggcaggagctggagctgggctctggtgcgcgcgcggctgtgccgcccgagccggagggactggttggttgagagagagagaggaagggaatcccgggctgccgaaccgcacgttcagcccgctccgctcctgcagggcagcctttcggctctctgcgcgcgaagccgagtcccgggcgggtggggcgggggtccactgagaccgctaccggcccctcggcgctgacgggaccgcgcggggcgcacccgctgaaggcagccccggggcccgcggcccggacttggtcctgcgcagcgggcgcggggcagcgcagcgggaggaagcgagaggtgctgccctccccccggagttggaagcgcgttacccgggtccaaaatgcccaagaagaagccgacgcccatccagctgaacccggcccccgacggctctgcagttaacgggaccagctctgcggagtaagtatggggcgggcggtgaacctcggggcccggctggggaggcccgagccggggagcaggagcgcgcgccaggctccgatctggtttgtcacgtacgtctggggctggcagggggcgagaaactcccggccgccgaggtatcggtgactaagcactgattgtgttcctgactcagaccagttagcggatcccgcgggtctccattcctctctgtaccccttttcccgaccgttttagtggttcctggccactgtacagtcttctcccaagaaaataaaagctagcacgtctcccctgcctcctcccagttctgttctaaatgtgatcatctgggagtctggcctgtaacggggagaggaggctaatgttttggaaagaattaagatcgcatctgtgcttttgagaccagctcagggtattaagtgtggagcatcatcctcaccttcatgcctgacacctgtggggcctgagtgccttgttgcaggccaactgcctggccagcgggggcgtgctggaagtccgtgtggacttcgtggcttttccttgctgactttggaggttcctggtacttggccttcctgggaaattgctcaagaaagcggctttcttcttcatcctactcttcattcattcattgaacaaaccattttctcactaatgatttcctagctttccgtacttcaccaggagcccctaaactcctgacctgaggcatgaacaccatgacctagaaaccacatgctaggtgctccatctctgcagcttccagcgttgcttacaaacgagcactttatttcatta

SEQ ID NO: 62010 - DNA, 403 bp, Homo sapiens
ctggtttcttccagtagcaagagggggtaaaccctactacttaagtaccctttaagcctctgcttatgtcaagtttgttcatgtccatttggctaaagcgggtcatgtgtttcaagccaagatttaaaaagtagagtgaagtctccatctcttgttgggaggagctatgaaatatggtggcccgtttttttccactgtatcacagtgataaagttgaaggttcaaattgtgactgtgctacttgttgtgtaaccttggatgagtcatttaacttctccaaacctcaggaaaatggagaaaacagaacctacctaaagggttgtatgcagattaattaatacatacaaagcacttagaatagtacttaacatgtagtaggcacttaatacattttacctgttgc

SEQ ID NO: 62011 - DNA, 1279 bp, Homo sapiens
tgaatctgggaggcagagttgtagtgagctgagatcgtgctactgcactccagcctgggcgacagtgtgagacttcgtctcaaaaaaaaaaaaaaatgctgttagatctctccctctcacttgtttccctttcgatgttggctttcttctctcgggccagctgtctaccagatggaaccatggtttcctgctttacagttttgttatcagaagagtttttctcacttcaattagaaagttctgagtgaggactcctgattggactgttaggggtcgtgtgcccagacctatgagatcaccgtggccaggtgacagggagctgtaagtggcccagcctgggtcagggggctgccctgtagccagggacaaggttctcattgtgtcagtctccaccttaagctgcatttgccccaaagaagtatgtgtgatgaggagacaaggaatgcctgacatctgtctttaaattgtcaaacacattcttctaagtctttccattacgggttatcccaagctaggaataactggtgagtagtttcttgaccttttttccagaccttttttggtgaattatgttaagctgtgacccaggcacaaatggggaggccatactttggtggagcctgggtcacataaatatggtgaccttactagaaattctttcctacttactcattgtttaataatgaacagaactctggcctatcttcttttgtcattgtttaacacccacctcactacctcccacctctcctgctaaacaaaattagccttcagcaggtcaaaacagatttttagctaacttccgtttcttgaatagcatatgataagaactcaagttagccaggtttgttctcctgcctgtaggtggttgattgggtttgtgatactgtgatacattgcatatctgctcctctgaggtagcccaaataatctggtgggggaaatatgctgttttaatgttattttgtgacctttggcaagagattttatcctccagcctcaacttccatatctgtaaactaggactattctgccaaatattacgaagggtcatgaaaaatgagagatcaggctgggcgtagtggctcacgattgtaatcccagcactttgggaggctgaggcagtaggcttgcttgagcccaagggtttgagaccagcctgggcaaagctgggagaccctgtctaccaaaaaaagaaaaagttacttgggcatggtggcgtgtgctgaagtgggaggatcgcttgagcctaggaggtcgaggctgcagtgagccatga

SEQ ID NO: 62012 - DNA, 3259 bp, Homo sapiens
gatgtcctatatggtgtctatattatgactattaatatagacaccatataggtttgggatgtcatggtttagcatgtttcctagatatggtctgccctcaaagtgagtgtcattgtttgctgatgtctgctccacaaagccctgctccaggggccttcaccaagtcccagccttggtttgctcacctataaatgaggataattgaccctggtctatgcacattacaggacagttgtatgaatcagaggatacagcggaagaaaaaatgtttggaaatttaggtctctgcaaactaagggccaatgtactggtatttgtgacagtgaccggatgggtgggatggggtgataataagagtgcaaggaagggggatgggggcatcgttttgactctgaggagcagctttaaggcctctcacattccagctccaggtagcaaggggttccccttgactggcagggtagatgtacctgtgtaggctgttaggtgagtgactccagtggaatggaatggaatcatgactcagctcccaccctgccacacatatttgtaagaaaaagacccacatgctccatgcctggtgcagaagtctagaatgggaattcccgccaaaccctgtccccttctagcctgtgtagcctcagcaagcagataggtcttattacttgtttttttctgcctccttcatgatccagccatagatactatatcttaccagtaggggtggttgaagcaacagactttgaaatcctgactgttcatgataacggactccttcctgtggatcatctggccaagtctgcattcttagagagtggaaatcgactgtctttctgttctacttctacagcagctgctcatttcatctcctgacagttgcttcttgaactcagaacaaagggccttggtgtacagtgtttgcaagccaagggctgcctctgatggcggacgggggtgtggtcctgggactcgtggtcagggctggtctgtgtggaatgctgatccttctcttccccaatctacctgtgtcagttccctccttttctattttctcttccctgcagatgtcaagccctccaacatcctagtcaactcccgtggggagatcaagctctgtgactttggggtcagcgggcagctcatcgactccatggccaactccttcgtgggcacaaggtcctacatgtcggtatgaacagaagtttccattgcttgagcttcttgtacggtcagggagaggagcccagtgggtgcctttcctgtggagccagagtcttgtgctgggtaggggacaagaagtgagggaggaggcacagtgctctgccctgaggagatgaagttgaatgggaagatggtcttggtctttcttaggccttggagcataactgggatattggggccttgactcactgaaaggactgtccagctccagagtgtggctttctttctgaaggattgtgagctccagctcccctctgggcatctctacatgatagtcttcagatccacaaacccaggatgctcagatataatccaccccaaactacctcaccttctccttttctcttagcagtaaatagacagcatcatctccctggtttcccaaggtagaaacctgagcattggctcttaacctgccttctcagcagcccgtcctttcagtatcttgtagctcccaactcctgagagtctgttcagaattgtccagcctcttttctccctcctcactatgtctgtcagacatgtacccctccttctaactgcagcatacctggacccctcgccagagtctctgctccacttcagccaacaccctgtgttgagggtatttcctcctgctcctggctctgctggctcacactgtcaccagagcattgtgtggggccatcctcacactatggcagcaccagcgtgttttcttccctcctccataccaccggttccttggggacagggacaaggtgtctctcttgtccctagtgcctggcatggggcctggcatgtggtaggtgttcagggaatgcttggcaagtgggtagatgtttagttggctgagtgggagggtacatggataaaacatttctgagaatgatttggaaaggtggaaacgtgagtctgggccagtgctgaagtgcggcaaagtggaggagcgttggagtgagtaggcagtctttacagaagtggcggggagtgcaggcccgcgtggagagggggacaggcgcagaggctcagatcttaacttgtacaaagcattttatgtgttctctgtcaaagcacatgtcatgtccctggaaggtctcatttgatccatgtggttgtcccaggaaataaagattattgttcccattttagaggtgaggaagtctagattcagggaggttaagcaacctgcctacttaaccttgctgagccaggattgaaagctagctgcccccttgccaggcagacgccctttgcacagcacaccctcatttgcctcttggggaggatttggcacctgtgcccagatcccagtgtgaacacatcctcattccttcttgctggcacctaccccccactgtgactccagccactgtcaacatcactcacctggcactgacccacatccccacccctcccctccagtgacccacagtggaactctctttctctgtcatctcctcattgcttcttccctaaatgtctaataactgagcagctggcatcctgggccatttgactgccaactctcaagttcaaaatccattaacaggccctgggagttactaatcaagggtttaatggttggggtttttgtggttatatggtcagttacgaaatagtccagtgttggagttagtgaaaaatgctactggagaagttaatgtctacgtgaatatactatgggcagaataaagattttttcggtagggttcttgaaatacatgtgctatttcaaataatgctcattaaaaataatgcttttgtatagcactgtatactttttttctctttggcttttcccaccaatatcaaccaatatttgtattgcattttacaacatttgacatacattttctttttttttttttttttgagacggagtctcactgtgtcacccaggctggagtgcagtggtgcaatctcggcttactgcaagccctgcctcccaggttcactccattctcctgcctcatcctcccgagtagctggaactacaggcgtgtgccaccacgcccggctaatttttttgtatttttagtagagacggggtttcacc

SEQ ID NO: 62013 - DNA, 819 bp, Homo sapiens
atcacccgacaagtgagtggacttgacttggtcccaattctaaatgtgctatttgagatcagtggttccaacatggttacccaacaggcagcactggccttctacctgtgcctttccttgactggatgagagtagtactgcctttggactgcagagaagactttaaaaaaaagtagcactggctggtgggaggggtgggatggggagaggagatggctggagcaaggagccaggcatttttcttatctcaacatgtgtttgcagcctcctccaaaactgcccagtggagtgttcagtctggaatttcaagattttgtgaataaatggtaagttggctccttgttctctggaagcgtatactctggatttgtcaggctccccaccccatttctggaagcaccagcattgcttctgcaggcagagttttgccctttaccctcccgtctgatgattcttggctgctgccataagcccttttttagagtgccaagacttatgtggcatgtctaactacatcatggatgtagtagctgctccttttggtacttgctctccagggattggcacgttgctttttgaccttagtttaactcagcaagaatgtattaacttactgtgggcatgatactgtgcttagaacaggaggatgaatcaagcccaggcaatcctcggcctctagtgtgcagagaagacaggcatgcaaacatgttatttgagctagaaccagtgccaggcaacagctcttaccttgtctttcttcctttaagcttaataaaaaaccccgcagagagagcagatttgaagcaactcatggtgagt

SEQ ID NO: 62014 - DNA, 1763 bp, Homo sapiens
gggcaacatggtgaaaccccgtctctactaaaaatacaaaaattagccgggcgtggtggtgcacacctgtaatcccagctacttgggaaggtgaagcacgagaatcgcttgaacccagaaggcggaggttgcagtgagccgagatcatgtcactgcactccagcctgggcgatacagtgaggccctgtctcaattttttgtagagacgaggtctcactatattgcccgggctgaggggctgcattaagcacaggtttgggaagtggcccacgtgggcctaaatcccgactcctcctcaaggccatggcgtcagtaacaagagccaccggaagctccagacgttaggacaagtctcttctcccagggcctcagtttcttccttggtagcatgggaggatctaggagttccttctggcttggcaaaactagagcatttcaagcgccaaaacaaactagaaaacagcagctcaggaggaaggggtcggtggccagaggggtctaggcgagccttcgggagggagcacttcctcagcgtgctgtctgagggcgatgaacatttacaggaagcagcaggtaggactgcacttgccaaacacagatccctgagcctcaccctagacttgcgaggtcacgattctgaaagatagggcctaagaagcgcacagcaaactccccaggtgattcagatacctgtttgtttgtaaacctctaaattggcgccaccacagctagtgagtagcggagaactggccgcagcaggtggtcaccacagaggcccaggttggggggaaatggtcgctcgggaggaatggaggaggggcaggagagggccgcggggtcaccttgaggcggttcagctggtcgtgcagggctgccttcaaccgcagcagcgtctcctcctccttgcgcagttcctgaagccggctcagcatgttgcctggtcacatagccaacctccgggctgctgtcggcccggcactcggtgatgacgccatcgccgccgactcccggaaaccgagcggggaggcggggctgcccgacacattgaggaaaggcgaggagtgcgcccccttccggcgcccgccgtagcctggccactccgcgggggacgagctgcaggaaggggtacagcctgtgtcaaaacaccttgattcatgagtaatgatcaggattttgaaattagatccatggagctgtaaagaacctgaagaaatcttgggtttggctatcctttaatccgataggccatttgcgcaccaagtggtcaaacaccgtttcaaatgaccgggtgaacagcacttccaatgtggtgtgccaccaagtggctatctttaaccccacaaaacttgcacatgtgtttgaaggcaggcaccaaatcagtagcacatgaactctactgtgttaagaggccctgcagggtaggactcacagtggactttaaaggggtaaggctgcacaaaatagagaaataaagagcatgaaaataaagccgtgctaagaaacgacgtgcttaagaactgagatttggccctggaaatggggagggttaacagatcaccttggctgtgaactgagactgtcttgacagttcgagactgtcagagagaagctgacagtttaacaatccagatgcaaaacaagacttttgacacaggacaagaggttaattctagggtaatatttgcagtttagctttatgggtaaaaaaaaacacccttatatctggaggcatttcatgggtacttcttttgaacacagttggt

SEQ ID NO: 62015 - DNA, 2776 bp, Homo sapiens
tagtctgatgacctaaaattgagaagagataaaagttgtagctgcttcatcatacataccaacccatgactattatgcatggtagcaaacagcatcagaacatccgagaaaatcatgtggttcagaaacacggaccaatgaagtggaatttcatcactactgtaaagcagtccctaaaatatctgcagaagatataaatccatacctgctaattcactgacagcatagggctgtctgttgtttttgcgcaagttggtgtgaacaaagttcacaatatctggtcgaataggagccttgaatacagcaggcaaagtgacatttttgccagatgactcccccttttcggagtacaccgatatcagtgggcgagcacacgcctaaagaaaaagacaaggattatttttattgacaagtaatgtttgaagcaaactcttctcatacgccaacaataccattaaatactcaattgcagaagagactggtatggtgaggcaaacaacccttaaaccaaaatagcagtaaatgactagaacccttagaatctcaacctctactgcacaattttattttcaaaaagaattgtttatcataaaactttcaaagcaagccttataaagcacaatagctaaatcaaaaccatattgtaaggtttggagatgctgtttaatgccaattaatcagcaaatcctgtctacccgggctctactcatcccaacttccatccctgtcccactcaccctcaccctctactaaacacgtgtttccaaagctcaccagtggaaagactggtgatattactttttgtttaaacctccaagtcttcccaactgtgagtaaactgaaaatcctgaggctgacctacaccatcttctctacttctgatctcaactcccatacactcttccagatatttttcggtctcaggaccacccagcacttgcctcagactttccaagtgttcactctaaagctcctctttgccagctttctcacatccttcaggccactttaagctttctctgatcactgtttaaagccaaaccactcctattccctatgttttcatctcttactaccatagaatattactacgtatttagtccaacgcaactaccatcccagtcaggacagtgtctgttttgttcgcttaactcccccggcacacaacactacatagtatatacgaacactatttgtggaaaagcagtacacatataacactggtcttattacgagttggctaaggattcaaagattttgataacaccgaacaatttttaggcgaagagaaccagaaagcttttaatagaaatgattcccaagctaggcagagacaagcatccagaaaaaggctaaataagcaaatattctaacagaaggtcccactgctcctgagaacgacccagtgctttccactactgcttcccggcgcgtcctgtgctgggaaccccacgttgcctctaagatggctgccgtatcgccgcacatcccagttccacaccagaaaaagacgcctttggtcctcatctccctctcctcgctctatctcctacagattctatgctccgaaccccaaatccttccttactggccccgagatacggggtaaggccagccaagagaacttccactcaccatggcggagagaggagacagccacgctcctctcagcccggctgctgccacaggaaaaggaagtgcttaccactcccgctgtatatgtcaccttccccttgaccgccccaccttgccccgcctaagaaccaacacggatacaaaaaatatctctctaccacactacaaaagtaaaaacgagagtgttatttctttatttgtgggaaattacggtatctattttcttccaaacgtaataataattcttagaaaatagggactcctttttgcggaataatccatagggggcgaggccaactctcgcgagtcgaggtatcttctccccaaccactgctcttattttaattattgcagacggaagttgaagactattgacatagtaaatagctctgggtggcttgaaacgaaagtttaactttgcggacaaacaggacttattgtagggggtggtcaaaatagtcccggcggggcggggccatgacccctgacgtcgccggtccggcgcgcagttcagtttggcggttccggtaccgctctcacattggggcgggatgtgggagcggctgaactgcgcagcagaggacttttattctcgtctccttcagtgagtctagtctcttcttttggctggggtcctgggacagcacttctttccctgggtgtctggatccccgccctaagcctcttgccactctggggatcagcgctttgccagctttcctggggtccaggagttggggagaggccggttctcggctccggtgtggggttgaccgtgtgggagcttgcttgtctcaggagaaaacgtgtacgtcatcaaacgagatggaaggtggcaagtgttccaagaggcgatttattctttctgctgatggacacacttgccataagtagaggcaccacccgggatacggaaaactaggtgttggcatccttcccctgtttaaagccttgttgactcctaagaatgaaatgtggtgttagtctgttaatctctattattcgaggtagttgccacatcagctacaattgtaatgatagcagattggtgtgttgcattttgaaaacacctttattttttcactgtgctccaagacttcattttattcttatggtgaagtactactaccaaggggattcc

SEQ ID NO: 62016 - DNA, 610 bp, Homo sapiens
taattggagtgtatattcaggtcaacttgaatctatgcttccaggtagccactctcaaatttggtccaaataaactgtctacttacattaattccgcctcagcttcttccttttaggttgacagttttctgttccttctttgtctttttcttttttattgtttggcccgtccccctcagttttcttttccagcataacaaattaccacatatttagcagcctaaaataacatccattgattagctcacagttctgtgggtcagagtccaggtgagaatgactggattctctgcttagggtttcagagggctgaaatcaagatgttggctgggctgggctcttatctgaaggttatctgcttccaatctccttcaggttgttggcagaatttagctccttcaattgtaggactgaagtctctgttttcttgctgggtcagctagggcttgctctcagcaactggcagccactctgtattatgtgtggcccctccatcttcaaggccagcaatggtgcattgagttcttcagatgcttcgaatctctgacttctccagctctcggtacctgaagttcatgtttatttacttcttttctgtctctgtttcctg

SEQ ID NO: 62017 - DNA, 692 bp, Homo sapiens
tgaaatgggttatggtcaggtcttggtgccatggttagtggcgtcagacagacctggcctgcccctcactagttgcaggaccttagattagtcatcttgtctccctgcacctcagtttacttgtctgttgaatcacatggtagaaccaccttggcagagttgtcataaggattaaatgaggtcgagagtgtgaggcttggtggctggtgccaggcccagagccgcggctctgtcggcctgagttcaggctgtgggtagccagctgtgggagacctggcttcagagaacagagtcccctttgactctgccggccactgtagtcattactccacaatcgctgagccctggagagcaaatatccccacaggccagcttttttcttggctgcagccccttcagccagccaggtttgggttggcaggcagagcgagaggtgtggctgtgacgtgagcacgagtccccatgtgtgctgaagctacgcaggtgggggtgggggctcccagcctgtctcagtggctcagggcagcgcctactcttagcttccagagcctggcagggccctgctgctttgggccagtggagggagagcaccttggcctcagtggggctcaggccatccctaaggcatgggtgtgattgttattctcattttatagttggggaaactgaggtccccaactctggtgaccacc

SEQ ID NO: 62018 - DNA, 1402 bp, Homo sapiens
tgtttcaagagaggacatgacttaggccacagggtgccaaattagattggccacagagccccagaaagggaaatggattggaagctgggctgccctagtgtaaccaggtcaatgcaacataaactttttgagcttctgctacatgcagtcaccatactaggcactttgtatgatcaggtagatctggaatcagacattaattctgcccttaagaagctcatagttgaatgaaaaaaattaattaggtaatatgaataagatatctaccttcatgcccccctgcttcacagtcactttgcacagagcctggtatgcagtgggtgctcagtacatgtttactgaatgtaaccaaactatgaactacagtagggagcagacccagagcagtgggatggtgtcccagaggaggggtcatttatactgggctttgatggctgcttaggagtcctctgctccttccatttgtccactaatcctccaccaggattgatgaaggccacagcagggcaaggccctagcttctcccctcctgcccacccagccctcattcaaactttgaggagtctccggatgtgaagaggaagtggccgggctgcggaaggcaggctcatttccagtgtggggcctgggccgccagccccaggtcctgtttacacagcaaggcggacaggccgacagaacttggcggcaaatgagcttctgcctctgagaacagaaggggctggcaaagcccagctaggccaggcgtggggaggcttgtgccaaggggaaagtcgaatctaaagagtgtttcctcctggccaggcggccccagacttttgtctccagtctgtgagcagttcctccagtgattcatagtcagcgggaacttataaataaaccccacctcagcctctcaccacagcctggccgggacctgggcaggggtgtggtaggggactaggaaatgggaagactgaggagaggccctgaggagccatgggggacccaggtgacgctggctgcagggcaggagcacctctggctttccatgggggattgcagggcggttgccaactgtcacgggggctgggccaccagtctagagcaaagaactctcagaggcctggatttccactggctcaccaggagtgtggtagaggaaactaggtagaatttggaaatggctgggctttaaaacacttttgatataatttcaaaataatagaatagagactttgcatataccctgtagccagaatcatccattgttgacgttttgttcaattacgcttcattttctctcctctttatttttattttatttatttatttatttttgagatggattttcactcttgtcgcccaggctggagtgcagtggcacaatctcggctcactgcaacctctgcctcccaggttc

SEQ ID NO: 62019 - DNA, 1269 bp, Homo sapiens
acaaacacaccaacaattccttgcaggcctgttgggcagagctaggctttgcttgggacacctgtcttcagttgcccttgaatctgaaggctttagacagagtaaacctgatgacttacattatctgtgaggaaactgtcagacttctccttctgcaagagcaatgccagccacacctgggctctgcccaggcctcagtctccccatctgttacatgaggggactggacaagttgatctctttagccttttccagtgctcaccctgtagtttcaatgattacactgtcatacctccttgctttggctcctgcagtgccctctgccagggataccctgcctcttgtttctgcctggcccactcctcctcacctttcaagacctgcttcaaaggccactgcttctgggaaatcttccccaatcttttcaactagaagagttcatgccttattctggaatcttacctcatagtgctcgtatcttggcagtgcactgagaagtatgtcctggcccacccaggagcaacctgaaatcaggggctgttttgctcaacactgaatcccagcactagcacaatgcctgacatttagagggtgctctgtgaatttgtggaatgaatgagtaaattaatgagggagtcaatggctggatgaccctaaaggtcagtggcttgggaggcctcccccactaaccatgtctcagcatcttggtaaaactggccggtagttggtatttgatgcggctcagctgggagggctgggtgaagtgcatgtacccatttatttggtttggctggtctgttgccttgtacaatacagccttagtctggggaagctcatgggagccatggggaagtgggacagggagggcccacaatggtctgaagattctggctgcctgggtcaccagccatctgggccagcctcctggccgtctgactcatctccggcggccagggcacagagatgacccagccagtgccagaggtcaccaggcctggccagcagacagaaatgactcctgagagccactgctccagccctggacctagaatacagacagggaaactgaggcctggagaaagaaagcccctgccccaggactcatcatcgatgtgtggaatcataaaagctgagtggggtgggaactcaaaggttactctggtctaattctatatttatctttttttttttttttttgagacggagtctcactctgcccccaggctggagtgcagtggcatgatctcggctcactgaaacctccgcctc

SEQ ID NO: 62020 - DNA, 624 bp, Homo sapiens
ggcagcagggaaaacattggcctgggaacctgtgatctgcggtctggcctgttgcctgctctggagctctgagaaagtcactgcccctctctgggcctcagtttccccatctgtcaatgagttagaccaggagagctctgaggacccctcctgacctcgtggtcctgtttgcagagtgttctgtaaacctcaaggtaagataaaggcacctcaggttatctcacatctctatggcagtaggaatttcaaataactttccccccaccaagtaactggcaggccagccactctggggaacagccctgtaggcaatcctgccaatgtgtgtttgtgaacagagttcatcgaggtcttgctttgtgtaaatagtgtggaaacacagataccctcccacgctatagccctggctgcccaccaggtgattgggtttggatgctgtatcttgggggttgacctttaaggaggcaggcaagaagtcactgttcagcatgtgcatctcttcttggaggatctgtagtttatcaggactctggggaggacaatgcttatgagaaaggagtggaggtctgagggggtacttccaggataaaggatgggcaaagagtagtgttttcctgaggcctc

SEQ ID NO: 62021 - DNA, 3448 bp, Homo sapiens
tattaatttccccatgggcgaaaagtgactgaaaggggccacaagacaggcttctggggtgcaggtcaggttgctttttgggtgctggtgacatcatgtgtgtttgttcacgtgtgaaaattcatcctgctgttcgcttgcgatttgtgcatttaacgtgcactatctccagggaccttcgtggttctgtgaagcacgaagggcaagcatcctcatccgcggtttcaaacaagaaactgaggctaggaccgctactttaatttggccaaagtagtaggggatgggtgtgaggaagtgtctcagtccgatctttctttcggggagcaacggccactctcagagagcgcagcgcgaacagtacctggttccaggtaaagctcagcaaagggttctgaatcctccttgcaaatgccacccttcccccagcgcacacagactctgggcacggccgggggttcgcaccgccgcgcactccccaggctagctccacgcgtggtcactctccagggagacccgcccgccggcgccccgcggtcaccgcgggggaatggcgcccagccccgggccaatgagagtagcggaatttctttcattcagcgcggggccaggctcctgcccggaaaggggcggggcgccgcgccgggggtggggccgccgcgcgcggggggagagggcggggccggcccctctgcctggccaatcggcgccgcgcccggggggggaggggggcccaggccttttttcccctccgcgcgggaccaatcccgactttacaagcttgaacttttgccaccctcggactagcgagcgcgcccgaggaggtaccccgccgcgccggctccaggggcaggagcggccttaacccttcccgcgccgggcgtcaggctgctgccgccgcgcccccgatcccgcccccaacccacccccattttcgcgtggaaacctctctagggaaagcgtgatccctcacctacagccctctccgaggtgcggagagtaaacttgagaagggagaggaagcacccggcctggagggggcccggccggccggcggcccgcctcgctccaagggagggccgtggcgaccgagaggagccagcgagtagacactccccgcctctaccccaccctctccatctccccactccgggcgagcctggagccaccgtacgcaaagcgtcctgagctccctgtttggcccggcagagcgacccccgactttgtgcaaggagcgtagagcccctagtgcagtcacggaagatccgctaccccaacatatccgccgccccctgctcctcagaggctcaaccctggaaggcacacatgcacacccatttttattagcctaccctaggatgggggtttggaacaactttaaagtgcaaagtgtgtttgtaagtttgtgcacaagccagggagaggcaaagcgccccgtttgcgtccgagtctcagtgggtccgccgagccttgcgcgcctgctcgtggctcgtgtaaccctgtgtgtgtgtgtgtgtgtgtccgcgcgcgcgtgtgtgctcgctcgcatccgtgctctgggcgcaacgcgaggcagaaagcgggccgcgggcgctgtcaggccctgggcgggggtgccggggtggtgtggggcgggggcccgagctcggcccgccccgggagccggccccttggagcctccggccctgcaatgggacgtgttctcctttaagagttaagaaacttgaaaccttgtttgcgcaacaatcagcgccgcggagccgccaaagtgtctagactggcatatgatgggaggcagccaatgactccgcggcgctcctccgggggccctcagtgtgcgtttgaggagaacaaaaaagagagagagagccgagcgggggagcgatcgagggagctgagccgagagaaagagccgccgggcgctgcctcgccagacctcgctgggaccccggggccaccgggaggcacttttgtggaggggggagggggggcgacctcggcagcctcggcgcacgaagcgtccgagggcagcgtggggcgggctgcgacctctgcatcggtggactgcatttttaattaaggattcccagcagctctttgggatttttacagcttccactcatgtgttgacacccgcgtccaggagaaactcgctccaagtgcatctagcgcctgggacctgagacggcgttggcctttcgtgcatgcaaatccagggatttaggttttgtttgggatttccttttctttctttccttttttttttctttttgcagggagtaagaagggagctgggggtatcaacaagcctgcctttcggatcctgcgggaaaagcccatgtagttaagcgctttggtttaaaaaaaaggcaaggtaaaggcagggctttccagacacatttaggggttcgcgcgagcgctttgtgctcatggaccagccgcacaacttttgaaggctcgccggcccatgtggggtctttctggcggcgcgccgcctgcagcccccctaaagcgcgggggctggagttgttgagcagccccgccgctgtggtccatgtagccgctggccgcgcgcggactgcggctcggcgtgcgcgtgttcccggccgtcccgcctcggcgagctccctcatgttgtcgccctgcggcgccccttcgacgacaggctgtgcgcggtctgcacggcgctccgcggcggagcttcatgtggggctgcgacccgcgcagccggcgcctcgctgagggaacggacccccggtaaccggagaccgcctcccccccacccctggcgccaaaggatatcgtatgttcaggtccaaacgctcggggctggtgcggcgactttggcgaagtcgtgtggtccccgaccgggaggaaggcggcagcggcggcggcggtggcggcgacgaggatgggagcttgggcagccgagctgagccggccccgcgggcaagagagggcggaggctgcggccgctccgaagtccgcccggtagccccgcggcggccccgggacgcagtgggacagcgaggcgcccagggcgcggggaggcgccggcgcgcagggggccccccgaggcccatgtcggagccaggggccggcgctgggagctccctgctggacgtggcggagccgggaggcccgggctggctgcccgagagtgactgcgagacggtgacctgctgtctcttttcggagcgggacgccgccggcgcgccccgggacgccagcgaccccctggccggggcggccctggagccggcgggcggcgggcggagtcgcgaagcgcgctcgcggctgctgctgctggagcaggaactcaaaaccgtcacgtactcgctgctgaagcggctcaaggagcgctcgctggacacgctgctggaggcggtggagtcccgcggcggcgtgccgggcggctgcgtgctggtgccgcgcgccgacctccgcctgg

SEQ ID NO: 62022 - DNA, 3330 bp, Homo sapiens
ttgctggcagaggttgcagtgagctgagatcacgccattgcactccagcctggacaacaagagcaaaactccatctcaaaagaaacaaacaaacaaaaattaggcaggcgtcgtggcatgcacctacccaggaggctgagatgggagcaaagttgagcccggaaggttggaggctgcagtgagacatgatagctccactgtactccagcctgggtaacagagatcctacctcaaaaaaacaaaaaaatttaatggagtggaagctccagagggcccttgcaggtctaggaaactagggggcagagacacagcgatcattgggcacttcctgtgtccagtgagctcaatgcatggtggaaggtgcctggttgaatcctcctgggtccagggactctgtgattctaatctcggctgatacctacccaaggaggactgaccccaggtggcacccccttttgtgtgccagaatcgagtctttgggcatggacagttgttcagagttgctgggacagtggagcctgctgcagattggatttggctctgaagagagaaagggaaaatcatgtgtcctcagcacgttttccagccctggcgaggttttgtccttccagattaatgtgtacacatgggaagcacacacagccctcacacacgtgttctttcctcagagattaaccagtggccctgtatcgattgccagcttaccttgtgggctgctgtgggggacgcagggggccttctttgcaaccctgccctggaatggtttgaagtctctttttacagatagatagcagagcaatgtgaccttgggccagtcaccactgagtaagacagagacatcaaatctagacacctaagaaaacccccttggtaccaaacccctctttctttgtgggtatcttcataaactgttgcatatcttagctccgagttagactgggggtgccttgaggacaaggacaagtgtccttctgtatgctcagaagattgggacattccatgtggccagtgaatgctcattgaatgactcatccgaatttcattttgctccatttaagggaacatcctctgagcccagccctgtacctggtgtggggtacaaagcagacccaagccttgttctcacagtgcttcccatcttttgagggacttggacttggctatggtatgatttatttggtgccaaggggcagttttcccaggagcagacctcgcaccaaaaattcaagtgcccggtttattgaggcggggggttgaccaggaaacagcagttaggagagtgctgggaagggaagagaaggggccagtgtaggtggcattatcaagccagctacttctgtgggcagtcggagccgaatcccgctgggaacttagggaagcaatacagaactcacccctgctatcctccttatggggtgagggagctgggatattaatcccccactcctggtgcatctgttcctggcacttcccagcactcaggcagagcaagcccctagcaggcagggcgagtcctaggacaaaagcaggtgttggcatttgcatggaattgggggctgaggggatgtgagcagagcgccggcagaggtgtttgctgggcctccacgtgctaggccatgagtaacccagagacacccccaccccctgcactggtctcctagagcagtagtttgttctaaggaaaggagagcccagcaagcccctgccttttggagaacaaatactgagaacgccccgtgcctgagattctctgagtaaaagcactttgcaaaatgttgagccttattctgcaggaagtcagagggtggtggtggtggtgatcatctttgctctgcagagagggctcagacctgcaggctttacctcctactccagaatccgaaggtggggccagtcccagctcggcctcttggtagcccgtggctctggtgaagctgctgaacctactcgcccaccaattgtgagccttgaatggtagtccatgaacagtgcctagtgcttagtgcatagtggatgttcaggactattcattcccactcccttcccttccaggctgatagtgcatgccctcccatggacctcccatcaggctgtgaggtggcacgctgggtgggtctattgctgcctcttccacaatgggaaactgaggcccacaggaactaagacccaaagccctggcctcctgagcccctagtctacactgctttcctgacgtggcaggcctgtgtcaaggtcaatgcaaagtgtgaagccagtggtggggaggaggtgactggccatgctctggctgtggccctcaccccgtcttcagtgggtcattgtgccagatgtttgactcaccagagcttggatgtctgagttgtccattctaccccccacacctgcatggtgccaggcacagagcaggatgtcagagctggagggactttggcgatcagccagaccaaacctttgttttgttgagaagaggaaacagtctcagagacaccagtgacttctccgagtcacacggtgacttagtgacagccagaattggagtcgggccttggagggccagcctgcctttcctcctactccttccgtaggaagctgctatgtaaggtatgttttattatagttgcttataaacataataaaacccccttcatttaatggcacctttttttttttttttttttcaggcagttaataatccagcttttcagttgctcctcagggaaaccattgagggaggtggaatgagaattgcccactttcaagctgaagtcattgaggcctaggaagcttttctgggtctcaggattcccaggactctgggactctcataggtcaggacggctgaggccagtgctggcagctttgcctctgtggggggccctccccactttctgacagaccacagatacaggaggagatcctcaggggagagccccgggctcatgctcagaagattcaggttcaaggccaggtcttgtgttggctctctgtgtaactttggggggtgttttgagttcttccactaggatagatggtcttgtgtcactctaccagctcttgcctctgttttcaaaatgctcacagttgaatggaagcagactcacaatttaaaaatacatacatagggctgggtgcagtggcttgtacctttaatcccagcactttgggaggctgaggcaggaggattactgaggctgggagttcgagaccagactgggcaacatagtgaggccctgtctctacaaaaaaaaaataataattaaaaattagctgggcgtggtggcacatgcctgtagtcccagctacttaggaggctgaggtgggaggattgct

SEQ ID NO: 62023 - DNA, 1186 bp, Homo sapiens
attactcccttcctacacaaacacacagaccactgccttacttgatgggggaagatctccccatttcacagacaagagaaaccgagtcacattgtggctttatgatgatgggggcatgcaggttgggttggtgctatgggatagagttgggaaaagcgacttctgggtattcgggttttctgctgttatttttaactctggtgttagacgtcctttcttgcagcagtagccacaacacagggctgggatgttgtgcgacacttgatgtaactcaaaagtcccggcctgcaagttccccactgaggaggaagtggttaggtggccaggaatgcaacctgcgcctcccagattaattaataattgagagctggcccccagccagacggagctgagagagatacagtgaacaaagagtggttaactacagtgggggaaggaaaagtttgactttgcctgtggctaaaagggaaattcacaatggccatgatttatgggctgaattactcaggatcctccttagtgggcatgtgctctaggaatgcagacgctggcagcctgcagggccatttgtgcccatagggaagggaggtggaagggatggggggcagggggcaggcgccagcctcgtagaggaggtgcaagtcacaaccgtgggagatgtcagggagagggactgtgctgactgcctgttggaactaggtacaggctagaagttgagcaccgtccaggacgcactctgtgaagaaaaatggcaggaagaatgtctgagggtctggctgccctgggtttggattggggcttgtcagctgtgtgacttaggctgggggtttaacctccctgagccttcatttcctcctctgtaaaatgatacctgcttcctaggattgttctcagcattaaatgagatgggatacgtggacatagatgctcagtagccactggattcccacaggagacccagtgagaacagagggtgtctgaagcaacctaaacagggtccctattagtgaatctctgccaatgtttgctgggcccatgcatgtaagttgcctgctgggtagaccccagcaaggcttctgtgtgattcaggaaaggcaccccctcctctcacctatcacacaggtccctgtagctgcaaacagccctccggagggggaaacagttctagaaggcacttgggcattgc

SEQ ID NO: 62024 - DNA, 1102 bp, Homo sapiens
ttgcagcctagtgacctcccaagggcttgagctgtctctgtcactattgcccactggctaaggggcagttctgtcgagggcaggatgcaggacctcttcctcctctcctgaccatcagctggaagcatcagaggcctcactggagactctgaggcaaaatgatccaagctgcgggctggtgtgaggacttggattaccccccagcagacttggggacctgtgtctgggacctcagtgccaggcccaggacaaggggcacactcatgaaacctgtatccagcccaaagccacagcagagcagtcagcctccaggaggcccctgaggcagacagcctcctgctgggtggctgggcgggcctcccagtgtgtaaggggatgtcaggggccctgccaccctgttcttctggggcttctaggcaggggcaagaccaaggcaaaggcgtccagagctggcctcactcaggctcccaggtgaagctgttagaagtgttgtcctctgggatttggttggactttgatcagttttcctcagaaaaagagccatgaattgctttgctttgctctgtcaagcctccagcagaacgcctccctctgcacaggcccaggccagagacctgtgtggaagcaggcatggcaggcaaatcatgtcacctcactgggcagttataggtgcctgcctgcttctcagagctgtgagctcaaaggaaaggccagatgtcagaatctgagaagctggccacatgagagcagggagcaccctggcctgtgttggtctgaactttggtctcagaaaattgttaaactcctccagacacacagacggcccgagtcagtgacaagggatttcagtaacatcttagctacccctttgctatacagtggggaaactgaggcccagagaggagcagcacacaccttcaattgctgggcagctccagagcccttaaggagccattttctttgtcatttagggaccctcagctcctctgccatgcagaagtagctgcagttctggtacaaacctgcatttcctgccaagaaagccaactcaggtgggcggtaccaggaggctaaggctgagtcagggagcagtcaagcagtc

SEQ ID NO: 62025 - DNA, 972 bp, Homo sapiens
tcttacttgttctgtccctgagctgtctctcccacgagcctctgtggtctgggccagaggtctatggccagcccttctccgtcctctcctagtggagggtcccaacattggagcgggctgtgtggccctactgtgagtaggggaagaggtgggcctctggaggcccccactggccccctattatattggcttctattaaattgaaacacatagcacatctattacacaataaaccacagctatttcatggatcaaattaagttttatttgggcaaattacaacctttcctacagttgtgcctttgtgaggccattcctttttaataaaagcaagcatttctggggctggccctcctggaccaaagcaccatggtgggttgggggctcaggccggggctggcaatagggtgggggtgtgtgtgcgtgtgtgagagagatgggaattcttggggcccctcttgggaatagatttggccccctcctccccctgcctccccatcctgagtttgccatggaagtctgcagagaacttctcattaaacaagaaaaaagcagcagcagcaggaaggcatttcccggaatctgggaggaagcatgagtcaccggcctgctaagtgagccctgagtggccactgcggccccagcccaggaggcctggagtgcggggccagcgatcagagctgcaccaggccagcccgcatggacacgcccgctgcccaggctgacgcagcctccaggaatgcaaacaaagctgggcggaggggccttgagagggccagggcactgggccaggaaggaggcagaagcctgcaggagaggcctgtggaggggcttcgggcctcagacaagcccctctctggtgtccttggagcccaggatacctggctggtaaggcttctaactctgggtatgacctggcctagcgctgccagctctggccttcaggctccttgtggggcagggacaggagtt

SEQ ID NO: 62026 - DNA, 3096 bp, Homo sapiens
gccacagagaatgtatggcttgcaaagcctgaaatatttactgtctggccctttaagaaaatgttcaccaacccctgttctacagtgtgaaaagtttgtttgtttctgttgggcacttgggctgccttattaaagactgcattgcccaacttcccttgcaccacctaagtgtgacatgggactaagttgtgccagtgggttgtaagtagaagtgatgttatctaaggagagaggacatgtccctctatccctttcctctgcccagaatgtagatgggagcccacagtggatatcccaagagggcagaacggcaagagggaaggagcctgggttcccggatgaccctggagtaggatcgccatcccagtcttggacaatctacccctggagggccacaccagagagcagtcaactccactctgacatgaccctgactaaggcacctcacattcatctcccccagcagaaaacaggttccttgagggtaagggcagagcctgtctgtttcaccagagctcccagaacatggcccagcacattggagatctgggtgtgccccttattggcaagagacgtgtggcaaatgacctccctggcctgttttctcttctatgaaatgagacttagcaccatactcacaggattattgtcaagtttactaaaatgtatgtaaaatatcagacctgtcctgtgccagcatgtaataggagccaaataaatcgtggctattgtgagctattaagttttccgaaatcagatcctgtcccccacctccctgctgtaaaccatggctccctggttctcttaagtctgaagtcggtaccataacccgcaagatcctttataccccgatgctgtccaccttcccagtctcacggctcatcctccaaatgactcaggcaggtgcccctgtcctggcatcctgtccttcacagtgggggttgtcttaaggtcggagtgaaggagataaatgtgctaagtccagacgaccccttgaaaatgtcttcagtcactcataggtacagtacccggacttagtacctctcagtaagtccaaaacagtcttcctccaatgtgggaaaatgtggctatatcttcagttgagcaccagataaagtcgctggcttgcgtttagggtcctcatgggatcaaaaatatgcgtctttaatcgtcagagtcaccctgaggattgaaagttcatgcgatgcttctctgctgtgctttcagtccttgccgtgtgccctgtcttctcaccgccaagcctttgcacctgccgctccttctacctggagtacccaacctgcctctccccacaacaaggcccattcctctttcaggcctctgagcaggtgccacttcctccaggaagccttccataactacctggctcccgtccatataccctgaaacgcctctgcctgtgcagtggcctcccaccgtgtggtcaccgcctgactgcctctctgtctttttatctttttcaccaggtccttccttctcttttgctcactgctgaattcccagcgcctagcatcgaatttggtgcacaagaggtgcacagcaaacgcctgtggaatgagtgaacggtggggacggtcagggctgcccctgcttgcacccgcgggaggctggggagggcaggaaggagagcgctgcggggccctcccctccccgccgtcctcccaaaccctttccctgcccaacagggcgccactggcctgtcccacaccctctctgccgcctgcccagtgacctaattattgttttttcttccagccccgcggaggggaaaacagaaattcctggtggatgacacaggcccggcggccgcctgcgagccgagcacgggaccggctgggccggcttcgcccgccctgaacccgccacccgccccgccgagggccgcggaacccgtcatcagctaagtacagagcgggcggcgggcggggcggcggccggggaaattgccggttcccgtgccccgcggggcctgcgggcgccccgagtctgggggcccggggcgggcgggccggggtccgggggatcccggggggtcacgggcggcccgggtccgagtgcgccggtactgagctcgagaacggcccccgctggggaaggagccgctggcagcgcgggggccgcgcgcagggcagggggcggcggcggcgccggcgcgggcggggagggagggcgcggctccgggcgcggggccaggtcgggcggcccggggctccgcgggggacgcgcggcgaggacgcggggctctcggcacccctctcccgtagcggggccctgccccggctcttagaaagagcattgggctccgggccagagcgccgtggggccagcgccccagcccttagtgaattgcttcatctgccactcatgtcctgcgccctggaagctgcagagagagcctcggctccccgtgcaagcgctgggctgacaactgacagcggcgacgcttggaatgagacgtccaagggttcaagggtcaactctttcctccaggcctagcagatcatagatactccttcttcttaaacttattaaggaaaaaggcagtcactcatgccttccgccaacaaatattgactgagcacctactatgcgctagacatgctgctaggccttgaggatggaggggtgaatgagacaggcaaagcctcatgttcttttggtggagacaagcaataaacacttgaatacacatctcagacaagatagtgctgcagatggtgatgggtgtcagggagactcctcatcacctgaggcaaggggaaaaggcattgtgggagacgggggagctgttctatttgagactcagtggccccagaggaagggcttcctgggacagtgccctttaagctgagacctgagcaaagcgtgagatttagcaaggcaattttctaagggaaggttttttagataaagcagactgcaggtgcaaagttcccagcccttgctggtagaatgatctctcaggctcctgagcccccaaagcacaagattgcaccccttcctctgacaagagaggaagcgtgaagcccagatctggagtcaggcagacctggctttacattctggccctggtac

SEQ ID NO: 62027 - DNA, 857 bp, Homo sapiens
atttgtgcaatgcagtaaggggctgatttagcccagaggctgctttttggcaattttctgctaggagagggcgccattgcataccgggcactggggatgacaacatggttcttttggtaggagctcacagggttttcgggggagggttgccagatgtaatacaggatgcccagttggatttgggtttcagataaacaacgaatatacatatataaaatatgggatattataaacactatatatgtaatgcttttagtataagtcccatgcattattgcaatgtctgaagtgtcatgagggacacctccccccagtacgtagggttagggccctggggccatgcgggaggctgagcagccgggcagtgtggctgcagaggagcctgagaggcaacagggacaagatggagtgtggccttgaagtgccgggagtgagcggggccaggcggggttgtgaatgggacgcgcaccgtggcaggctccctctggcggccgtgtggagaacaggctgcagggcgccgcggaagaggccaccccgtgaggagcccagagcgctgggccccgggcagggagcgtggagctggagagaaacggctgactctagacatctaaactttttatgatggagaacggtaaacgtatacaaatgtagtgagacgaggcacgcccatgtcctcatgacccgcgtcaaccatcatcagctcatggccaattatgtttcatataaacctctcacccctcccagcaacgggattattttgaagcaaatcccagacttcatattatttcatccataaaaatgtcagtatatatcactaaaagataaggcctggatgtattttgaagctggagccacca

SEQ ID NO: 62028 - DNA, 1065 bp, Homo sapiens
cctgggcgactgagccagactctgtctcaaaaaaaaagaaaaaagaaaagaaaagaaaaagaaaaatgggtacaaatgtccactctgccaagttctttgggttgttgtctcagatattcagcaggacgcatggaaggcacttagtaggtgctcagcaagtgtttgcacctatgaagaacatttgggaaactgcacagggctttcactccagagggagtgggggcagtcgctgagattagcagcaagaatgcattctgagtcaaaagatccacctctttcctggctggtcgcctctcgccctcctcccatctcccccacaacccacattcccaagtccccaaagatcatgagtcaggttttccacctcctgcaatttcaaagctccctgccagccaagctgttttgcagactcaagtcgataatgacaaattcttccctcctcgcccgccactggcaaaaccacggaaagtatttgaaacacgcagcctgggaatgtgcaaacttccattcgcccggcttggcaggggccagcaatttctcagccagcatttttgactaagacttctgcagctcaggtttccaatgagctcatcagcccagtcctccaacagtgtttatacctttttttttccttcagaaaattaaccctacaacagattctgaatcatacactccttaggagcacagctcccttgttgagatggaggcagggtttcagacccacctcaggagggctggccttggcttgcccaacagagctcctctgagcacccatcaggggcctatgtggcctgaatcagaggattctctgctgaaaaagacatccagaggtcttcccatccatcttttgcctccataaagatctagttaacccatttcaggtctctgcaactctgttttaaaaatatcctcccaggggatgaaggaagggagaaaggatgaaaagactggagactctgaacctaggtacacctggatgtcaattgcacttctgtctccactcagtttcttcatctgcaaatggcaatagtaatccccacctccaggttatttggcggtttaagt

SEQ ID NO: 62029 - DNA, 417 bp, Homo sapiens
ggacagcaaagcaacaggggcagggagtatctgacccagtgacccaggggagcacccagtgggtatagcaaagtggagaatggaaaccaacacttactgagaattaaacttacattaggcacataacatatattatccaacttcatcctcaggataactttttgggacctctgtttataatctcatctgacagacagggagtagtgactcagagatattaagcaattacccaaggtcacacagatagtaaggcactgagctgggatttgaacattcatctgtctggcttcaagatccatgtttgttcaactatgccaccaatcggtctcagaaaatctgtacttgtgattgtgtgatataagtcaatgtgaggttaagatttatcaagctaaagataatttcaaagtcatctaatcc

SEQ ID NO: 62030 - DNA, 1798 bp, Homo sapiens
acatcagctcatccgtgcttcccagttactcatagctgcatgatttccaagccctgtccacctggatattttcctaagatgacttttccaggtgtgagctcactcaagcccagccagctgggcaagtgtggagttcctacccagtgctggtaagaacagtgggaggaggcctggcctcccaccctcaccctccatcaggagacagcatcacagaacttcaggggcaaagacaggcagaggtgatcaaggccaaaggactccagctccagctgctaggtatcaaaattacctgcgggagctttcaaaaattcagattaggtcaggcacggtgactcatgtctgtaacccagctctctgagaggccaaggtggacggatcacttgaggtcaggagttcatgatcagcctggctaacatggtgaaaccccgtctctactaaaaatacaaaaattagttaggtgtggtggtgcatgcctgtaattccagctactcgggaggctgaggcaggagaatcgcttgaaactgggaggtggaggttgcagtgagccgagatcgcgccactgcactccagcctgggcaaaagagtaagactctgtctcaaaaacaaaaacaaaaacagaaaaaaacacaatcagattagagagcccacaccctctaagtcagaatgtgaaatggtgaggccaataagatttatttttcaaatcttcccaaggcttctagtgcccagcagactggtttgcaaaccagtcttctaaagcaatcttctttctatcattaaggagcccatgacacagaggtgttaagttcaaggtctcttgggtcagcttttggatccactgttccaaagggacaggttcttagggggctggcattttcttggagtgaagcaggagctgctgcaggggctgagaaagcaggaaggagctctttgctgcattccagagcagatctggctgtgaataaacgagaaagagctttagtgtaagctgggctgaatggataattaaacagatagcaaaatggaatgcagttgcacacacctcccgggagctggctggggggagataatatgccttcctgtcgtcagaaggcacaggaggaaaaacaactgggcctggccgttggccatttaacaatattgcttttgtaaacaagttgaaaaatccaataactgtaaaacttatggcatgtccttaaaagcctgttgctgttttccctataaatggatgagcgtttccgactgaaggtgttctaattaaacagtccgcatccccaaggactgcgaggtcatcctagggaaggagggtctgatccctcctcttggcgtcaggaccacaggtgggggtggcgagctcggggtgcagccaggcagtgttttgtttgttttgttagtcactgtgctggattgtagctgaacagctctcttccttcctgttgtctacaaggactccaaagagcaatccagcacaaactcaaagaaacaaactcttaggatagaagcacggcagtgagtgcccaccaaagaggcagcccttcaggctgggaagagagagaagtctggatccgttcatcaggaaacactttggtggtgcaagcaacagaaaggtagaaagtctagttctaggcctagaggagctcacagtcctgatgggaagagaatgcactcacacatgcacactcacgcacactctcacacatacacactcatgcacatgctcacatgctcacactcacacatgcactcatgcacatgctcgcacatgctcacacacacatgcacaggctcacaaactcacatg

SEQ ID NO: 62031 - DNA, 1741 bp, Homo sapiens
tatgctccagtctgctggctatgcccagagccaccaaagacccctgtccagtcccctgacccccaccaccagcccaacaaagccctgccagcactgggaagcaggcacaggaccccatctctggaactcacaacctcctcatctcctctcccagcagagcatccagagccaccatcttcttccaggtactttttcaccctctccctgatcctgagggcaccctatccccccaggcctgcccgcaccccaggaaaagccagatccaccctaagatgaccaaatctggtggcagcccccaaaacacaaacgctgtcactcttgctcacccctcacccacctctgccccaccctagcactcaaaggcttggatttccctttccaaaaagagggactgagatgctgctttcattttcctccatcacaaaactaaactatgatcttaaatatctttttcaacaattcactttgtaacctacacgctcaggcccctggggcccagctgcctgcccaagatcctggagtttcagagaaagagctgctgccctgctagctggccaccaagtgcccagcccccaaaggtggacttagctcccctctcagatcggactcactctctgtgatttgttaacggtgacactaacatgagtttgcattcattgctctgacaagggtcatgtccaaagtggaatgggtgggaataaacgattcaaaaatccattaggaagtgagcccacaggtggcagagtgactgtgtgatttctcattcacccgggatatcgtctatacttggtagggtgaccggatgatgtattttctgaacagagacagttgtgagcaagaacgaggggtcattagtaattacgccgggcagcaggtgtaaatcaggctttccccaggtgcctcggacatgtggtcacccattaattggaaactgggacccatttttttcctctcattagctcccgtgaaagtctgggcaagtctcatggtttccaatgcagaaatgaagaaacggaagttacaagcagggaggtgatgtgcccaaggctgggcagaggttagggcccttcccgctgggctccgtcctctgcagcccttgtggctggcccagcccctcatcaccgtggctcacagcttacttcatgtccagagaacctacaaggggtatacccctcagggcagttcccagcggcagggccagaaagggattctggaactctggaggctgaagacacaggtatctttatgatctaggtgaggagaaaccctggccagagacaaggggttggatgagatgacctctgaggacatctacagctgtagaagaggaaccaggtgtcagaccccacttggaccttcgtgctgcattgtgcctgaataaccacacgagggcgccctcgcaccaacaaagaaacatgccttcaaacgttctcccaaagctagagcgaaggccctttcactttttgttacctgttaagttttaattatttttcattttgaaataatgtcatacatgcagaaaagttgtaagtacagtacaagtaattctccccctctccccgaaccattaagagtaacttgctgaaatcactccccaggttcaccaaattctttttttttttagatggagtctcgctctgtcgcccaggctagagtgcaatgccacaatcttggctcactgcaacctctgcctcctaggttcaagtaattctcctgcctcagcctcccaagtagctgggat

SEQ ID NO: 62032 - DNA, 756 bp, Homo sapiens
catctatatttatattgatgtatatataaatacacatatgtagaaacatatacagaaacatttgaatatttaaataacagcataactagggtgccgtgagtctggtcatggggcagtccatggggagatggcaggcaggccaggcaggaggaaaagcctaggcatggcacagaggggcagacatagctttcagacagctgaggattcaagaagaacctagatggaaaagtattccattcaaagactgccgtacaccaacgggactattcttaccttagtgttggaatgacaggacctttgctcccaaggcacccctgaactgggcctgccttcctgaaaccccaggctgtttctgcagaaaacattctctccatacatttaaaaaattgatgattcattcccacagagaggaaacttattttggcatttgaaaacataaatgggcaaaggacacaggcggctcacataaaaggaagcatggttagtaaacagactgtgaggaaacacagtcaacctggccagtaatcaaagaaatgcaaattaaaacaactgaggcgcacatttccacctattaaattaacagccataacaaaaaggttgagatgattatattccattctggtgaggtctgggggaaagcagtagctctgacgttgttggaggtaggaccagccccgtgatctgcagagtccagtgcaaactgaaaatgtagcgcctctttttcaaaaatcattaagaatttcaaacggccaggct

SEQ ID NO: 62033 - DNA, 2736 bp, Homo sapiens
tgctctcaatgattcctgctgaactcaggtcccgagtgcccaacaggcctccatttgagcaatgggttggccattgcttgtagctgctattcatctaggaaggtcccagcaccggcccctgtttccacctcccgcagccctcacatgtggatccactggtttcacctacagctccaaccttggcctggttcactgatcgatcagcctgaggctagaagcacttacacagctggagagcaagtcactctttctactggcacccagcactatgcctgcagcacacacgttgtcacacacctgtcatccccttgggcactgggcctttccctcctgtgtagccctcagctgggtcagcctggctcctcctgtgggggcggggggctggccccagagctgccctggctaaggccacagggtcatactggaagtgaagagaccagcctcaacaaatccaggaaacagacccaggtaggagtgtgaagggcatggctgtagtgtggggtgtggaagcccaattctgggcttcccagaatttcccagcaggcttgggggaggggtggtggcagctggcccagtggaagggaacctccatccaccctagaaagattgtcccactttccttatgggtcagcacctcacaatgtcatcaccagaagggctttcttccccacgtggattacatagcaggtagatggatttgtgcttgcagacacagaggggccagagttttaaaggccgtcagtaccctatggcccatctcaaagaaaaagacaaggataagcaaaattagaaggaaagaaagaaagactgtaaaagttaaacaaaaccacccacaaatagcttgaggcagaaaaaagattgtaccatatcatggcaatcgtggacagtttggcagctgagggaaagatgactcattcccaggctccgcttgcataatcctccccagcccaggcaggagaatgaaactaggaaagtaatgcaatgacatttagtagcaaaaaggaagcccacacaacatttgtgcaaggccatccaaaaatagcaggctcctccatgcttgggttttgaaactatgcattttgcttgaaatgcctgagtcgtggcacatttttcttgggccacccacaccctaattcagttcatttcaatttagcagacatttaatgcaggcctactgtgctccaggctctgtgctaaggatttgggagtggcaaatacaaggataggggagacactaaaaggaaagtgtgaagggaagaatgaatggagtcaaaccccaccacgaacccttaccaggtctgaacctcagtttttctgtctataaagtgggaacaatgcccacctcatgaaattgggtgagagttaaatgagaagagcaaagccacaggggctcatgaaaggagtcctcaaatctgctcagggtgatcaggagggccagcatggaagaagaggtctttgaaatgagccttgactcgttttaactgaaccgaactgccagactgaatagtggcaagtatttcttctgtgcctgctgggtgtcaggcctggtgccaggtcctgagaatgtaaggacaaaggagagaaacccatcatcaagcagtaataatcctaacagtagaaacagtaaaaataacacagggaagcagctaggcataacggttgtgggtgctagttctgaaaacagactctctgtgtacaaatcctagttcttttactctcagctgtgtggcttgagcaagttctttaaccactcattctatgctcctgtttccttttctataaaattagtatacaaatagcaattccttataggattgctgtaaaaattaattggaacagtgcttgcaaagcacttaccctagtgcctggtaagtggtctgtcagggtaagctgccactattttcattgctaccatcaccattatcttcatcaccattatcaccatcacacatcacagaagagagggaggtacagagtcctccaagcagaggagaacttggagagtctgggaatgccagaggaaggaatggttattcttgaagtgagttttgaaagacaaggagaagtttgccagtaggattctggaagaaagaggtattccaggccgggggacaatatgagaaaaaagcatgaatgtgcagaagataaatgttcaggaaacaggaaatggctcaggccgacagccaggctgaaaggatggcctgaccagggagagagagggcaagcgggaagggagtgaaagtccttcctttcctggccttttgcacacaccctcctggcacatgccaggcagttaggaagccctgggcctggacatgagcactagctctctcacagagcccctttctgaccttggcttccttccaggagacgttaagacacagccttactgagaatgcagccacggttactatcacatttattgagaaaactatcccttatgttactcagagctctttgcatacagatgctcaagataaattcaacttagaattcagccaggaaaaaacattgataaaaataatttataactttcattcagagtttacaacatgccagtctctaagtgctttacattattagctcatttaattctcacaacaaccctatgaagtaggcactatgattgttcctgttttacaaatagaggaactgaatgataaagaggttaactcatttgccaaagcaacatagctagtaactggcagagcaagggctcacgttctgggagtcagg

SEQ ID NO: 62034 - DNA, 795 bp, Homo sapiens
tggtatagagtaagcactcaagaaacacaactcctttcctcccttcgactcatcaagaaagctgagccgagggagcatccacttcccccaagcctcccagaacagggaatttcctctgcgcatttaactttgagcaagggtattggggtttgactctccaaaatgggaaatgatccacggcagtaacctggccaagccctgctcagtggcctgccatgatctggtccaggcccacgctgttgccctcctgcccaccgaacattcaggactggagaggaggctcaccctggagcgggctaaggaagtgaggtcatagcctgtgacagcaatttgggagttgggagaggcctgccagcccctgccagttcctggaccttcacagagcagttgtttcctatggttcggctggaatttcaggcaggaatgttgagcagacggcagtggggtaagtgtaaattccagaggctgaggcaacattttgcagaggagttttttttccctgccagcctctggcctcaagcaagcccttcctgggagtgggaggaattcgttgggcttggatcgcctgggatgcagcttctcctatggtgaaggggaaatgatgggtgcactactatgagccaggcactttacatggatgtaacccttatatggtcaatgggatttaacctgcaaactgaagtcaacattattttctttttctgtccttttcagcttgcttgctttcttcttatccctaaataaaatctcaggcaggtcttgtaggttttctgggccccttcagtttccaagaca

SEQ ID NO: 62035 - DNA, 3108 bp, Homo sapiens
tggtgagatagaccagtgagtgggtggagtgggggtgctacatagtcctggctctgggcccagacccctgtttcatccagagcagatttgctttcatgctttataacctggggttctgtttaactctttgtttgaaaaatcagttctgctttaaaaaaaatagatttcttttaaacaagtgactgtgttaagacattgttcccaaagggttataggttaaaaaaaaaaaaaaaaaggagtctaggtttggtggctcatacctgtaatcccagcactttgggaggccgaggcaggcagattgcttgagctcaggagttcaagaccagcttggtcaacatgacgaaaccccacctctacaaaaaatacaaaaaattagctgggcatggtggtgcgcacctgtagtcccagttacttgggaggctgagatgggaggattgcttgagcctgggaggtggagactacaatgagccatgattgtgccactgtactcagcctgggtgactgggtgacaatgcaggaccttgtttcaaaatttaaaaaggatgagcccttcagccttcagcctaaaagtctgctcaccactatcactctacattgtgaattaacccttcacgtgcagccctccctcttctcatccccagctagacggcttattggtgtatcctcaactgtccagctaataggcttgttgatacgttgattcactgatgaatgaccctttgaataacttggcagcatcatctcatatttgtacattgtacagttcacaaaacaggttcatagctatcctttgcttcaaaactgccaacacagagcctcaaggattatgtggtggaagaatcactatcctcacttcacagaggtgatcctaggtctcggggagatgaggaggcttgaggtcttgtgactgggtgctggcagattggaacttggacccaggcctttgaatcccggcattgtgccaactccactgttgagtgtggcctgaaaacacggccttaatccagccgttaattaataactaacttgtgtgttggcctctgcagtttacaaagtctctcccttaggtcatttcttttaatctccacaatcctttggtggctggatgttgttattattttcccccaacctgtccctttgcaaagaggggaaactagtgctcagagggttgaagtgtcttacccaagggcacacaactatggctacagagctacactcaatacccagcttccagcttccctgtcctctgttccccatcctctgttccatccctcacttttcttcccatgggcaggccctggagatgtctgagcatgtgggcttttcagccaccctccagcagcctgaaggcctggctctcctgggcaggcccaggaaacgcctggctcagtggtgctgagcagcccctcccatgaggcctcgagttgtttttcttatctaaataaactctacacaaacatgggcacattactcatgtgtgagttatttgcgatagcatagcccagagatggggaaatcagttcacactggaactatgtctcaacctggtcaaaaaacaaatggggaaatggagttctaggcccagggcagcaaaactcaaacccacaccccatctcaagcccagggaaaacttctgcccctggtcacatgctctgtggaccccactggagggaagacagaacccacctgtgcctagggaaggacatgagggagctccaaggggtgggctctcgcttccaaggccagcctctcttcccacaggccatcttgaggaaagacagagacacacccgcagagcaggagatctctgctttatcctctaagcattttgcaaaatgagtgctggaatccatacctggtccttctccccacatgtaattagattccttcaacttttggacttggatctttcaccagaaggccttgagatcaggggaggggcttaaggagctgctatataaatgaagacgtgtaacttagctcagtgcctggcagggaccggctgctttcattacggttgaggggcagttgtttgtgtgtgtgatgggaaagagagatgatgctaaaagctgtttatcttggcccaccatcacataccttcccaaaggcttacacacccactctctcaggcatgtttattacctcatcatttaggtgagggcctctcagagaagttctatgatgtgctggaggtacccacgggatgtcagtcataaaccatggaatgtgggttttgtgtttgcaaagggctcttggacacaggatctcaaaggaattcttgacagagctagaaaaagagccttagccccctgacccctagatcagcagattttgcttccagaaaatgtttctaggatgcccagctctctggatatgactcatattggtcccaaggaatgacagccctgcacatggcttctgccccagggctctggaactgtgctgcctggcccctgtggtcacagggattccttgctcctctttaccagcttcagaccaagggactcgagcttggagaggctgtggttactgtgctgcgtgggtcttgtcctggagaccttgtgtgattcatcttcgtgttcccacagggactgtcactaagacagggctgggttaagacccttagatatcctgaaagatcagtcctccctcatatgaaattcaaagaaaaacaattctaaatctgaaaaaaatgccacccatccatgtgggctgagctcaaaatagcttccttctagagattttgattgcaaaatcctggatgaatgcaataaagctgaacttttttccttggcctaggagtggggcaaggaagggaggggttttgccattggtctaagcacctacttgctctgcttcctgagtcacccagattgccaagggggtcttgtacgtggtagatgtcagcccacgtcttctaaattgaatgacgtgtgcctgtttcccagaagaggaataaatccaagcaataatgtgtcaaagtatgggcacagagtctgagccagcaaacacacacacacacacccatgtgcacccgtgcacacacaaacacaagcccatgcaggtacacagaggggaaggggagcggggggaggggggaggagggag

SEQ ID NO: 62036 - DNA, 2900 bp, Homo sapiens
tcttttcgtcttgcagaagttctgtacgcattaaatactaactctcatcgcctcttacccaaccctctggaaaccaccattctactttttgtctctatgaatttgtttatttattcatttattttgagatggagtctcgctctgtctcccaggctggagtgcagtggtgtgatctccactcactgcagcctccacctccagggttcaagctatccttccgagtagtagctgggattacaggcatgcactactacacccggctaatttttgtattgttaatagagacggggtttctccatgttggccaggttgatctcaaactcccaacctcaggtgatcctcccgccttggcctcccaaagtgctataatccaaagggattataggcatgagccagcacgcctagcctgtatttgactactctacatatctcatataagtggattcatagaacatttgctcttttgtgactgatttatttcacttaacatggtctcaaagttcattcacactgtagtatgtgtaagaatttcaacccttttgctgggcgcggtggctcacgcctgtaatcccagcattttgggaggccgaggcgggtggatcacgaggtcaggagatcgagaccacggtgaaaccccgtctctactaaaaatataaaaaattagccgggcgcagtggcgggtgcctgtagtcccagctactccgtgggctgaggcaggagaatggcgtgaacccgggaggcggcgcttgcagtgagccgagattgcgccactgcactccagcctgggcgacacagcaagactccgtcacaaaaaaaaaaaaaagaatttcaacccttttgaaggctgaacaatcctctattgtatgtctatatcatattttgcttctccatctgttgacagatgcttgggttgctcccgccttgtggctactatgaataatgctgctatgaacaggggcatacaaatatctgtttaagcccctgcttttagttcctttgggtatatgcctctgttgattttatttatttaattttttgagatggagtttcgttcttgttgcccaggctggagtacagtggtgctatctcagcttactgaaacctctgcctcccgggttcaagcaattctcctgcctcagcctcctgagtagctggtattacagacatgcaccaccacgcccggctaattttgtatttttagtagaggcaggggtttcaccatgttggtcaggctggtctcaaactcctgacatcaggtgatccacctgccttggcctcccaaagtgctggaattacaggagtaagccactgtgccggacctctatacctctgttgtttttaatgtaaaaataacatgcctctattatttttaatgtaaaaaaataaaaataatttaaggtcatacactctcactgcatttgtagaactctattttcatttcaatgcatcctctctggtggctgttcatatgcaggtatttttaaaagtaaatgctactataatggaccaacaattttccaactactcttttttatgtccacattgctaacagaaccatagaccatgggcctgagccaagactgatttgtgactttattatcttggaaaataggaaacggaaaacacagtgacctctataaacatatatacgtacatacaagatgtacgcaaggacaaaaacatatgaattcagagaggaaactcacacaacatgtacccgtttcacttaaataactggggctggactttgaaagaatgagatgtgaacaagacctcagaggcacaggcagagacatcttacatgcacacacatgtgaatctccacaacacccctgtatgcatagagagtgcaacacaccaggacacacataaatggtaaaaaataaactcatacacacacaacctcacacttaccaggatcttctccttgcccccaactcccagaccggcaatttctgaaggctgggaaggagatcctgcaagagaactgaaaatagctctgtgaaccctgccctgggctccaagtgcccgcccacagccctgtcccatgctcccagctcagccttggccccatgcctcggtctgcacacagccccaagtccaaccccctgccccaaatctttctgagtcagacctgctctctctcaatactttccttggacagtacctgtatccagctccttctgtcatagtcattctcccaaggacactctgtaatccacgccagaaattctgctgtgggctttggggacatagggacccacgctgggctagcagtaaggggctggtattccacggccagtcaagcttgggccaacaacagctgaactgcctgcctctctggtccctcctccataaagcagcaatgcaacaatcatcttgtagacactgagaactttaaacatgaccacatccttgaagtcccaagcccagtcctggcatagggcagccccacaaatggtgttaatctcctgccctctgttccctaagctgtcagatagggcaacgcctaagcctgcatgttttaggggttgctgtgagacaggaatttttaataattttgactaagttctccacatgtaagatatcatgaccaccgaactgaacagtgctggaagccaaaggttctatctttcgaacaaactagagagcaattggtctattgactaatgtatgttgaacactacgttagagcagtagggtaaagttagccacactcctcagttacacacatcagtcatacacacctgaatgcacttatttattttccctctttagccttatcctctattctcccatacacccacactcaaacatctattctactctgttcaatatttaccattttattcccactttatttatttatttagagatggagtctcgctctgtcaccaggt

SEQ ID NO: 62037 - DNA, 7150 bp, Homo sapiens
attgagaacctactatgtgcttgtaccaagctttctatatgatttaatctgattccatacagcaatcctaagaaggtgttgtaattatcacattttatggatgagaaaactgacacacacagagttaaggaacgtgcccagagtcacacagccggaagtggaagaggtagaagtttaacccaggtcattctggtgccacagaagagctcacacgtgtaaggtgttacaaagagctataggtagagatctgactgtagacagaggctctctcttaggtgagggcactctgataaaagttctagtcctgatttggctacttatcttcacagtgcaaatcaccttcccttacagacatcactttctgtctgtgtaagatgaagatgattttaatgctttttctagattcactacttgttgattaaatacccttaagctaatgggaaaataatcagaattgaagtcaggtgtttgtttctttcgtgtatttggagtggctggcctacctgggagccactccaaatacacgaaaaccctctgatgtgtctattcacgaggtgaactgttcataggatggactattcccagggaaacagttgctgtctccacttccatcccacctctcctgaactttgcacttaccatggtgaaaaattaactgggctaatgtttccctcccaaggacaacctctgcaaaagcaggtatggctgggccccaaaagaccaggtgccagaacagagttgtacccatccagagcagcccacccattcactgcccaaagtcaagatcaagagaacatgcagggtcttctcagcactggaagaatcagttcctcagccctcctcagagctttctgaaactggacttagtcccccagtggagggacttctcttggagaaacaggcctgaggagaaagaactagcccagaaatggcacttattagacttgtaggtgggtccagcactatttttctgcatgcacagctgttcttgtcacacggatgccagcagggaagcatggttctgccacactaactagctggctgcctagttatttcctcccctcaggaaaatgagagggctgaatgagggccccttcccataccatgattttacagggtgaagtacctgtcaggtccttctactacatgtaatcctcaaatctctctgacgctcttcctctacagtgcaaatcactctccttcagcagacattgctctctctgtaacataaaggacttgaactacaggaggacagttacaatgctctttctggatccaccactctgcacagtgagaaccgcttgctccattcttacagcggagagaacggacgctgcccaaggggaagaagagaaagagccgggattggaagccaggccagtcactgatggatcctgagcccctcttactttctttggctacctctcaatggttggacttgttcaggttaagattaacactttactggacgatgatgactgcaaggcccctgcccatctttgcccactcagtcacatcatcctcatccccaccctttgatgcttctctaggctgtgaacgccttgaaaaccttagtcttttattttggaagttcaggaactgaataggagggctgcaactcagagctgctccgtcaatgtgtgttaaacttatttgacctccctccaccacttttcatggcattagcaatgcaaaccttttcacatgagcttcccacagccaccctaggagatcgcgagggaagctacctctagccccattttacaggtgagcaaataatccttgcagtgttacaacagtgtgcccgtgtagagaactgttttgcaaagagctcgatcaatgatgtcatctttgccttccgtgacccaggcagctgggtgcagtctcaagatcggagactgaggcttcaacaaagtattgggttcaaattccagctctgccacttggaaccctgagtaagtaatgtaatctctctgtgcctccgtaaacgtgaggcacaggaacatctacctcaccaaccactgttaagactgaatcaaagggcagcaggcggactacccggaatgaagaaagcaatcaataaatgtggattgtgtcatccttgtctctcttgacggacgggaagaggagagtgaaacctaagaccacagcggcagcgcgttaacaggaggaccagcaaggaacggaagccaggttgtcaagcctcagttggctttcacgtattctccttttcaggcgggtatttaggaagagaggagggtgaggagcacagcgcacttctgcagcagcagctgcggattggcttgtgggaggcggttctccggagcaaggcaagggcccctgccgcttctgggctgactgtggattccgccacacctcacagggctttgtaactccccacccacttgagggttccagataactttttttttttaacaaagcaggggtgggggtgggagattcctgctgttaaaaacaaacaaagggcttagacaccggctagtcggctgcgggaggcagcaagagaaaggccgaggggcctggagtagctcctgaaaaccgccgagggccctgcgggcagacgcccctgaattcttttggtggggagaaaagccgcggagctccccaatgtgccaattggtttgttgttgttttgctttttttgaatacacaaactctccgaaaactcctgtcttgccccacttttttgtgagttcattgctttggaaacaaaactctcttccatttattggcaattatcaaatttccgatccttctctatcaggagatccagcaacaaacaccctgttatgtaaatttctttcaaagataaattcgaaagcccctccattcattccttcaagaactcaacagatgtccttgaggctcattttctgccgggcactcggttcacaaggctcaagagacccctggctccagccattgtccaggttgtcactggtgtccccagctctccacttctgaggacccacttctcaccccctcctcctccgcacacgttcccgaggctctcggccggtgtgatctcaccgactagagaataaaaacagcccaggggcgccggcgccggccaagggccttgacggggatcagcaagcgcgaggccaagtgcgggccccaacttcctgggcccgggccttccgcgcgccccctctcgggctcgggtcctctccagggtgcactcgcgtccggacgacgcttacttgctgcgagtccaaccctctccggcccgcaactccaaccgagccgcccgagtgtggactccgagagcggacgccacgggccgcgctcagccctcccgcccgaggcccctctcgccgtgtttcccaggacttcctccccgcgcccgcccgacttcaggtcggggccgcgcagggtcccgcgcgctccagccaggactgccgccgcccgggtcgcccacgtgggcgtgctgggcgcggggtggtggccggccgggcgccctccccggagcagggggcgggcagggcgcccgcgggaggaggtggcggggcgcgggggaggaggcggggagccccggcggcgagggggcggtgacagcacttggaaaggaggctgcacgcggatttgcatgaaacacagactgggagcgggcgggagcgggagcgcggcgcacgccccgggccggcccagccagcgagcgagcgagcggcgagccgggaggaggagggtggcggggcggtgaggccgcagaggcggagggatctgcgcatcaaagctagcgaggcgagcgaagtttggccgggggttggactttccttcccggaggcggcacccaaacagctaccccgtgcggaaacccaaacttctgctgccacttggagtctcgcggccgccgcctccgccccgcgttcggggccttcccgaccctgcactgctgccgtccgcccgcccggccgctcttctcttcgccgtgggagccgctccgggcgcagggccgcgcgccgagccccgcaggctgcagcgccgcggcccggcccggcgccccggcaacttcgccgagagttgaggcgaagtttgggcgaccgcggcaggccccggccgagctcccctctgcgcccccggcgtcccgtcgagcccagccccgccgggggcgctcctcgccgcccgcgcgccctccccagccatgtcgtccatcctgcctttcactcccccgatcgtgaagcgcctgctgggctggaagaagggcgagcagaacgggcaggaggagaaatggtgcgagaaggcggtcaagagcctggtcaagaaactcaagaagacggggcagctggacgagctggagaaggccatcaccacgcagaacgtcaacaccaagtgcatcaccatccccaggtgggggcccgcccgggggggacccggggtcacgccggcccagccccctggcactgcggggccgacccagtggggctggagatgggaagagggagagagagggagggagtgagactgtgtgggtgcgtgtgtgtgagagtgggagagcgcgggcaggaagggggtggggggaccccaaacaaaaccatctctgatttgcaaagatcagagcccgaggcttccacgcggcactctggcttccacacctcacattccctttccacctccgggaggggagagcgggttgctgcgggactcggccgcccccactccggggagctggggctggaagttgaggcccgctttgttcggctccgcgggccggagcccctcctccgccgccgcctcccgcccccgcggcccgcgctcgtggaggtggtggtgtctttgcgtttcttttcttcagtcgggtctccccactttcctctacaggaatgcggtccgtacagctggggctgtgggtgaggagcgggagcctagtgattgacagattccttcttcgttctttctttgccttcgggattagcatttttatcgagtatttttagactcggttgtgccagtctcccgccccctgagcatgcacgcactttggttgcagtgcaatgctctgacttccaaatgggagagacaagtggcggaaaatagggtcttctcccacctcccacccccccatcccgactcttttgcccttcttttggtccaagagattttgaaaccgtgcagaacgagggagaggggcaggctgcagccgggcagataacaaaacacaccccaaagtgggcctcgcatcggccctcgcattcctgtagagccttccttcccaaagcgcgctgccatctgtctggatctcctttatccttcccgttgcgcgctagctaggtcgggcgggagcccacagatggctgatagaaggggtcagtgacttcactcccccagggccttccttagcttagatgtgcctggctgggaactgggggtgcgggtaccttggcttcctgtctctacctctcagcctcctttgatgctgaaccaagggagagagcgtgtgtgttgggggctggctcttttgggggtcccaggctgccgaggaatgagtagaaagcaccagggactgtcagccgcaaagggattgtcatccctgctcctgggccagggtggactccatccttggccacctgcttggggcagttgtacaggggctgccaggcgagtcaggcaggcacaaagcaacatctgtccacgggaaccgagggcaggcctcccctggaaataaatgccacatatggtgggagtgcggacttaaattttttttaactgggtggatccagtcaataaagggggagggaaggcggtgtgctgtctggggaagtctctgggcgtgtgatcgggagccagaattgacttcagaggaggtggtgtgatgtgatggtcagagagacctgggatttggttccagctctggttgttaattcttctgtattccttccgtgggggtggctagggtagagtgggtgagtatgctacttctctttctggggaggggtctgccaaacctaccttctccttatctgcctgggtgcattgaagacaagtgctttatgtattgaaacagaagaaaaaaagtggtatcaattgtaaaacaggcagctgtgaaaagtgtttcacagtttacaaagcactttcacatggttttctgaggtcctcaaaaaaagacagaaagcaagcaagcaaccagccatggaaagtagataaggttgttaggcttaagattatcacatttttaaagcagaggaaaccttaaaagagagaggtgaaaaggcttgagtcatagacatggggttctgcctgaatgtgctctttctgctgccccatgctgctttatactttgaagatcctgaatacattctttgctgaatgctaaagctgtgttagcttggggagggccctgtggatctttgtatgtgcggttgcttctttaatctttgggctggtgatagcttggcagagaggccttgctttcccttgccttggtaggagtttgtcctctgtggggccatacctttggcctgccttttcctcttccaaagtcctgctgagactttggaagcctaagacgtgtgaacgctttggatgattctgagagttcaagccaacctgccctgtggccttctcgtgactttgttaggactgaggcatcttctgcctgcctggataggactgaatacaaaagtagattttttttttcatcttttttttcagttagggaaacccagttgcttgggtggatccagacaaaatggattttcatccttggattttgtgcccacgcctctgggtcaccttgtgtcccttggcaacagctgctgctgttttggtcgtgggcagaaaactaaaggccacgtcttggggaggtggctggtttggccctgtgctggtgatatcaatgtgtctgctaagccccatagattgcagtgttgcttgtcaaattgtctgctttcaccacaactgccttttagtttggaaagtagagaaaggaaaatgtttaacttagtcattccccctgtgtgtggggggttggtcactgggtgcttaaaaacactctgcaagatctggactccggggtttaaggagccctcagtctaaggagattaagccaagtgtgttttggctaatatataatcatgagcagcaacagcaacatttggcaattagagctgtatactagggacttccagac

SEQ ID NO: 62038 - DNA, 730 bp, Homo sapiens
gtgcttagtaaattttatttgggttagtgcaaaagtaatggcagtttttgccattgaaaataatggcaaaaactgccattacttaggcaccaacttactgattaatgtttgttggttgctggtttccttcgctaagtgagactcctgaacacttactgatgatgtcttgctgacttctgaggacatgatggtaagtctgccctcatggagcttgcagtcaggtggagagatagtgctataattgtgtttggagtatctcctgagtagattgtggcagtctggtagctttggaagaggtgttaaattgaggcccaaggagacaaaaggacctgagaaacagagcagggggactgtctgggcctctgaatgccatgcccagggccacacattttgtgatgcaagccaggttgtttcaggtttcaagcagttgcgatttctgtctccacccctccaccagtcttattttcctgttgacaaaatgataacaacttgccctagggtttgaagtgggggcagggcacagcgctgagagcctcctccctcaggggaaattttctaaagtttctcactgtgttctagcttcaaaaccatatgcagtttaattgcatgtttagtatctttgtgcatctctcttgttttgaatctgctggaaactttctctgaaagcatatatataggaagacataaaaattctataaatgtttagtggttaaaaacaaagtcctgtcca

SEQ ID NO: 62039 - DNA, 6339 bp, Homo sapiens
agtcatggttagccgcaggtttgatcggggaagagacactaatcaatgtatctgattctagaagaagatggagcttctaggaagggcctgccctcaggctgtcctctgtgttccccggcattctgcattttgcagtcacccctcattatccctgagtccaggaacacctgagattggaaaggattccagccccatagggcctttatcgtggcccccagtaagtgataaatattcgtactaatttggggcagtgtcctttttccagctgttttcccatgagtgccctctgttccgtcaggtggccgaagacggataactttggcaaagggcttggcacaaatggccaagtttacactggatcactatactccgtgttatcttgtttccccgatggtcattgccacacaagaaagtacttcctctgtgggctttgcccaccctcttctcttgacagagacctctgggcctagataaatgtataaactgcattgcaggaatgaagccgtttccattaagaactggggtctatgtcctgggatccagttcttctcccccttttagtactgaaagctgcttcccatctgaaagctgtctggggacagacaccgtgcagctgcgtgcagacttctttcagagtttgatcttgcaggcttcccagtggctctgctcttccttgtctgcttcctgggggtctctcagtatcaaagccacctgtggctccatctcacctccctgaacaggaggcactgtttgtcaggaggccttgccacctttggccctttctttccaaagaaagatccctggcctggagtttttgtctcagctctgttgtgtgaccttaggcaagtcagttgacttctctgagcctcagtttactccttagtaaacaaaaaggttggatgaggcgctctccaaagttcttgccctctgtgtccttcctctgcgttctacagggagggagtagctgcctctgtttggtggtggggactcaggcaggatgggtagggaggggtaggggaacaagatcatggcgcacctccacggccacagtggaaaccttgaaccttgagctgtatgcggtgagtccaggatgctgagaagatgccgggctgttgggtaagcagagcccctacgggaagcaaagagtattattcagccctgtggaatgctgaggcagggctgagcttgggcagggtggctgagagaattgtggctctagctgtgggcagaaattcatggccttgaagaatggctactgtatataccagtgataaatattagtcactctggcagcagaatgagtttcctgtgctgcatttttggcacttccagaaaagggaaagcctttctctctgacagggcacaggagggagaaacaggaatgtgtctcttaccctgatgccctggctggagatcccgtggggttttcaacctgcctgaagcaacgcagggcctgctaatgcctcctgttgccctaggtcaggccagggcccattgttgacatctgtgctgtgctgcctctgaaggtcttgcttgagcatgtcctgaatggaaggcttcatctgcattcattccccggccctccctgccgtctgcacagcctcctccaggcctccccttcccagtgaaaagcaccaccatccagacctcaggaagcaatcattttagcctcttctccttctccctcaccatccaggacatcactgagccctgtcagttctgcccccagaatatctaagttcatccaatgccccatttccactgctgcttcctcacccaaatcaggatgtttctggccccgtctccctcctacctggtctccctgcctgtaccctcctctccactgggcccattctccaccggcagccagcatgatctctaagaaatgtacatctgtcatctgtcatatctgctgaaaattgttcagggcttcctgctgccttgagaatgagggtctgaatcccaaacaagggttcaaatctcaacctctcaggcctaccctgaccttacgtatctttcctcagggcctgtgcacatgctgttccttcttcctggaatgcttgtccccatagttttcagctggcgaatgtgagtcaggtctccccttaaatgtcatctaagagagccctttctaattcctccccttcatcttaactctatccccaatacactctctcacagagactgttcttttccttctgagaccctactccagcttgtagttctaaatctgtgattatgcactgtctgtcttcctcttgaggtcaggggccatttcttttgttctctgctatgctcaggacccagatcaaaggagctcagtaactatttacaggcgtacatcatatgtggaggacacttatgctgtgatggccccacacacagcttcctttggggtctgtcccctgctctccgttacccgcgtggtagccactgagcactggctcttcctggcttcactctctggcatcaaaacttatcagtcctacatctcagtcttttgcaaggtgacacttatctgattacctaattcacacgaaggtgttaatggtggtaatggcatagtatttattaccccaggggacccagaacggtggtatcaaaacatatcattccccagtggtttaaaactctggtagctttccagggagtccaagtggagtccagtctccttagctgagttcacagggccccgtctgcacgacttggcttctgtcggcttccctagccctgacttcccaagccttagtcatcaccctctctcccacccagggctcagcacagtacctggaacagtcaagccctcaataaatgtttactgagtgcattaaaaaaaaaaaaaagattttaatgagtcatgctttaactgaagattttagtgtagtcagtcattgggccttggatgccaaaggaatgacaaatggtgggaatttcaggcacagtgactgtgatagccccaaggaaaccaagagagaagtagctttatctgggtggaggggagtgggcctttcagagcctcgaaatcttcccacctgctgcgccactcccaccacataagcaccccacccttcttcccagggtgagatttctcagctctgctttctggggtgccagacaaggggagagccttgttgccatgccctcctgccctcctgccctcctgatgcagtctgtggtcacctgcaggcagagacagatgaagtccgtcattcggctgcgagtaatttctgatgggagaggggcttcccccggcccttcccgcctctctgagccttgccacggtcacttggtttgcccagcctaagtcactgcctgtcgctgtggttattgcatggacagggcctccctctgtccctccacttcccttccctgccccatactgttgccctcacccaccccaaagcctcacccttcccttccatagggatatggcctgatagaggaggagccatttgattttgactattgttgaaattgagtggggaattttgggtttgttttaggttttggaagggaggattatctgaggcttgaggcttctgtgatactgacatctggtgtggaaagtcatcctccctcacctaggtgactgggcctccaggtcatctccccgagcagcctccctggatctgctctcctctcccccccacccccccaccacctcccgcgctgtgcccagggtgatctttctaaaggacagatcttgcttcagcacctccctggttagaacccttccgtccagtggttcctagtgcttcggggataactcgccttgtcccttggggtctgcacagcgtcctccatctcctctcacttggccttgccctcgggggctccggtaagaagctttccaacctggcagctgcagactctgtgcggttgtattattgctgtaaatgggcagggattacgcatttgtggagtgactgatttcaagtacaactgccaccatgggagaggtctgtgaaaatcactggaattgaaaatgaccatgctttgcccaaaaaggttgagaatccccactctgatgatactagaagcctgcttgcctccccaccctgtgccaagccatttcttgcctccttgctttgcccataccagcctggaatgtcccaagcctattcaacttacttcctccaaaacgtagtcccatcttgatctccaggaagcagccttcagatgccccctcctcctggccactgcaaatgtgtccccccagctgctgagcatgcctaggtctgacacacaccacgatatgttgaaatcattggtttctgggttattcttctcacagtcccaggcagtgagccctcaaggacaggggctccatgggactggtctctgggtcggaggccaggacccaggtcactaagggcatgtcactcatctggaccacagctccctgccttgtggtgtggactctgttctctgcactgggctcgttctaaaacggagcatttggtccttgcagcctgccttgtggtttatgacttagtagattgaaaatgacagttgtgctctattttcatttggaaagaaaaaaaaaagtggaaaaccagagattgcactgatctggaggtagagagaaaactgtggagatcaaagaagatattatgtattatgaatgttacacagatcaaggcatgtttgaaataggcttaattttcctcaagttggcttttgtctcacaattgagttcttgttgacgaagaccagttattattcgtcttcgtgtctctggagtctagcacctagcacggtgcctgataaagcatggtcacttcacaaatacttgtcgaagaatgcatgggatgaatatgcatttgggtatttttaatgcttgatgattagaacattctcatggcttgttaacttgtaagacataattttcattgtaagttctttgtgtgtgcaaatgctttttgtgtggaatgcttgccatgcactgaaaaatgctttgtgatagcagttttgaaaaattgagtcattttgccctgattgaagctgggtgaccttgtgcaagtcactttaaccctctgggacttgtggccctcatctgtaaaatgggtagaaggtcagagtggacctcgtggcctgagaggctagtaccccatgctgcatgtaagtcttacatcctcctctttggtgattggatactgaccctctccccaggggttcctgcacagagctggaattctctctggtgtctttgcattctagtgggtggaatgccttgtttctcagtagcaatgagaaatgttaatgtgaggttatgaaagcaagccaagagccatggaataattaaaacacacacgcacacaaagaaggaaaagcgagagggggaaacacacttaatggacaagggatgagtaaaacccaatggactgagaaaaccccagagctgaacttcacatgaccccgcgtgctgcctgcagttgcgacacccgcgtgccccttacgctccgccggcctctcagtgatgtcagtgggccatgggccccacaggaagcaggggctgccatcagcctggtggagcgtgccagcccgctcctcctccacggcccacttcccacccacccgggtctccagataacatgaagccatagctcccaggctcgtcagcgggggaaaccaactcagtgcttctcagaaaatagaaccccagcccattagtgatgtccacgcaggcaagagatgaccaagaagaatgtttgccttttaggagttctctgcctgaaaccagcaggtttcctttagggatagggtgactgtgcttgctgaacacctctaggtcgtcagtgaatgaaataattcattctgtgcttgagtgtctaagacccagggggtttaggaataattaggatactggctgtacccttggagttctgtgctgcttgggggatacgactcaaactcacagacatctgtggctcaaatcaaggcatatagatgcagtgactcttggaacattcgagggagaatcaccacctctgctggtggaggaaaggccaggaactgcccacctagttttcccatgaccccagcctgtagcgggatatgtcagaagatttggatttagaggaacttgggtttgacaaaatagaagtgtatgtatataaacagagttgggagtgatgggggataggatgctgacagcaccttggtagtccctccccctacgtgacagtattgacttcatagtgttgttgtgaggcttgaagaagatacaagagggaagaggagcgttccttgccgtgcagatgcaaatgctcattgttacttgttctgcctctctgtgtctgtgacatccagccctgtgtgggctaccctggttgcaaa

SEQ ID NO: 62040 - DNA, 4064 bp, Homo sapiens
tatggtgagtgggttgcgaagacctgactccaacccagagaatcttgactttgacttcatcctcccctccttccacctgccagtacccagtctttatctaaatttagggggcttgagaggccattctttctattttgggtaccttcaaacaggtaagcacagttttctttgaagttacctctgcctccatgtgggagagtatcaacaaacagttcccccttccccctccaaaagcactctctgcacagtcacccctaggccaggagcagccttgtaatatgccacacatgttgttactgcctgtggcttttcacacctcctgtctcaaatattggagcttttttggctacagccctgtgatgaaggcagtgtgggtgctgttgaccctatcttacccatatggacactacatcatctagggtcaccctgttggttgggatctggagtaagcccagaggccaggattctgacttctggtccagtgctctgccctaggccttgagcaaatgtgtatcaagttgcactgacaatctttgaattcctggaactcatgccatgagcacttccaggagcaccttagtgcttcattacaaagatgatgagacgtaggaaagtctttttttttttcccacggaagcagaatctcacccacacccgcagattttgttgtgtcccttcagcactgagctgtgttctcagaacagaacaggtagaatagagtcaaaatgcaaacagaatggcctccctccacagtctgctttgatggaaatgtgatgccaagcaaacagaaaagttgttttggctccatctctgaggtcatttagttgctatttccatctactttgaatccacatctgctgtgtgctcagagccgtgctggttgccaaagaatccaacaagaaaaaggcatggccccctttggggcgcttgggtcctctcgcagtgccccaagcccaggtgagagacatgccctctgggccgtgattccctcatcagtaaagcaaggaagataatgtctggttaaccaccctcctggagtcatggcaaggctgatacagattcagtggcattaactcatttgttcattcagcacattttactggcaacttatgctgtgctgggctctggatatagtagtgagcaaagaggaagcactcacaagggtaacactgcaaatgctaggagtcatgcatgagaagtccagggagcctgattccatttgagcaaggggtggtggtctgggaaggttcccccaaggaaaagacataggagccaagaccaaagggtgggtaggagtaatcagaagagcatgtctctcatctctggacttctgtagagagacttctgtaaccactgtaccctctggaagtgggtacagaagtccagagatgagagagatgtttaacaacagagagaaatccacccgaaggactttttacatctctctaacatctcctgttcagtttatctcagctggcctttgctgagcaccagttagttgccttgtgcatccttgggtgatggattatggagatggcagtggttgacactgtctgagagcagctcccagataaaccagcgcactgtggttgatgggctgcctccaggtagagagtgaggccctccaagcacatcctggccatccacatcttcacatttgcagtgcctagcacacagtggacaaaagggatatactggacacgttgtcctaggatgcagattcctaccaggccttcaaggcttgtagaaatcttccctaaaactgatcatgtggcctccggtaaggaatctaagcttttgaatcttggatccatctcgggcacagggataacggtggcgcccatctcacggggtgtgtggacgttgtctcaataatgactgacgtgctgagcaagtacctggctggagaagcgtgtggtaaaggggagcagctgtgattattatgggtatcattcctagtggttctgcaattagtcttgacagtaagtgctgcaggacttcagacaaggagaggctacaggtgtggaagtgctcctcaaagcctgtgggacctaaatgggcacagtgaaggagagtcttaggtggaagcaagaaaactgagcatcaggaagggagcaagacccttggtgatgggggtatctgttctgcatggaggatagatgacttctcagccattgggaaaccagctaaccagctttctgcttgatggttgtagtaaaatcccatgattagtgacaatggcatgccaggtttgaagagcaaaggtcaggaggtgagaaagcagataaatgcaatgtttatcttgaaagaagttgtcaactacttggaaatccccaagcttacttcctccaggaagccattctggactacttcacccagttctcatagctcccgggccctccatcttcccagcactgaaacacacactgaaaagggcatttttctaaatatgtctctgcctccccttgtggagggatgtggctccttgagatctggggtcacggctggcgtgtttcgtggagtagctagaaagagtaataatcctttttgaatgcacagcatttacagaggcctcacaggctgaaaatggtaattaggatacacaattgggtcttttgacctcaaatccaggcattttcccaccttgtgggcctcactcaaatgatgaccccaggttctgcctgtgatgaatgagcaggcatggttttgttctgttaggatatgacggtagaagagagctgtttgtcagaaccagcagtggcttcagatcttgaaagtccaactccttcattttacagaggaggaaacctgtgccccaaagcaggtccccccaagttccagcccagtgccaccccactgcacagagcagctgtctccttttgatcatgaggaagccaccaggtccctggtggagttcagcagatgtgccgggtgggcgactctggtgggtgtgaggatgtttcctttcctgctgggaagtcctccaagctcttgtgaaagagatgtggtttgtcgagcatggattttcaaactttctttatagagagctgttgttagcttaaaaatgcctggaaacatgatcaagtgtaatgttttaatgataacatagaagcacatagtactaagcacatgtaatgagaatgtacagaactctctagtaagagtctgaaatttggccgggtgcagtggctcatgcctgtaatcccagcactttgggaggccgaggcgggtggatcacctgaggtcaggagttcaagaccagcctggccaacgtggcaaaaccccgtctctgcccaaaatacaaaaattagccgggcgtggtgacgggtgcctgtaatcccagctactcaggaggctaagacaggagaattgcttgaaccttggaggtggaggttgcagtgggctgagatcgcaccgttgcattccagcctgggcaacagagtgagacaatgtctcaaaaaataaaaaagagagagtctgaaattcattctttcaacatgcttgtgttgggtgctgcctggcacagcaattggtgcccactaactcacagcgtcggggaagataggcacggaacaagtcatctggtgtggtccctgcagtgggggagcccagtgagggcctgtccagcccagctgagaggagactgagagaaggctaggtggcataagtaaagatatggatagcgctttcctcttcagagtgtttattaccagggttagataaagcagatctcatgtattttctgctactaagtagaagttcttgttttgtttgatttctggtgggctttgatattttccaaaaagataataactcattgtagagtaagatcaggactggggccagcagacttgggtccaaaggtgtgtcatttttataccagactagaatcgggtgaggggagatgtaaagagatcactattgtcacggaaggcgctggaaggagctctgcttagaaaaaatgcctttctctaggaggttttcatccagcatgggaacacaaaacaccagtttaaaatagctaggtaaggcttcacagtctctcaatgtgatgtgggtgtcct

SEQ ID NO: 62041 - DNA, 3322 bp, Homo sapiens
cgtggtgtttatttttgatttgaaatatgaaaagcatttttttaagacaactgactcctctgagtcatgcccaggggagcaaacggcctgaaatatgagcttgtgcttgctggaggaggatgacagaggagcctgctgctgagttcactggtgctggggttaggtcactgctgggctgaagcgcactgaccataagagcaacatgtgggcaagagccgcggcactggggtaatttattgccgccgctcgcttcaccaggaaccccacacgctgggttcccacaggatgcgacattcccacaggatgggacaactgcatggaaacccacactcgggcctgtgttgagcaaccacgtttgagtaagagttatcttatttggcagggtgggttaggtgtggggtatttgtcactgagaagcagaaactgtatgctcgacacacactccctgagtccttagggaattgcgtagtttttttcttttcttttctgggttcatcttaccagcagtcgtgtttgagaatgtgcacagctcaccttcgttcagccctttacagtttacctccatagccttctttgcgtcttggcaccatcttgcgaggtgtcaggccaggtgttaggatgctctgtttacagatgaggagattgaggcatgagttgtgattgctcacaattgcctcctgagtggtggggccatgctggggcactgtgcccagactctagacttccaggggtccgggacctcctgctgccagtctcctagcccgttaccacagctgtctgtttcttggcctctccctagatttctaatggaactcttggggtacagtctggaaataggtattttaaacatgctttgcagtgattgttacagatcttcatgttcaggtggcccaggggctgaccctgctccaacttccccctcagacattaaacctgtaccacccactgagatggttttgattttctattctgcgtttaaggcccatcttcaccccataaatgccagctccccaaggacagagccctttcctgtcttgtccacaccatgttccagggccctggacggtggttggcacacagtaggcccttggtaaatgtttgtcggatgagtatgtctcttcctcagctctgtggttagctgggagagctccgacagtagagtctggcaggtctggttcaagcatccctttggtgtaacatggtgtgaatggtggggcctcactgaattgtggagtggggggcagtgtgtctccctacgacctcctggtgaggagaagatagtcaccacccacacaggcacactcttgaatattccaggacgaggtgggcactcattagagggcagctcttacggccactgcctggtatgttttggcgtgagcagtagggtcatcgtggtggtcagtttttccactgccatcaaatgggatccatttagctctcagacagacaaggtatagggctggactctgtgccgtgggctaaataccggccacctcgagcctcaaatcaagcccagacaccggcataaacccaggtggcccaagccgaggtcgctccccagggccaggctcatgaatggataagtaaatatttaccctgtctgaggtcgaatgtgaactgtctaccaggtgttttgtttttctgtctcctccctctgtttctgcagtgcctccccctgtaaaaaaggaaaccaagaggctgacaggttaagtgacaggcttgacacagctagccatcagaacgtcctccagtcccatctgagtcctgttcctcctcaggcacctcctccaggaagcattcccagatgactggcccatcctgccctttccctcctctgagccgcaccctgcagacggccctctacctgtgaatccatacaggatgtaggcaaaggggaagaggtttgctcatcctctctccttcacccttgtgcatattaatactcacctggcaattagtcatatgcaactcttatattgaccttacatgttccgtgtcttctgtgcccgtctctggagttcctgaagatgaagggctgtgtctgctgcaccttcagactttttgaaattgattggttggtttgtacatccatttattcaccccacccctcatcctactgtacacgcttatggtcagtctattctgtgtcgggctcagggcctttctccccaaagtgcgttcatgtccaaggctagagtggatggctagaggccagaggacagcttaggctgaaagtggtagggagactatcaatgaagctggggggagctgagcttctgaaacttgggaataaattttcagccttgctaatgtgttcctctgaaaaaatatcttatcaggccctcagatatccaccagttctccctttccaacttgcagcctgcacccttggccaggaagttcataggcaacaaaatagaatccaccttccctatcactcaccccttttaaaatgtgactaactctgagctaaccaagccttggccagacgtggatatggttatgcacggactccgttttgtggtttgtcatttctgacttgctgggaaatcctttgttgggggtggggatgggaagtagagcatctctggggctggagtttttctaagatgtgtaagatttagaggctgtcatactgcaaacagggagagcgggctgtctgcttggcttcatggtcagtggagaacagcctggacttggagtaagaacagctaggttcagatccctgcttttactcctgaccacttagtaaccttggccgagtccctcaacctttttgcctcagcttccttatctgtaaaacatggggttcttgaaggattaaaagagctggtgtgtgtaaaacccaggaacatagttcctggtgtatagtgacttataatttcgaaaaccttaagattttattcataagattttttttttcaaggccaacttaagatttctaagagtttgtttttcaaagagctggggtcttgctttgtcgcccaggctggagtgcagtggtatgatcatagctcactgcagcctcaaacctctgggctcaagagatcgtcccacctcagactcctaagtagctgggactgcaggtgcacgccaccacacccagctagtttttaaatatattttttagtagagtgaacctcgccattttgccaagcctggtctggaactcctggcctcaagcgatcctcccacctctgcctccaaaagtgccaggattacaggcctgagccaccacgctcagccttctaaaagtattttggtgtgcaccattagcactgtgtcttaaaggcgatgtgcaccttgagcacagagtgtt

SEQ ID NO: 62042 - DNA, 2233 bp, Homo sapiens
taccgagtgccacagggagaaagtggtggtttctcccttcccttaagaaacctggttatttccaaggctcaacccctgcaacgccccaccaagccagtcacccaccactgcacattgagaatctgctgctctgtgaatgaaattggcctggggttaatgagtggtgaatgtgtgtcagtgtttggtatttgcagcaggagctcttctgcgattccctaagctcagatgaacggggcctttaagatgccatccagccatcggagagatgcaggaaaggccttttgaaatgctgtttcccctgacctatttgaggtgaggccctgtgatgtcatttccccagtggtgtgtgtgagagagcaagcagcactaagaaaagccactgctgagagttcacagtccttgcttcagtgttgtcttacgctcggggtgccttaaagggcttacagcgaccctacctccagcttctccagctccctttccttggcaaacacttgacccatcccagccccttgggctttctttcctcctcctctgctaccacatactgtgggtgttgggaaattactaaaggcgcgactctggctctcaaagactctgaagtccaggatcgagaagaactgtgtttacacggagttgtcaaggatcattctgccaatgataacctattatcgtgcaactctgtgccaggtcctgctctgggagctttatgtgtgctgttgcccctcacactcacggcagaggtgagacagaatgctgagagatttctgcagacaaggaatctgaggtttaaagaggcaatgtttgatgagccactgaggggtggggctgggattggaaccgaagctggctgcccttcagcccccagggtcctgctggggagatgtacccagggggtcctgtgctgggagagtggaagcaggggtgtcactgggggctttgtcctgggagctgggcaggtgctagggacagagctggcctggttttggagccacaggagagaagatggccgggaagagctgtgtttggaaggttcctttctgtgccaggggtcagcaatctgggttctagcactgagaggggcaaaacgtgggtttgtaggggagagagggtgacccccagtgagggtaagaaagataagctccagtgagctcttctcaccctgggtcccagcctgtaccaaaaatccaggggcagcccccgggcccagcctgcccccttcacagtcccctgactgcttgaggctgtgggccagtggctttgccccttggaagcttggtttcctcatctgggacagaaaggggtcaaaacaccctttttcattgttaagattagataatttgagagccaaaacttcttgcagggtgcctggtaccaagtaggccctctctaaataaataaatgatagttttcattttcccttccacttaattgtttttttttaaaaaaaacttttcttccctgtaataacaaatttcagaagacaagttaatacattgctgtgtatactctcaggccaagaatttcctcagtgtttacataccagagcagtactttgaactttgattttctcctctgcctctgtgctggttcagacaccctctctaagatgccagaagcattgccctgccttggcctgttggtggtggggtatgtgtgtgtgttttcatcgtattataaaaacgtgaaacatttgaattacgggcaagtggtattctaccagatttaataaacgttaatattttccatattcacatcaggtatttgtaacatctctttctttactaaaaataaaaaccttctgctgaagacctcctgttactccaaccccttcccccttcttctcgctcccgtttcacaggtgtttactctcttttaaattggtgtgtgtccttcccagctagaattttgtagtgtattatttgtaaagccaaataaccccactgcaatgtgtttgaaccaccaaagcaaatgatcaccttttgggaaaagaaggctgaatatccaaggccagatcagtgattcaagatcacagaacaaacctaactgctctcaaattgaaatctcaaaattataaattcattgcctttgacttaaaacttggaactttcaaccctgcataattgcagatacattaaagattgtgccatcttgagctcccagggtcatctgaacctttcatgtgaggaaacacatcccagagtcagtcattcttttttttttttttttcttttcg

SEQ ID NO: 62043 - DNA, 4813 bp, Homo sapiens
taaagcaaaactgaggacacatttacatataccaaggggtgcccagccctgttcttcctgcacatagaatcttaaatgtttcctagattgagccattaatcttcgattttttgcaaaggaagttaagacagagataccaagtgccttgcacatagtaggcctgtagtaaacacagactggatgatcaactgctctttggaggagcagagagtatgcctacacatcatttgaataaaatgtgacagcctgccagagaccagactttgaaggttatagacccagggcacgtggccagagcagctgtcagtggaggtgcggcctagagcgggtagtgtggaggctggagggggctgttccatggcaccagggttgagtgggagtcagtgcagacttaggagagggaatgtgtgttcggggatggggagcggggagggacttctctcagacacttatatggaatctcaggtcatacagagacattgtctctgtgttttatattttcctttgaggacatctccatttaagtagctgatgcctgagcggggagagaagaatgagccttttccttctgttagagcctgtagctgcctcttcagggtcagactttaaggtgtatggggacaaagttgggtcagtgtttgtagaaaaaaggctctttctccatttctccctcctgcttaatccaaggagcagagaacaccagggaaactcggaagtagcggggttgatttgggagctagatggggcctgacatatgaagctgctacctggttacagccaggcagagttgaaagggtgtcctttggcggggtgagaagagagcagcctccaaagattcccctgcaccccgccaggccctgccaggggcccctcccacagttctttgctccttccacggagcctgtttgagaattcagtgattcacttcccgtcgtcaactcttgtttaacgttcccctccattgttaccaaacaatccaggccccagtgatgtgtggtgttctgagagtagaggagggaagagagagagagagccagaactgtttacagagcccgggagatgggcccaggcttgacagccgggccgacttgaaagacaggctgcagtggactgtggccccaacagctgggtgtgtgcagggtgggaaatgccaggcacagccgctcctccacagaaaccactctgttctttctgctcttgatggaagctcctgccctttattgtggtgttagcttctttgttcagttacaccgacagctgagttttctatttggggccatagttttggggtcatgattcctggagtagaaaaaaaacaacataggagctcactcagaaggatccctgggtaaatgccatcctttcctgggccccagtttcctcacgtgttcagggggaaaagaaggtggtggtgaaatgccccccaccagctccaaagtcctgtggttctgaggctggaatattctgcaaaaggacatttgcacaccacccttccactgcccccgccccagtgtcgtgtccaggtccagttctaccagccacagatgtgagcatgtctggaacctgtctacctgtctcattcattccatgacctctgatttttgaggtcagtaattctgcagcctccctcacctttctggtttaaagcaacctcctctctcaggaagttgtttgaaatcaatttaattcctttatatcccacatgacagctacgactgccactgtttagttgatgttggcgtcgggtttggggcttacttggcttttgtgtttgcttctaacctgcagaaagagtcaaagttctgaagttttctctctcatcctttctgtttgttgctccatgtacagtagggaagaggaatttttgttggtagtccacatttttgattacttatttgctctgctgctatattatgattcaggttttctccaaggccctaggtgcctaaaagcattgaaggaatgagaagtgtagacacagaacacctttaagccacttccccctgcaaattagtgtatttcacaggtatttggaatgctagaaggtactagaaggtgagaagacactagagatccgttgaacccatcattttttaaatgagataatccatacctaaagactcctccatgagtcggtagcacagccagagggagggccacacacacccctgtcatctaatgagcagccagggctccagtccatccccagtgtgggccatatatctgtgtgctttctcctctattaaatccaacacttgataaaaatctccagttaacaaatatttgttgagcaagtttattgcaaatcgctgtatttaatgtctgcctacaaccttagccacagatgactctctctccctggtatggcaagtgggcagagcttcctcattcaaaaacattttagcttcctgcacttccccgctggttgctttcgcctaactggcacctgtggctgtcattcccctgctgtttttaattgcacctctcaagaccagctgattgcttaaagaacatttctggtattgggcccatggcagtaatgtgcgtctgtggatccctttgctatgaggcttgacttcttgatcgggttcacaaggctggtgggcagcctgagatctttgcttatttcctacgtcttctgaaaggtactatgaagcttaccagttgctgatgcacgctatcagctaataattccattaccattactattttctgagcaaatgtgacctgcaagcccctcgctccatccaggatgcaggcaaagttaagctaggtttcctttccctcaaggagctcctggcacagttgggaagggaagtcagaaacacacagaagtcacttcatcataccaggcctttggtgctaaatgatgatgaatttgaagagtgtgggacagtggggatggtggactgtaagagttcgaggaggggaggatggagagaggtcattcttagcagagagccacagagtgggttactgtttgagctggaagataattggacctccaagggctctgtccccacctgcacctcagcgcactatgctggtggccaagagtgcaggagcctcacattcagatactgtggctgcaacattttacctccactacttgggcctgttcagcattttgagtttctatgcctgtaaattaggcctgtctaggaagtgggggtgaggtggtgggtgggcaggtgctctgaatctcagctgggactgggtgggctgataccggggagagttgtaagtatctaggacccagcgggaggacgcctcacctggaaccctttgcttgttcctgattgtagctgttttagggatgcagctttcagacaagggccacttagttgatgaggccggcttaatcgaggagggctgttgccaccctgacattgttaagtgtgggcctggcttctctgaagtcctcctttcttgcttgtgtggaattcctgttttcctgcccataggggttctttgctgtcttaggtgaattgccccaatgaaccagaacctttttttttttaggtacaataggaggtctgtacccttagacagaaaggaatgctaattggccacttaactgtcctcagggtacagatgccagaatatacagggcacccattctttgttaccatttgggatggaaactgcttatataagcttgtaaagctttggttcagaaagcaagagaatgtgtatggaacgttagcaattgctgtcatgcaaatgctgcattttttgcatgtaaaggtacctctttacctccatggtccttaaactaactttttcaagaaacatggtcatttcccacccttcctttacttccagctccccattcatacccaacagtggctaactgaaaggtttgcaaatcctgaaggctttggggcttcttttaaaaagaagagactgagttgtaaatgtcataagactgagatggttgtaaatgtcccaaccatactgtgtgacatttgctaggaattgttgtaaaatcactggagtgagcgcttgtcctgaggcactgcctctccgcgtgaatgtcactgagtcgcccggttgacccgttgcatgttatgcagcacttgtgacattgttttatctctctagccggtgactcataattaaggaagtcaaaactgtgcaattaacacaaaacctcctcatttgccctcttcacctctccccaacccccgcccccagtcaggaatgcccgcctgacattttctctaagtctttggaaactttaagatttgttttgatagaacaaggccgccagttatcatcgcctggttccacttgttttaccccaaaagtctgtgagaatcttttccaggaaaaaaaagaaagaaagaaagaaagtaaatcccacccccaagcgtgcagtctgcccacaggaagtgattcatggtgctccgattcgggcagacctgactgcaggaggcgggaggctgggaaccaggtctgggaaaagagggcagagagaggatacccagacctaatggcttctgctctgtggaagaaagtgaaaaacagaatgactaagagtcctgtaataagaattgtttgttttgtgaagttgaactaatagtgaggtttgccggcagataagacttgagaaattgcagttgtcaggggaggggacttttccatgtcctgctttttttttttttttttttttattaagagagcaaagctatttctcagtcttttttttttttttttttttttttttgagatggagtctctctctgtcgcccaggctagagtgcagtggcacaatctcggctcactgcaacctccacctcccaggttcaag

SEQ ID NO: 62044 - DNA, 933 bp, Homo sapiens
atctccagatgtttcccatatcatttgttataggaccaaattggctccagaccagcagcttcttgaattgaaccccagctgccacatagaatgtgtactgagttgtgtgtggttgggagaggaggagaaggggagagggaaccacgcagatgttccattccgatggtggtgggcatgcctcgtacacacagagccgctagacacagcagagccacctgccctcgcacacagcccagaagagattgtgcaattccttcccccacctttcccagacagagtctccctctgttgcccaggctggcgtgtagtagcgcgatctcagcttactgcaacctctgcctcctgggttcaagctattatcctgcctcagcctcccaagtagctgggattacaggcaatgcagcaccacgcccggctcatttgtgtatttttagtagagacagggtttcgccatgttggctaggctggtctcaaactcctgacctcaggtgatctgcccgcttcgacctcccaaagtgctgggattacaccgcacctggctgaggttgtgcaattcctgagagaccgaaagagactcgcatgtacattgtagttgctgaaatccagcctggacatcgtggcacttttgggttgagcacacccggtgaaacacacccacccggcggagtgactagtagcgcgaaccagctggaatgcatcgaagaccttcctgtatccgatgccaagtgaccgctgcaagcttgcagctattcagtgcaggcgtgggaagcaggccagcggagcagcatgtctccagctgctgtgtttcttcccactctgcgctccctcttccctttctgctgctctccatatttgcacaatgattattgttacaaacaaacatggaccagaggggctggagattggaaagagcagcccagatttcaccctgtc

SEQ ID NO: 62045 - DNA, 2087 bp, Homo sapiens
aggagggactcacatggccacgctctgaggagcctgcagaaggaggcctgtctgacccagccttcctcccatgcactgatcactgttcctgtacttctgtcttaccgccccattacccatccatagatctgactctggaaacaccgatgaagtttggctgaagtcatgccagtggatggatttagtggagaggccgacccagctcaagatggaaagacagccagagatgcgctcgggtggtgggggttccttggagaaggctgaggtcagggggatgatggggtcacagcagctcagaggggaggcaagccctgaaggacagtggctacaagcgggccctgcagagatgcaaaatgagatttaagaagaggccttggatttggcatcagggtttcaagggggagcttttagggagcagtgtgtaggaggggaggggctgcagtcagtcagcagtgcactgaagggcaagtaccaggtggggaggtggaggcacccagcagcgcagcctttgtgctgactcacagtcagtgcgtcccaaaccctaggatggaggcaagcacacagggagctcttcctaggaaaaaatggggacatctcaggacatctgattatttcctttaaagagattattatgaaattactgtacaaaaagaaagaaagcagaggacatctggtttctcctttcatttcctccccactccaggtgttagccccagggctcaggtctggggaaggttgagcctccttgccccagcaaagccacttctggtaaggggcagggactcctggttgagacctggctcagcatcctgccccaggcaggctctcggagaccctgggacctgggaccgttgtttgcagggcaggagatatgagcaggtgatgttcctgttattacacagcgtgctgggtgagtcaccgggaatttcctaggcatttaaggcggaaggattggggtaaatggaggggaaggaggaggcaggtggagagaggaaaaaggtagtgagctggcttctgcctggtgagtaagttgttccctgctttaaagtgagatgattagggcggagccatgactgaggaaaataatgtaccagggagagccctgagggagcagttgagctggagttaaaggaggtgatggcttccagagtgccagtggcaggagtgagaggcagggatggggcagcttggagtgagagggatagggcagcttggaggtggctgatgccggatgcagtgcttcagactgaaaggtggtcgtttgctgtgaattgccctctagattgtgtagactaggatgatgggatgtttcttgagcttggacccaaggcagcatctcctgttgacatagttctccctccctactgacgcttcctcaggcaccttgcctgagagttgagaattcttaggttatttcttccaaagggaggaccctccccccagggtgccactttgcactggcctagttgcacctctgctgggaaggtgtgaatcgggggcaagttgccccgtgagtcagggttaggattctgggtgagactccacgctgacaggcccggcttcccctctgcttcatgagcccctgtgcccatgtgtgagcacaggtgtggtggcagggcggcccgaagaccaccagccctgagtgtggacggcggcccagggcagaggcccaacccagttccaggcatcttcatgctgctgcccaaggctcttttacaatgcagcctctggctccggtcttccccacacttgtgaaatcacaggcagggtcttccccacacttgtgaaatcacaggcaggcaacataatgacaggaagtcagctgtcggctctgtcttcatactcctgagggcccggtttttagactttgccactgttcctggttgcagtatgctggtcataagctaaaagggcatgggggtctctgtgcagcttggtttggtattttagtccgcagatacataggttggaattagtaccctgggtgctgggacacagctggcgtgggctcacagagacctcatcctctagcataggagactcaggtacacagtttctgggacacaaggttaattctgcactgaggc

SEQ ID NO: 62046 - DNA, 2134 bp, Homo sapiens
gaaagtgaagggtagccaggcacagtggctcacgcctgtaatctcagcacttagggcggccaagacaggaggatcacttgaaaccacgagttggagaccagcctgagcaacatagcaagactctggctctacaaaaaataaaaaaattagccagggttcgtggtgtgagcctgcagtcccagttgctcgggagactgaggcaggaggatcgcttgagcccaggagttcgaggctgaagtgagctatgatcgcatcactgcactccagcccgggcgacagagcaagttcccgtctctttaaaaaaaaaaaaagaaaagaaggaaggaatgtaggtaggttaggtgacttgctcgagatcatacagctaagtcactgctctgattctaagccatacacttaaaacagaagtcttgagttacctataattcaacttcacagagccctttagtagagttggcttattatccagtcccatgttctctcttttaagagttagtaagtctgacagccattatgagggtctacaagcaaaagcactagcccaatcatacccaaaaactcatgttggcggagagcccatgcctcagatgaaaggcgtgaataactagagtggagcggacaaagctaacaagtcttataatgtacacattaagaagcagaataaacttcagagtaaatacgcagaataaacttcagaattcagagtaaacactctctcccggagcagcaaggataacaacatcacgatatcaacaattccagcaccttacactcctgtaacctagcgcaatttccggagagccttcaggttcatctcaacggatcctcgcaaaaacctgtggcctgggctgagcagagcgggaaatcagtctcactttacacaggaagccgaaaggaacgccgaagaaggccgagtgggcagaaaagcacgagattaagagataggggcagccacctggggagactgggcgcctccactgactggaggaagaacgcagggcccgctgcggggacaaggcccagagaggccgtggtgctgggtccgtcgcccgctgaggctcaggggccttggaggtcggcccaggcgcctatctactcacgttggaccagctggtctcctgagaagacggaggagcagctggtgactaacgcacagggtacgccagcagccatagctgcgctcgcgagccggttccgtcaggcagccgcttccgccttgggctgcaccacggccgccggcgcgagggggagacaggccggagagggcgttctcggaatgaccaggctggcctgaccccgcccctagacccccttccgctcccagcgtggaacaggccaggtcgcgcgcggtgttgccatggggacgagcggctccggctgaaggtttccgtgcttggaaaccgcgcctccgcggaggtagccgttccctgacctagccatggcacagaacactgaaaaccacgaccctgtcggatccatcttaatccaggtgggaaacgggcttcccccggccctgccctgcccagccgcgccacttccgagcgaggtcccgcgcgccgattcaccgacgctcacccatttggtgcgccgcccctagactccctccaactcgcgagaggctcccaaaaatgcccacccagaccttcccccacggcccagcacactcccggtgacttaccctgtaggttacgccccagaagcaggactttctgcctctgggaaaactctaaaaccgttcacccggaacctttacttcagaaaaattaacctcacgctgaggcatcatttttaaatgttatattctgaaaaatttgaacccatgacgtcgggagtggaggagagacaaatcggacactctaggaggtgataagaaatttggagacaaattgaaatatgtgaattgcttttcttaaacaccccagttttttagatctaaatgttcctcattggagaacacacagaaaaatcaagataacttggaatgaaaaaatgtgacatttaaaaacttagtgaaagacctttttaatttgagaggggaaatgtcaagaaagtcttgtccaatacagctcaatttgtaatagttgcactcagatgtttctgaaatgatcatggcattttgttttcacatttatgt

SEQ ID NO: 62047 - DNA, 1455 bp, Homo sapiens
aagccaccacaccgggccaaattctgtattctttaacattaactcctcacagtacaatgtaattcattcttatggagattcccccagtttaaatgtgctggacttttgtaccttgctttcttaggtttatggactgcagacagacttgtgatttttgaaacttttcaccacagaaaggagacagctggcactgtctttttctggcttaccttatgtggaaagtggtcatgtttacagctgctctcataagaaaagaaagaaagagaaattgaagagcggaacaagagaaattaatcctactgcctctccatagtagactgctacctgctcttcccagacttttatctttcaatattgaaatcatcaagaggtttcactgtaatatcagcactggtgggctgtgtccccttaagagatttccaagctatttatgtagcagcatgtcatgtgacaccccagttgccatggcaaatatttgtgtttcatgaaaaatgtgggtaaagaaaatcaatgtaaatggccaaatcccaagacagacaggccttcaggcgagtgtttggcctgcaccattattgtttcaaattcagctgtttaacaggctgtgagaaggccatgggctaatatgcataataggaacaggcggaggcacctgttttgattctcaccctgttggagcgctcaggtcccacagttttatagataacagatctacaggtaatacaaatattatgactaggttttagccagtaaatggtttaccacgaaaaaaatagttttaaataatgacatattttctgaatgctaatgagccctggctttaattttctctgttgacttcacaaagctctccccaactgctggaaacagtaatatttaatgactttttcctgtggtcccagattggtacagcatttctaaattgactcttcaatggtaaatgtaatttttcacatattttgtgggaagtgtcctgggcatggaagttaaaaggctaagagaaggacttcagtatgccaagcctcgtgatagagccagtacagacctttgatcagacaccaccacaaagcagtgtggtgccacgctagtgtcccctagaagtgggacttggcatctgattatagttgtttttgtaaatatttacttaatcaaactctttcttcaaagcaaacggggcttggcaaacagagcatcgttgtcagtgtgggaaaggtctttctaattattagctcctgcctgcgtggaaagagagaacaggctggcccagcgggtaaaatggggaagggggtgaggctctgagccttctatttgttttgtaaaattgcccatgagagtcgttttgatttaaactgtgtctcattcttcattgtaggggaaaagcagaaggtcaagaggacatcatgataggaaggtctgtaatttgtgtgactagttgaaatttagggtctgtcacctgat

SEQ ID NO: 62048 - DNA, 2400 bp, Homo sapiens
tccagcctgggcaacagagtgagactccgtctcaaaaaaacaaaacaaaacaaaacaaaaaactggggaatataaaatttcgccatactatcctacatcccccttgagtttttagcaacgatagtaattgttatatgatgcttaacgcgtaattactgtacctcatttacataaggtggtttcagacacatcatcttgtttatgtatggcctctccaaacaaaatgagtttaggacaaaagaggaaatccttttctaaaagcagttttgtccgtaagttactgcctcaagaggccgcaaagtttgagcaaagcttttccgaaagtaatggattggtaatgggtgactgaggtccacaaagctcgataagaggctcctggtccgtctaccaggttcttagagggaggtgcctttgtgtgttcggacgctgcactgagacacgtgaggtttttaaataaacttttgattttgaaatctctgggactaattttaaacagtgaacccgacagcgaggacctacacacaaaagtgctcccggccttaccaaacaacgcagacccggggtcacgcctcgtcctgtttcaacaacaacacccaagggcttccctggagcccagggcgtgggagggagacttgggtttgagttctgcaccttgcggaggtggttagttatttaattgtcttccacctgaattttcctcaggcccaaattgatgagacctccccgaatccctcccctgcccgagttactaatgacggcgtgaggtcacacctggccactcaaaaccagctccttgacgcaggtgaccctccgcctcgcgcagctcacgcttcccatcccccggactccacccccagcgggaggccacggggccgctgtgcgcacgcgccgccgcacaccgggggctctcgggcacccgcgcggcgccggttggccttcccggcgctcgcccgggggcgcgcttgcgcgccagcggctgcggacaccagcctgcgtccccggcgcggcgggccatggaggccctgaggagggcccacgaggtcgcgctccgcctgctgctgtgtaggccgtgggcctcgcgcgccgccgcccgccccaagcccagcgcctcggaggtgctgacgcggcatctgctgcagcggcgcctgccgcactggacctccttctgcgtgccctacagcgccgtccgcaacgaccagttcggcctctcgcacttcaactggccggtgcagggcgccaactaccacgtcctgcgcaccggctgcttccccttcatcaagtaccactgctccaaggctccctggcaggacctggcccggcagaaccgcttcttcacggcgctcaaggtcgtcaacctcggtgagtggcgactgccgcgcccacgcggtgaagcccgcccggccgggacggcccctcagccaccgagcacgtgacgaacgctcgcaggccggtagagtcccgcgggagtcagctctgcctcccggcgccggcttcgcctggggtcctttgtactcctcgcccagggggtccccagcttgctgagctcctggcacccgaagccgttcgcctgctgcgggcgcgtcctcgggcctagggaggggcgggtcgccctcctgtcctgcccatgttaaccagagtagacccctggcctgggcagtaagccagggggcgtcaggaaacgccccctagaaagtggctctgaagttgacatccgtcctactgcatggcaggactcattcccgtgaacatcactttgcagctgcgtttatgttgcaataactggaactactcttttaagtttcttttgttttctttgtatgaattcccggcaagttcgttttactaaaagcaccaaaggttttcaccagacataacagcttcctgaggtgctaggcctaaaagatttttaaagatctttaatatttgtatattttcatggagacgccctgaggatgtttactgtcactaggtgtttattttcttttggtttaatgacagaagagggaggtacgaacatggacatgggtgtatcttttataggtcaggggaaaacagaaggcctcaagatgttttgaacttactaatagctggcataaaatcaatctagatttcagtgattcaaaatctagccatggagctgaatgaaccatgttacccagccaggtttttaaagccaggattaaaactaaaccctgcgcagccgtactactaatactattacataatctgatcgtccattaaggttaaaaatagtctgtgtatttgtgcttataataacacatatgtcagtcgtgggctttttgagccgttactccactggactgtcctgtaaggagataattgtttagcaacgtgttatcctttaaaaatgcctcttattatttggctgatggactgtat

SEQ ID NO: 62049 - DNA, 2382 bp, Homo sapiens
aagataaccaaggttggccgggcgcggtggctcacacctgtaatccccccagcactttgggaggctgaggtgggcggatcacgaggtcaggagtttgagaccagcctggccaacatagtgaaacccagtctctactgaaaatacaaaaatgagcgggcacggatggcgcacgcctgtagtcccagttactcggcaggggttgggggctggtgggggtggtagtgctgaggcaggagaatcgcttgaatccgggaggctgaggttgtggtgagtagaggtcgcgccgttgcactccagcctgggcgacggagcgagactccgtctcaaaaaaaaaaaaaaaaaagataaccaaggtttattgctacttccgtgatatcaccatatcaccaactgcgtaagcagtgctatttagttgaaaatacatggactagaccgaatatttctgcaacagtttaataagagacgatgatgcgactactgcagctgtccccaggcaattaaactcttcggcgaatttctttactattgcttttgaacagggaactgtttgctattttagggcactcgtgcggtaaagaacttcactgaaaaatgcaaatatgttttgctaatgtgggagaaagatgatgatcctctgaacctgtgacttggaaggggggataaaaaagaactatttcttgaattcttgccttgctcttgctgattcgatgcacacaaccccacgaacattcagattcatggcttgacaaagtggggataaccgggagctgcagccccgtctttgaagcttttgtaaagacaaacggtctgcaatgttaagccttaaattggcttttggcggactccagccttttacccttcgtttggtagatgttttcacctcgctgtcattaagcagggtcaggaaatggaagggccgtgaccgggtcgccgcgggcgctctgtgggcgatgagggtctcctgagcgagcaagaccagtctctccccgactcgccacgcgccacgcgccgcgcgccgcgcgccggttcctcggcttcccacgccgggggcgcatcctcccgggagctgctgcccttttccaacatggcgccgcgggaggcgggtcccgctcgtcggctcccggggttccggcgccgcgcgttttggttccggagtaacagtgtcgccgccgccttcctcctcctcctctcgccgctaccgccgtcgccgccgccgcagccgccgccagtccgcgcggcctcgggtggccggagctcagcctgcgcgcgccgcgccctgtgtctccgggtggggcagaagactcgccccttgaacctcccgcggggactctccgtggtgtggcggccctggggctctttcttaatagccccggactgagtcccctccagtcgaggaccctctcctagtccactgacgagcggtggacacctgccgctgtatctcccccaaaccgagtccttgccctgctgcctcctcatacccacacggcggcagagaccttcaccatagcgttcgctcaactccagaaccttccgacctccgctagttcctgcgggcctttgcccgcttcccggtgcaccctccccgggagacacctcagacccccgacagcctgggcaggctcggtgcctgcgggtgcgttcctgatcacccctcccctcttccctccccctcatcctccattcccttgttttcaccctctgtcctctgcccgtcactccccttgtcacctcttggagccccctcctaaccagcggccagtgggtttcccataccccaggatgtgagcctctttaacctgtaatgctgtggctagcccttggcccctttcctgccatggagaaccaggtgctggtaattcgcatcaagatcccaaatagtggcgcggtggactggacagtgcactccgggccgcagttactcttcagggatgtgctggtgagtggtaatctcagtgtccggatgccagcaagggggactcagggacttgagtagtcagcaccttgaccactggtgacctgagccagtggcaatggctactgctggcttcctgtggaggcagttttattgcttcaggcacagcattgataaattgcaaccactaaaacctggcaaatgtctaggaccctggggagatagatcaatctgactgaacccctgccctcagagagctcatggcccgggctgggacacacatatagacacaaccacgcaaatgcaaactgctgaatctagaagagaggttttttccccccaagtgtttcggggaatgtccttggacagattccagccttgtttttctactgagttctctgaacttggtgaccagctgagaaagggaaaaaggacaactttaacttaccatgtttgagcacactgtt

SEQ ID NO: 62050 - DNA, 797 bp, Homo sapiens
tggtacatttaaatatttataaattgatataagtttaatgatgatactgaactgagtaatattttcttatttaatcatatcttgggtgagcatatttctacaatatagctttaattaccagcatgacctttatctgctcttgctcctgattgtgataatattgcaggacaaaatgaaacgtgtaaactacctgtaggccagtgattattgattaagagattttaatccattgctgctttaaaacatagcaacaaagtagagcttttaccatgagcattacatggaataattctgttttagtggggcttagcagggatgctagatggtgacaggaacacttcaggtctttagtccttcctttttccccacagttggcctggggacagggccagggtgacctggggactagaaaactgttttgtcatgaaccaggtcattgcagaggacatcatggaatgagtcatgctacgatgagatagtcagtagcataagggcccggatgctgagagggatgaagtaagaactgtagttttttttttttaagatgagggctacttttttcttttctttttcttttttcttttttttttttgccgcagactctcactgtgttgcccaggctggagggcagtggtgcgatcttagctcactgcaacctctgcctcctgggttcaagcagttctcatgcctcagcctcctgagtagttgagattacaggtgtgcaccaccatgcccaagtaatctttgtatttttagtagagacagggttttgccatgttggccaggctggtcttgaa

SEQ ID NO: 62051 - DNA, 572 bp, Homo sapiens
gtcccctatgctcggctgttacctggaaaggatcatttcacttccactgaagagaaaaggaatgagtcctgaatggaatgctgcccggcagctcccagcgcccgctggtagagtacccgccgctgtccctgggtggctccggggcttcgagcctaacagtcctcctgcggcgcgcctggaggctgggagctgtgcggccgctcccggcagatcgactgaggtcccagtggccgcagggcccacgtgcatgctgaagcactagcaaagcagttgcaccatttttctgttggaaagatatttcagaaaacattgcctaagtcatcgcaggaaatctgaacgtggttggactttgtttcctctttgtcttaccactcgggactgtgtttttgtaactcaattacctgagacctgggtcccgatcttttcagggtctgtgcctctgtaagtcttatcaggctttacctctcagtgattggtgtaaaatgatgacagtaaaacagtaaaacccacagggtggggctgtcaggaattttttaaacattattttatttttctgccccctcccccttttc

SEQ ID NO: 62052 - DNA, 1492 bp, Homo sapiens
tcattaagtggtggctttttttttttttttgattcaaaggattctgtcactcttattgcaagttcctcatacgtttatcgttgcactagttcctgttatgtttcggagctgaaatggatcaactttggcaagacgaaatttccttaagtgtaaggtactgcaatactcaggattgtgcagagggaagcagaggcaagatgggaaagatcgcaaactagggcccgagggccagaggcaaaatgcaccgcagagatgaatctgcctaggccccacctccttctattccgtctcctaggactactacattttatttgtgttaaaagatatcacctgtagatgaaaggtgttttcagtggtaaaccgtgcaccggcgtataaacgtggtgtaaaaaaaaaaccaaacagaaaaacaacctgatgtaaaaacagaaaaacaacctgatgtaaaaatatggaacgcttcacgaatttgcgtgtcatccttgcgcaggggccatgctaatcttctctgtatcgttccaattttagtatatgtgctgccgaagcgagcacggtgtttcgtcctttccacaagatatataaagccaagaaatcgaaatactttcaagttacggtaagcatatgatagtccattttaaaacataattttaaaactgcaaactacccaagaaattattactttctacgtcacgtattttgtactaatatctttgtgtttacagtcaaattaattctaattatctctctaacagccttgtatcgtatatgcaaatatgaaggaatcatgggaaataggccctcttcctgcccgaccttggcgcgcgctcggcgcgcggtcacgctccgtcacgtggtgcgttttgcctgcgcgtctttccactggggccggggcggcgcggagggttcagacgcgggctcttactcaaacgctgatccccgaaactaccgagcagtgtctgcgcgacgcgaaagcatttttggagcgaggggccatggtgcccatgggattcccacgggtgttggactcgggaccccgaaaaggttgcgagtcgctggttggacccttccctgcgcggggacccgagagacgtgaccctagcgaggcctggggccacccactgtgggctggaaggggccgacaggggttgcggcgggggatcgtggggagggttggccagggcgcgccttcagcttcccctcggcttctcggaactagctctctgcattcggagccaaggcgatgagggtgtctgctttgggacgcaaacttccagtagtggtggaagtctgggaagggtcaccaccgtttgagccaacatttagaaagagccaggcgcttaacctaaatggtatcatttcccccattttgcagtttagcaaacaggctctgggaggttaaaccatctgctccagtgatcctgccactggttaaagtagttgggatttggatgcgagtctggtttcaaagactttttttttttttttttttttt

SEQ ID NO: 62053 - DNA, 1420 bp, Homo sapiens
cttgggcaagttgtttaaccttcctgagctcctgcgtccctatctttaaagtgaaaataataatagcacgttttactacttggaaggaggctggaccaggttttctacagccagaccatctacgctttccaaagggcctgggcagcaagtgagtattagtctactaagagtgtaattatgttatattaacagcacctacctccaaaggttgctgcgagcagagagcacctcacagtgctttacagcagtgcccggctataaccatcacagcattattattaatgtgattagcctcattttgcagatgaggaaatataggcccagagaggttaagataccccacgcagggacctgcagctagtcggtggcagggatggcgctggaatccaggggttccctccagaaccccacagcggcccatgctgaaaaccagacaacgcccgcccccgccagaaggcaccctgggaacggaaagctggcagccttccaagtcccaggacgcgctggggcccagcccccgctccgccctcccccatccctggaacaaagtacacttctgccgcaggaacattccagcaaactgaaggcatcgcgggcgcggccgccgcccccgcctccccacagctgcacggagcgtccacggccccaggccgagccccactgtgccccgcttccgaccccgcccgccctgccggctccccgtcgcccgccgcgtgtgcagacgcaatcgcaccggaggaattctctggtctctttgctaacctcgggacccgcagttgcaaaggctgagggacggggtgggcggagcagacgctgaggactgcggtgcccttaggggcacggagtcgcttggcagcaaccgctcctgggcccgctggtccccggtcctgggcagcccccactgccccactttactcctttacaggataaaggcatgctgttgttaataacaagtagaactaggagaaagatctctattaatcccaccaggctgagacaactgctattaattctggttatgtccttcctgactttttgtgtacacaaaaaacacagatgtacattaacacgaaatatcctgcgatgatactgtttgtttctaaattaacgaactttagttgttagagcagttttcagttaacagaaatttgggaagctagtgcagcgttcccatataacctcccaccgctccctcagtttcccctgttattaatatcttgcatttgtcacaattgataaaccagtattgatatattagtattcactacatttcatggcttatattaaggctcactctttgtggcgtgaagttctttgcgttttgacaaatgcataatgtcgcatatccaccattacagtatcatacagaacaattggcccaaaaaatcccctgtgatccccttgttcacctctcaccctc

SEQ ID NO: 62054 - DNA, 1412 bp, Homo sapiens
tctgccgcctctgctctccaagcaccccttccttcctatctcctctccctctctttcttttcctttttccatcttccactcttatccctccttattcttttcctcctcctcccttttggagtgaggtgacatgtgggctatgtaggttagcatatcacgctccgcatctggcccctggctgcccttgtccctgggtggtcaagaacagagtattccttctttctgagctgctcagtgttctggctgcttttcagaatgtgcagcccatcccccagcctctcagaagccccaccccagccagcagcctgacagagctcacaattctgttttaagcttactcccttacaactagttttatttcctagtctgacatcttgggaggatgggtgagaccaaatctgttacatcagtgtctagatggagcattcgctagttcaggccaagacattatgagtttcatttttatggctctcccaatccttgtgtgtgcagattttattgtgttaggagttaaaaatgtaataagcaaggagaaaaaaaaaattaagtcacttcagctaaagactacagcctaacaaaatccttaacagacgcttgttagtcctgttgctgggaagtatttgtccagcagacctggaacagtttaaaaaaggagtgggggtttggttaacattaaagaaacacaaagatttttcatctggctctgggggagaccagagccacagagggaacaagaaaagaaagaggggattgaacatttttgcaaacaaatgataaaactgccttttaaagaaggaggggggatcccttgtccaaacaagacttctgccagggtaggaaatcatttctgcaattgtttacaatgctcaggcagccggtcctaagtcaacatggcctgggagcgttgccctggagcctcctgcctttgccagccgcctgccatctcgagctcagctatttctgggacttagctccctcccttgaaaaacaaaccgtggccctcactgtcatacccaataaaccccccagtttgtgcagccttaatcatgttttccagaagagttctccaactgacggcctggatgcaatgtgttgggctcaggagagccagtatgtgtgggggaagggaagctctcatttgtggatgccaagatggaaatttccattgcagtacaagatggcttcacctgtggccaaggaaacctacttcatctcaaagaggagaacttggctaatgaacagcctgaaatttatgtcctttcttacagtttgttccataaacccagagcaaagtttgcttttactaaaaagcaccataattactagtcataacccttcacatctggttgtcacttagtgtagaagtcttttcacttctgttatctcatttgttctccaccatgagaaaggca

SEQ ID NO: 62055 - DNA, 914 bp, Homo sapiens
tgaagagccacttctcaaaagaagacatacaaaatgccctctgtctcaaaaaaaaaaaaaaaagttacttaaagtctgtgtctagtaagtctaacgtctgtgctgcctcagcgatggtttctgtcaatttatttttcccactgctttcctatttctttgtatgctttgtgggtttttgttgttgttgaaaactggacatttgactattataatgtgttatctctggaaaacaaatatttacattccctagagtttgctgttcttgattgttgatggcttaacttttgtacagccagggtttttaccgaaatttccctgaacatggggaacttaaaaaacaaacaaaaaactttttccaatctttgcatctgagtttttgcaggagcacccctttaacacttaataaggccatttgaaattcttcctcagcagtcatttcctggttgcactgagtctatatatcaaccagtggtggaatcttaggctgttctcagttctctgaacatgcatcctgtcccagacatgtgtgttgctttctaagttgccctatatacagagcacttttgaatttgaatgccctaatttcccaacaattctctctccctggcttttactcccaggctttaggaaagttattctatgtaccaactgtactcttcggccccaggcagttgcagtttgtttgtttgccttacaatgtttaaacaacgcctgctgcttttctacagtgggttacagtgtgaaaacagaaatgagcactttgtttcagtttttcaggtaacacccaggcaggttagaatagacatacctaataattgtgtataaagttggctctgctctctataaacaaggaccggagtcccaccctgggaaggtgggctgctgtcgctaagactgctattgagtcagggaag

SEQ ID NO: 62056 - DNA, 2005 bp, Homo sapiens
gggggacagcattgtttctgtgaccgtaggcgtcgaagctatgcagaagcgttccgcggaccgcagagagatggggctcaggccagcatccctctcgctccggcccttcccgggaggagctggccgagctaggatggggggcagggagaccgagggggcagtaactgtcaaacctcgccgcttggcgccattatttaaatggaacgtgcctgtctcgcagctgtacgtgcccggggcggggcttcgagcgccctgagcggggcggaggctagaggcgggctgggaaggtggaggggcgggccggggcggggccaggccggctagaggggcgggtctagcggcggcccccggcgaagttcactgcgcttgcgctgacagacgcaagatggcggacagtgcggaactaaaggtaaagcgcagctcgaattcacttctaatattcggccgcggagacggcgccgctgctgccaggggggatgggtccgaccctggggggcctctcgggcctgactccacccgggcctggagttgtagggagagaggcgcgcccggtctcagcagagggggcccgcctgcggcgggccgcgggccccgggtgcctcgggggcgctgacgggtcgtccccggcgtgttattgttgtgggcgcctctggcgggggtggcgggggaagagatagggagtccggaggtaggggctgcagctgtctcatgggctcggctttttcaccttccagttagcctccctgccccccatggggagctggggctgggggcagggtgctctcgtaggggggattgggaaagctccccgtggccgcttcctcttcctcctttgcagtcccgggctcctgtcaggcgctcttctcagacccccgggaacttggcttcggccgccccgcccctccgtggatcccagtagcccccgccccggactcggctttccccggctgctcgcttgtcaggaagcgcctggggtgccccgcttgtgggaagcgcgatcccggggcgatagggtggggatctgggggagaagctctggtaaagtttagcgagccccgggccggcgttggggttcggctgagaggtagtgagcgggacgttactctttctctctgattccgggcagccgaggggagaaaccccctcgaagagtgtgtctttggaagcagtgttgggagggggggatgcagctacctctctcccttcttttgccttagctggtgtggagggtgagaggagcctttgggggtctctgcacacaccatgatggcgatgctgtagctgatggaggtgaatggttcgtgtttatatccccccattgccttttgtttgtagggacatcttgctggccatgttgatttgaacgaaattctcccctcatgctactccaacccccgataaatagaacgttcctcttaacagtaccaattactcacgcctcacgaaattagatgaaagggtgcccccttttccccgcttttctcccaccccaatctttacctgatgatggcttctttaccgtagcagatataccactacacaagcagttgggggagggggtggtggaacccttatgactggattgtgacaaatggggctccgcttgaataattttggtttagtagcaggcagttcttaactaacgcgtattatttcgaggctctgaacgcgatcttctctgtggcttcctgtgtgtgtgaacccagcagctggttatgtctcgacccagagaactgacatctctgtcagagaggagatggggatatacaattgtaaatctttggggagagtcttctttttataataaataaaaattatttaattttttccccgttataatgaaacgacaacttctagaacaaccaaatgccagatttgattctgtagagtttttcctgtggaatatcctcaccgaaagagcttttctcctaataacttcacaatgtttacactccaagattcgtatgttaaggtattggctttgagtgtcattcttttaaaatgt

SEQ ID NO: 62057 - DNA, 683 bp, Homo sapiens
acaaaagaaacacaaacaaaaaaactttagaaaataacctttgcttctagaccttctaaatttttctgaatggagagttttgtggtttccaaaagtgaaatagtagaagcaggaagaaaatattctcttacctaggtgcaaaactggcccaggccaaattctaatagacacttgcctttggcagtctcccagttgtctctcttcatgtttcccccacctttgtctgccccctccttagttgtgtgttgagctcctcactgtgccattttcctcaggtctgtagacatgcctcttcttataccccacaaaatcccctccagtttcctcctaatattatctataaagcagaagaaaatagcctgatctgtagagtgaagggggattaggctctaacgtcagtgtattagccctactgctgaaaattcctgaaattcttaatcgattacaatagtgttccatacttaaatacagcacagcaagcttttctccagcattgtgttggatcgctgtttctttggttgaacacagatgatgttgggttatatttaggggccacatagtttgaaaataattcatgagtgtttaaaagactagcatattcagcatggtaagatgcactcgtgaggagatgggaccctttgtacttcctagagtacaaagaaacactgacctagagaaccata

SEQ ID NO: 62058 - DNA, 743 bp, Homo sapiens
gccaccttccttcccaccaagaaaacatgagcagagcaaattgcctaatgagacccatattttgctgagttgctaatcaaagaacaaacccaacctaccattaatttggtcttgggaaagaaacttggcctgcagcagagaaaggaaaacagtcaggggagggctccacctgaggttcacgcccccagccctggccaggccgacacagaccctcacactcaccattctggggcctcggctgctacccgtgggcttgctgctcccagaaccgcgttcagttccctttcctccagcctcaagtctaaagtctgccaagctgggtggaggcccgggtaataaatgctcggctgccatggagactgggcccgacgccaccagggtcagattccagcttcctgagcacagctcatgacccgccacctgggcaggttggatttttgaggaaatggggctgcagaaggctctccctgggctcagagtctctgcctccagaagccgaagcaaagggacaaatgccagtgtttcttcccgggagccctggactccaggaaggggtcttctctctctctcctgggactcggcggggatgccatcaggcccctactagagttggacactttacaccccgggtcgtattgaaggctcctcacacaccatcttgtaggaggaagggaacccttccaagacggcctaactcagagatgggcaccggggctcgcaggcttggggctcggtattgcagg

SEQ ID NO: 62059 - DNA, 1901 bp, Homo sapiens
ccaagatgaccgctcactcccacttgggctctgtctctcctgatccctacaggaccgtaagcctctcccaccttcaccctgcctacccccttactgcctggcacagcgctgggcataccacaggcgcttaaagaatgcctgctgaatgcagtgaatgtttctggtcagtaaaacgggacgaaggtagaatggagctctgctcgcccaacgagataaaccaaaaactgagaagggctcctcattcattctctggacggcagcttccgcccttccccgctgtctcttccattacattcgcacattcttgggtgccccaggtcaagcagacagcctcctgataaatgacagaatcaagtcctactcagggctggagggaccccgagaacgcggaggtggcgcccggaacttgcggataagttgggggtccgagtgacgaggtgtgtgtacccaccgccctggggagctctcccagcgcagcggctgtcccggcgccagcccgggtcgctggaacgcgggaagggaggaaaaccccaaacttcgggcgggcgctcctcccacccgagcaacggcgaagcggggaggccgagccccgctgggccccaggctccccagacagagaaggaaacgcgggggcaccgccgccacggtagcgcgcctccaagccccccgcgctccgctccgccccggccagcgccgcacacgaggttcccgcccggcagccctaggagcgtcacgtggcgggtcccgaggccccagcgcacaggcgcctagcccgccctctcaccccggcgcgcgcccacctggcctgcaggaaggaggcgcccagctgcgcgcctgggccgcccgtcgctcccaggtgctgccgcctccgcgtcgcctccatggctgccccgcaggcccctcggccctgcctttccgaggaagagaccggttcagctcggctgccccggcggaggccgccgcaaattcccagcgcggggcggttcggggcgggccggcgagagcgcgcggccctcgggaggaacaggcggggctgcggacccggggcggggcggagcggagcggagcggagcggagggaggcggggcggagggagacggggcgggctccgctaggggagggccgggcgctgcgagtgtggcgtcctcgcggggcgggggctgctggcctgtccgggctgcgcgcgtgaccaccagcgggctgggatgtgttagggtcccttgcctgcctgggtacgggaatctctgtctagggtgactgaggcctgggtgttgggctggggcggggtagcgacctggagatagactaagctgatttaaatgctccccggggcagagggttctgtgggatttcccttgttcttacgggtggaggagaggaggcaggactggagacctgcacgtgtagcacccgcgtggtgcagcacgtgggttgcagatgttctagtgaggggctggcggtgacagtgggaaggagcgagttggtgacatctagagtcgtgtgagaggtatggtgactgggactctggatgtggggggtgaggggagaagagttcaggcagtggccggattctgcccctgggtggatagtggaggcaccccccgggaagtgggctagagcagatttcgtgtaaataaagattcatctttgaacgcattaagcttgaggtgggtcaggaaggctgttggaccggtggtctgaagctgaggcgagacctgggaacccagtggacaggctcgtgagtcaccggagcatacaagacagacagaacctaaggggacagcatcctcaagtgaaaaacagaaccaaaggtcaaacctgagaacagcctgcagggcagattgccaggacttcattagtggtaccactttgaactagctgtgatgcgggcaaatggctca

SEQ ID NO: 62060 - DNA, 1746 bp, Homo sapiens
ctcagcctcccaaatagctaagattacagccacgcgccaccatgcccagctaatttttttgtatttttagtagaggcggggtttcactatgttggccaggctggttgagaactcctgacctcaagtgatccgcctgcctctgcctcccaaagtgctaggattacaggtgtgagccaccatgcccggccatttttcccttttttaaatgtggttactagaaaatgtaaaattacatatgtggctcgcactgtatttctgttgggcagcactgctctagccgttattaccaatacaatacttgtgttatagcactcctgtatcacagtatttgttattacaatactctctttgggatccccacacacgtggctggcttcaggggtgtgggcagtgcagtcgcacagggccccacgttcagaagggcttcgcccttggtttaatgcgctgctctcattgccttgaaacttactttttacctttgaatttgagttttctcagcgaagtctcacaggacaatggcgcctgcgccagtggcttgaaggctcggctcaagcccgcctcgcctccctccctcctagggatggctcccagtgtctctggccggggcctgcctctcgctcgccgctccttcccggcaacggctgccattttccgcccaggcaaggtcctgggcgcggctctggggagggtcagggtgcgcgtcccaccgcgtcgtggggcagggtgtagtgatggtcacgcatcccttccctgggcttctccggcacacctgtatctagggactgagcgcgactgacgcagaggtcgcaataccgctgggggctgcctggtgccatgcggttgggccgcgggcccaagggaaagagagacacctggcctgacttctgcaggcctctccccgccagcgagcgcacggcagcggtgcccaggggctggaggcagcggaacgcacgcgcccggcgtcgctgagggcttgcgccagccccagagtacccgcgtgcccgagggagcgcgcccgcctctggctccgagcttgggggaggggcggcgtgagggagggaggatcttgttttcctgcttgcaagcttcctgagtctttgttgcgctgtttgtctcttctggctagtcagagcaccctctggggacaagccgtaacatacgaattgtgtaactcggtgattccacattgcacaatatgaacataaatggtaaaattcgtgctaataatttaaaattgtattttttctttatttagaaattttcataagtagcatataaaaagcacaaaaagtccagagagagaaggctagaagcaaggtaaaagcttttacttgccttttgaataaggcatcctcattttgcaccgggtccacaaattatgtagccagtcctgcttccataatctaaatttcaagcattccaggctctgaccactacttttgggttgtccagcaccacaagtccagcaatcttttgattccaataggacctacaattaatagatcttaccaccttttctctggccttcatctcatatatatatatgatatatatgagatatatatatgatatatatgagatatatatatgaggagatatatatgagatatatatgagatatatatgagatatgatatatatatgagatatatatgatagatatgagatatatatgatagatatatgagatatatgatagatatatgagatatatatgatatatgagatatatatatgatagatata

SEQ ID NO: 62061 - DNA, 8566 bp, Homo sapiens
aacctcttcagagctctccttgtctggaaggcccctgacactaactccaggaggccagggcttggatctcagttgtacgaactggagctggctacttaatctttttgtgcccagttttcttcgtctgtaacatgagaccttgttacctaactcactggctcacaagctcaaaacagagtgagaacattcgaacacattgccgggggagtgtaaactggatgtattttctggaaagtaatttggctagatatattcagaaatattcaaatcctgtgagctagtaattccattactagaaatttattattggcacataatcagatatacagacaaaaatacaagtaaagaggtgttcgtggcactgttattttaatagtaatattttcgtaaacatcttgaaagtccaacaatcagggcatggccaccgaaattataacacatctattctgataaatgcagccattatgaattgctgtagcagaatatttggtaacattgaaaaatgccaatgactttatgttaaatgaaaagaaaaaaagatatggaactctttgtgtggtatggctccaattttgtttcatgaactatatatgtctgtggactcagaaaacagactagtgggaaatttactgaaaatcttattgctggtggtataattctgtatatatttaaaattgacatttgaaaagttgtcccagcattcctcataagcatgtgttgctttgttaataagagaatcaaatatttaaaaagtaacccaaattaaaattatttgtgggaaacctctttgaaaatcattgtgctacacgtgagatgtaagtgcgtttctggggctttagaagcacagacggattcctgtttaaatcaatacatttgactgcaaggaagataaatgggtgagtgggtggccatgctgggcacggctcctaagtcaggcgctctgcctgcctgctccgcccctgcagcccagcagcgagagtcctgccagccctaaccccgtttgtttttcttctccccctggatccaccacccacctctccttcctccggtaggtatgaacatgaacgagtctgtctggtcttgtctgctaagtgaatcatgcctcagaaatgggaaatggcctcaaggccagggcctgtctccatggaagagctgggactagcctcaaatgtgacatcagcgtgagtgctgagggtttcgctgcagcttccaggctagatggcaggtgtgggtgttgccatgtttctgggcttctgggccaggtcctgatggaatgctaaagtgatacgaccagacacaggtgagaagaaggctgcttctcctgtggtatgatttgagggcatccttaggtctctctggtgctgactcaccctcctcccatcctgaaatcaccattataaaaactcctttgccagggaagacaactgaaaggagtggacaaggaggctcctgctgaaatgcatgggatcacacagggcagcaatatctcctaatattagcactgaggctctggaatcagtcaagcttaggtttggatcccaactccactactgcttggggatgtcccttggtgccgctgacatctgtaaatgatgacaaaaagcacttacatataccaagcagatgccaggcacaattctaagtgcccttctattaactcacaacaaccttattaggaagttactcataatcacatccatattacagaggaggaaattgaggcatggggtggtgaattaacttgctcaaggtctcacaggatcagcactaggatgagtccacacccagtgtggctcctatgcttttaatgaccatgtttgggaatcttattagtatcagatgggataataatagaaaccatgacttattaggggcttactcagtgccaggcactggactaaatgctatataggaatttcctcatttgttcatcccagtgcgtggatgaggcaaggactattgttaggtgctaacatcaccctggcaggacagccaactgtatacaaggccctatgttaagggctgggccttcaggagattgctatggcataaagagttaaaatgtgtccataataactgtgattcatggtagaatcataggttgatggagctggaagaaagcttaaaggtcatctggttcagatgcatttttactgatgacaagaaccagagtgtgtgtgggagggtggtgggaaggtttaatcccacaggagttttgggagaagatttagtgagatgataacagcagccagcacttactgagtttgggtgctgtgtatgcttgtatgcttatctcattcaaccctccaaccagataagggtgacattattattatcccagtttcacagatagggaaaccgagatgttgagaagttgagcaagtaccttgcccagcggcacacagctagcaagtggtgaagttaggatgctgcaggctggattccagagctcaggtgctgaattaccatgctgaatgccatcccagtgatagaaggaggttaaaaggcctgggaagaagctggactaggtggatgggaaaggcctttggagactatgaaatcttgtacagacacgagtaatttttggaaagaggcaaaggtcccaagagaggtataaagtggtatagacctcaggggcaaaatcaaggaagatgtccaggatgagatggcatttgctctggatgtggatctgtgctcctggggtaggagtgagggctgtccagactatgtgtgggatggtggtggggtttcctccagcccttccccattggcatgggatggctcagtaagttaattggccccttagcccaagtgaagtgaccaggaccacagaaagctttgggcacctaaagctggggtcctgactgcaaagaacatgatgggtggggagaactgagagggcacagaaggttggtagcaggtggggtggaggtggccagacagcctgagttcaaatcctgatgttctcccacactccagttatgaggccacagacaagctactccacagctctctgccttagtttcttcatctgaagaatgggaatgataataatggcatgtacttcagaagcttgtgtaaatataacatgctcatctgtgtgaaatgttcactgtgatgcctggcacacatatttctgtcattataagcccaggataccgattggtaccactatccagagaagaatggggttagaacaaagcagacacacgtctatttcaacctactttcctggtaaacctaaatctggcagagatgaatggcttcgcaaaataacacagactagccaccccctctcctccagccttggttttgtttttgccaatcattagatttgcttttcagggaaaggcaaggagagtgggaggcagaggaggcagaggccagtgggctgccagttttgtgaaaccgggctgatagactgtcactggtttctgagttatcactcttatttctgacatcatccttgtgcagctctgttggaatttctgaactcttgtgaattagcctccccagccccttgtataccatgggtttactctccattcttagaggcgggcacattcttgcagagaaaatgcagatggggacaaagtcctttcttgagcaggttaatggcaaaatagaaggattttgccaggtgggcaaaatagaagagttttgtaacgtgggcaaaatagaaggattttgtcaggtgggcaggaggggaataagaggaaagagaaactagtatgtactgaggcaccccttcataggaccaggcttggtgaagaagctggcatgttcccatcacaccagccctgcaaggaaaagatttgactccattgtacagatgtagaaactggcccagagccacagcttgtccatagatatggaaatcccacccagatctattcaacactaagggtcaccctcttcctctatagtacgtgcaaggggtataagattaaaacaagtgtctttactggtgcttgaaaaataacatttttgcatgcactttatctgaggaacttcattgacttacagctgcaggctggattgacctgacttggaaaaagaatgctccatggaaggcatggcaaattctgctcataggccactataatgcctaggaagcaaagtgcggggaaaggtcagtcctgccttatttccaggtggaaggctgcagtttgttgtcatcagcaaatcaatctccatcaggatatagctacttgtagttatgttttactattgcacatttgctcagtggctttctgtccagggaggaggaaataggtcagaagcacaaggaactatttctgggccctggcctttgggaaagcagccttgtcctgtttacatatcctctctccagatttgcacaacctgaccacagaaacgtcaccctctaagcccaggtaaacaagcaactaaatagtctccagtcagccaatagctattaagaaaccaagggagcccagaagcctatacgaagcaactttgataaacacagaagaaaacagcagcccaaacctcctgactttgggctgctggagcaaagaggtattcccatcttgggatggaggccacacaatgcaagttctgagcccctctctagcttgacccttggagcagtcaccccttgtagtacccatccagttataccaccaaactgaggtagagagggcacgaggaagaagggagtctcttattcagcaatgagtctggatgaatcaggtctcccttagaaaacaaaactggaagaaggggcctgtgtctggacttttttacatcaccttcttcagaaagttggttcggaatagaatgtagaatgattcaggaacataatagggtaaaaggctatgaggagatggtttttctaaagagccaggcactcctccaggtcagcttgtgcccaggtaatcaaagtgtgttggcagaggagagggagggtggtagggagacggagttagagatatggagagacagagagagatagaaaggcagagaggagacagatggtagatgaggtgcatgcttgccgtatggagccagaaaaggaagtcatcacacatctgaatgtgtgaatccgagaccaaaaagcctgggtccctgtcaaacactgggttttttcatgaccctgaagtccccaaataaaccagccagcttcccccacttctctatcagctatttcagagacgctaccagtagaatcttaccttcagcccttattgccaatgctgtttttgtttatggtaaggagaaaaataactcgtgtttctgtagggatctgcaataagtgggtaaagctgagctgtagaatggagagaatttgagaagtgacccacacctccaccaatagctgcaatggaagtgaggcctttacctcctagaattggaatggtggggttcaaataaaataatgtatgtgaacttgttgagccgagcccagtcccttggagccacataaatgcatttgttctttctctatggtaaattttgtcctttggggaagggaggaagagggaggaagtcactttcatattgagttttttgagactgtcccagaagcttcatcacctaccattcactcctaccatcctaatccaaggcctgtccccctatctactcttgccttccagagtttattctccatacagcagccagagtgatctttttaaaaaacacaaatagcatcttgtcacttccctctttaaaacccttcaaatgcccccatcacagagtagacttaaaccctttgctatgggttattaggccctaacgtgtgttgcatcctctgacttcatctatcattcttactgtggcccactctgctgcagccacactgacctttctgtttccgagctcaccagactgttccctcctcaggacttttatattagctgtcccctttgcctagaataccgtctgttcttgtcacttgtcatagaggtcttgtctgatcacccaaactaaatgagtgcccccatcattctatttcatttgcttcagagcaaatggtaatgataccagttcaactgatcttgtctatcatttgttgacttatttgttccattactgaatccctagtgctaagcagagcctggcacgtagtcgacctctaatattcattggataaacgatcgtttcaaatcctaacaacaatcttgtgatgtctgtgagaaaacggaggttctgccggctcaggatgagattcctgctctgtctgaacgcgggactcgctttccttcccaggatacctcgctccttccaccgcgagcgcagctccccttcgctcccatctttctctcacacttaacccctttctccgggaaagtcaggccgtacttccagtcccttctcagagcctggtgttgtggctctcaagccctcccacatttcgggaactcagaaacgccgcccttttcctgaaatggaccctccgagtacgcgcaaccccttccctaaccccggctcaggggcagaagcaggacccgcaccgtctatagtaaaatagggtggtctccttagcccatcagcttagcgccctcactccgcccccactccctggctggagaccctcagggccgtttaggggccaggaggaggttccaggagtcaaggacattgaggacatccaggcccaaacgggatgggccaactacgcgcagcagaacctttctctaccgggcccgcgtgtgcccgccggtcggcttaggcggagacaccccacttagcgtccctcccgctcccgccctctcctcccggccctgtctgcgaaagctcgtcttcctccccgcccaagttccggcgccgctcttgcgggagcgttccgcatcgccccgggggcccctacgcgaggatctccggggccgttggcagcgcctggcacttctgagctcggcggacgagagcctgcaggtttcctccagtcagggacggcgaagggcggaaagcgcaggaggaggcagtgttaggccttaggccgggtgggccgggtcaggagagacgcgcccatctttcgccatccggggtgcgcgaggtcctctcgggacccggccggcgacccgtagctcgggcacgcgcctgtcgcatcccgcaggaaggaggggtccggcctgaggcccggggcggcgtccgccatggagatcccctcggtccagggccggcgcctgggacctggcgggcggccctgaccgccttcctccctgcgcgggctgggtcgcggacgtgcccttcgcggcactcggcctcctctgcgtctccgccttccctgggccgcactgctgcctgggcgcggcggcggcgacggcgccctgttgaatgggctgtgagggcccaggtttaaagcgctggcgaacgcggcctccgggggcgcacggcagctgcagcggtggcgaccaaacgggtgttggagttggcggcggccatggagggcctggctggctatgtatacaaggcggccagcgagggcaaggtgctgactctggccgccttgcttctcaaccggtctgaaagcgacatccgctatctgcttggctatgtcagccagcagggagggcagcgctccacgcccctcatcatcgcagcccgcaatggacacgcaaaggtggtacgcttgctcttagaacattaccgggtgcagactcagcagactggcaccgtccgcttcgacgggtaggtacatcccaagccagcctctctccgacgcgcgcggactcgttaattcacgggccctcccctccctcaccctctcttaccctctcttcatgtaggtactcacttctcccctttttgtaccacctcctgccccactaatgcccacttcatcttccagggctaataatccatcccatgttttgctgcccgtcctcatcagcccctacccctcattccctctgtgggaagataaccacaccctcggccttgaaatctaatagtcgtcttctctactagatagtctgtgaacaagccatttggaggaggtggctgcctttccaggttttacttttagtggaactggtgatgtaactgatcagaaattaaggaggtcagcggttaacattgaagaactccgaaagagttatttgggcatccatttttactcccttcaagtgagtggttccgtaaaaccttcagtgggctgctgggctttaatgtcaaaataagcacctagaaccagcagcagctgcagcatcatgagggattgtcacgcagccagacatctcaagacatgattctgattcctccacgttgctcggtgtagatatattggctactaagatggcattggacctgatgtgggagatgatgccattcttaaattacatcttatcccgtgatgttgtggggaagcttgatcatttactgttagttgaggtgggaagtttaaaaatgcacattgttatgcctaagatttgccctttgagtttaattgtacgaatttttgggtatttgaccagaattgtcaggtttgacattatcctcttttctatgctggaggattataacacgttttacagattacaactgtataacgattttgctacatatgttttggttgacttgtggtagtacataagctatt

SEQ ID NO: 62062 - DNA, 543 bp, Homo sapiens
tgtgtggtattccgttgcataaatatactacagtttatccatttcctattaattaatattttggttgtttccagtgtttgactgttatgaataaaactgcagtgaacatttgtgtatgttgtttggtggacatttgcatttagttatctggtatatatcaaggagtggaattgctgggtcatcaggtaggtgtatgtttaactaacagatattgccaaatagtttccccaaagttcaacaaccaaattacattcctacttgcagtttccaccagcaatgagaatgtcagttgccacatcttgctcaacacttattattgccctgtcagtcttgttaaatttagctattctgctgggtgtgtatattggtaaactggttttaatttgcatttccctgttaactaattatcttgagcatcttttcatatgcttatgggccatttggatatcttttgtgaagtatacttgttcagtctttttttttttttcttaaattgagtagagacaggatcttgctgtgtcgcgcaggctggtcttgaactct

SEQ ID NO: 62063 - DNA, 900 bp, Homo sapiens
gagcttggatccatgaagtctgaggaggaacttaggagtctgtggtctgactgaggcagtcctgggaccactctttgagaagcgcagcgctgcagagatcatctgctttatgaggcacagtgggcttgggcacaaccccctctttcttcatcttacagcctggatattcacttacctgttgattgcaactctcagccattagagtcatctggggaagttggaaacaaacttggcccctctcccaaccaatgaaattgggatccatagtgggtagggcccttgcagtggtcacttttaaagctcccgtggttcaaaggtgcagccaggattgagaaacactgcgttagcatagactttgctccctataagatgcatctttgtttgctctaccaggcactcttaaggctcatcttgggtatttatacttcagggtaaatagattcagaaagggaaacttgataacaaattgagaggctaagggccttgatacaactctcagtttgtccaccttttgaccacttagttggtcttggtgtaggtctggggaagggtgtgaaggactgtggagttctggaataagggctgcttgcctctgaccgagagtccagaggttgcaattcagtgacctctgggctgcatctgaccagcaggtacattctgtttggcctgcagtgtggtcacaggtggcagtttttaaaaatatgaatgccagcctctaaaaatcagatatccataagagcattctcagatctgatgatatttgatggacgacttggtgctaagtcaatgaaaacttatgagtgtgggttcattaattctcatttagccaggttaccccattcataagagtgatgacggaaatggaatatgatttagcaacatttccttctgattctatta

SEQ ID NO: 62064 - DNA, 766 bp, Homo sapiens
cgcttgacgggtgcccaatctgttgcacccagatcagctgcagaaaagagcagaactttcaatggaaattttaaacaagtgacatcaagatcctgaagcatttcttcaaataattataacggataaaagatggctttgccagtaccatcctgaagacaaagcacaaaaaaagcaatggctaccaagaggtggatgtggtccagtcaaagcaaacacagatcagtcaagagcaaaggttatggtaacagtttttcggaatgctcagaacattttgcttgttgactttctggagggccaaagaatgagaacatctggttattatgacagtgttgtgagaaagttaatcaaagctttagcagaaaaatggctgggaaaatgtcaccagagactccttctccaccatgacaatgctcctgctcgctcctctcaaagggacttcaaaaagtttgtggaaaaatggaattaaaaggtaaaaattaaaaattaaattttacttctcaacataagcccatcaagttcaagacacttttgtaagcaatgataccaaccatgtagtccattcttaaatgactaagagtcctgggaatgtaaccatgtcaatacagtccttttttttttttttttttttttgagacagagtcttgctctgttgcccaggctggagtacagtggcgccaacttggctcattgcaacgtctgcctcccaggttcaagagattctcttgcccagcccgagtcgctgggactacagacgcccaccaccaca

SEQ ID NO: 62065 - DNA, 509 bp, Homo sapiens
ctacctgacttcgagacttattttaaagctgcagtaaccaaagcagctttttgtttgctcaagtttagataaatagacaaatggaataaaatagagtcaagaaataggcccatatatctatggtcacccgattttcaacaaagatgtcactagaattcaatggggaaaatagtctttaacaaattgtgccagatcaactggccatccatatgagaaaaagaaaacaaaaacctctgacctttatctcacaccttacacaaacattaacttgggatgaatcattgacctaaatgacaaagcaaaaacatcaaacttctagaagaaaacagagaagaatatcttcatgatatggggagaggtgaagatttcttaaatgggacacacaaaaagcactaaccataaaaaatattgataaattagactttattaaagttaaggacttctgtttatcaaaagataccatttagagaatgaaaaggcaagccatagactgggaacagatatttgca

SEQ ID NO: 62066 - DNA, 1687 bp, Homo sapiens
tcaccaaatgtttctccactgcatggatagctatctctccagcttccaacatcagttccttattgctgccactgaatctctaagagaatactgcatcttttcattgttttttgctttaacagcacttcacttctaagtacaaatttctgtgttagtcaggataggctaggttaagctgtgctaacaacaaccacccttaaaatcaataagagcttatttctggctccaatgtggagcagaagggaggggcaccctcatggccacctgtgactccgtggcaatacctgctttcatccctgcaagcaggaaggagacatagccaactccacactggctcttaaagcttctgcccaaaagggtcatttgtcacctctgctcacatttttataggtcagggcaagtcatatggcttcacttaacttccaaagagagcagaggtatgcagtgctaccatgtgcctggaaggagggagatgggaaccttctggagcagccctagtgtctgcccatgtggcatgtgtgcttccctttgttatctctgctctagctctgacaatcagcaatcaatgtgtgacttgctgagtgataatcagctgccggatgtattgaaaaggaatgccttgctccaggctcctcgggatgccttggtttactgcagaacaaaggagactcctaactactgaggcaatgtgagtccaaaaagcatcaggttagactgacggagacaactcaggaaggcttccaacagggatcggggggtggaggggctttgcatggccagatatctccacaaattgcagtgaccctggccttcgagacagaaggatgcattttcaaagactggctctcactggctatgtgaccttgaacaagtcatgtcccctctggagccctcagtttgctcccctgtcagagggagataatgtgagtggaaatttccagaacagtggttggcttcctccctccccctgactgggaaatgcctctctctcctggaccaaagcctagggctgattcatagtcactatcagcatcattctcagcctgggccaggtcaacacattgtttatcttggtgtctgagcccattcctggcattgcagagacagaggataagagcatgggggctggtggatccccaatccccatctttctaccctgtcccctccttcctcctcccaccccagggtcttgtgagaataactaaaaaatgcaactctaaggccagcaaggccaatttcccaggggcagagtccatgattcccatacagaccctcctgcttgcctccaaagaaggcttcctttgtaatgactcttgaattaatcaacttctatcgactcctatgcctgcctctgatctcagggtctccagtcctcccccaacacagctgcagacgtctcccatctctccttcctgccttagtccctcctgccctagtccctccctccaccctcctgacgcacactgcggtgactgccaaactgggcatcaccctgtccagccttctgcccagcagcctttcacgctgcccaggtgacaggaagccccgccatgactccagatcctggcccttacctctctcaagtcctctactcagaccaagcagtctgctggaccagtcacgtgtttctctgcctagaatatctgtcctagtccttcctctgattatctaaggagcatctcagacc

SEQ ID NO: 62067 - DNA, 885 bp, Homo sapiens
caaggttctccattcttggagctccctcctctttatccaacctcagcacccccaatctctcactcttaccctacaaatccagttccccttcccaggaagccttctccaacccagctctgtgcatcctggggcaccaagggcagctgctgcatgaatcatttactcgtgtattaagcatccgatcctcctagaggtcagggactgtcctccgtaatcagcctaccagggagcggagaccagagcaactgcttaacaaatgtcctgtttattgcgccaggtataacattaggtgctgggaatatagaggtgagtcaaactgtcatgaaacgtattcaacagtatgacgaataaatgttgaatgaaccctatcttttataaacaccagtggttttttggagtctttcttgtgcccaagacaagcataagcccctgagaggcaggtcagctgtgcacactccccctgacctgaatgacccagtgctctgcatgcaggtctccagccctctccacatggggcacacctgcgacactgttggctgaggagacacggaagaaacagtaagccaaggtcggggtccttgccagcaagaggtgtggtggccggctgggaggagacagccaccagtaaacaactccagtccagtgtgccaggtagcaggactggggccgggccagggtgcattcttcaaatgcctctaccagatagaacaggcatgctaaaggcagatgagggggacccagaaggaccaacggaggagatacactatatcaaaagccaggactggcttagagggcccagcataaaatgaaaaacacggagccccttgcttaaaaattaagaattccaagacagtgacagcagcgcattaaaccaagtgcgtgctg

SEQ ID NO: 62068 - DNA, 5915 bp, Homo sapiens
tgtcttctccttactcaaaatgtgtcccccagcaccttgaaggccagatccacttcaacctaacccactgtgatgtgctaaagcaaactcagtgcaaggcttcataaaatgataatccacagcccctggtcctgaacctcctggccctctaatatctccaaccaggatgctatccactcttcatttcagcgtcttcaataatagaaaactcattctctttctacggtggcaccactccaaagctggagaagaaaaagctcttccttacagtatcttaagaaaaaaagggtgtttcaaaggaggcagtagagtgtagaggttgagtatgcagactggctgagtttgaatcctggttctgccactcactggtcacatgataacccctgtatgcctcaatttccatatgcacaatgacgatgataataataatacctacctcatagtgctgttgtggggactaaattagttgatacatgtaatccacttaagaaatgtgccagacacagcgtggttgctatgtaagcactagctaatattgttattatcctaaaccatggaggagctcaaagtaatgcctggaagcaccctgatatgtctccgagactaaaactgtcatatagacagcatatactgagggccatatcaaaccaattttgtcatcatttactgattaaataggattattccgttttacaggtgaagaaacaaagcttcaaaaaggtaggttaagctcaccagcccaaggtcacaagggcaggtaaacgtatcctacctccttgtggcaggaggaattcaaacccaggtctgtgtaattcctaagcccatcttcatcatggagcccctcagactcgaaactactatcagcagcagaactcaactgactatgaccacaggggaactcaggctcaattttctgcctgcgagttcctggttggcttgcataaactgtagttaatatcatgctacttgaacccaattaggcagtaagtcagcctggaaaacatcatgcgatgtattccaaaggtcaaagtaaaagctggcttccaaggcagcctctgctggacactgccatgaaagttagtttctgcacagataccagagttcagctcgtgaggtgcttaaccagcacctatatcggctttttaaaattctcagagatgccagcatcggaggacccgacgcgacgaattgcctggctcctaagtcaacatccggagaaaggcggtttacttttttcaaaagcaaaccttcatccctctctttcgctttaggatctcattactattgtagctgccttctcccaggcaaaaataaaagggggaaggagcaggtttagaccgaggaggagggttcccctagcctgcagggcgctgcaacatccacctgaaacacggagctcgacctaccttcccggagagcccagcccgggagggcgtttccccaacggatcgacaactcttccctcccggggaacaggctgctgtccttggcttcagtcagggccactagagtcgcgtgcgcgacacccctcacccccgccaaaagaacctcatgtttaatgttccccttactctatcacttccgccgaaagagcaaacaccagagcgatcggttagtccttaaggccacatttaactacgtctgagcgcctgcaggaggaacggcgaaaccccggagaggaggcgggggaggcagggagcgcgtgggggggggcatttgcacagaggatcgtcgtcctcccggcgccgcggccgccgtgactctccagcacagcctcaggccgttggcgcggggcggaaacccccatcggggctcatagcacaactgggggtccccaaagccggctccccctgcctcctccgcgcgggaggccgtcggggtgatggcgcaagactccgctccccccgccccccacagcgacaacagccacggtgacaaaatggcagcccggcgcccggcagtcgtgccacaggcgcgcagggccctggaggcggctcctgccccccagtaacgcctcggcgcccttcgggctcagccccgagtgggcctagccgttaaaaaaaataaataaataaaaataaataaataaaacacctggaactcaaaaccagcctagaaagccacaaggccggccccgcgcgtactgcacccccgccgcccgcctgccagcgccccgcgccacatggagcccggagcccgcattccgagccctgcgccccgcgccggggaggaggggcggggcgtgcggcgcgagccccgggaaacatggctgctcgtcctatttcggcgtcgcggcatggccaccagctcccggagcccagttgggagaggtgccgaaggtgggtgtgtggggggcccaggggcagcgcggcggggaggggcgcagggggcgcgctccgggagccatttgtcttaagaacgtttaaaaaaatacagttcctcctcccccaacccttttgtccctctttcgctagctttctccccctcccccgcaaatgtgcagaaagtgccccctcctccgccacccgcgccccaccccgcctccaggcagggggcaggcgtgtgggccgcgaggctgggaggcgagggggcgaagcgtgagaaatcgctcccagtacggcgcggtgcgctcccctccccaacacacacacacactcgtggaagtttaaagagccggttcgacccgctttcctgcttgctcccggggggccggcagcgtcggtcgggttcgccaggccagccgcgcccccgcacccacccgcggcgaccccggccccgcgcttggcgcccttccccctccgcgcagggggcttccggaaagtacgcgggaagaccgcggccccggccccctcccccatcaccacacccagcccccaaacgctaggcgccgggtcccggccgggacgaaagcggccggagagaggcaaaccgcccgcaaatagtgcgcggaaactccggcctccaccggcggcgccccctcctctcccgcggccgccccctccccgccctgcgcgccataaggcactcgcacgtctccagtccacagctgcgttaaggcggggagggggtagacaaaaaggatcttgttttcaaaagtctcactcaggtttgggggaggaactagggaaaagaggaagcgaggcctgccttcgccgggattcgggtttaacgggctagaggggcgacaggccagcgcacggtgctgcccaaactcccaactccatggagctcgggccaccgagactgggggcgtcctcccgccagcgcgtccccggtccccccaaggggccaagaggggagctggccagggtctccgccccagagccgccaactcgccgaaaacactcaggtttgaaagcgagagggaggcagaaataaaaaccagcgttcgagtcacccaccctcaccttccccctcctcaggggtaagctttcgctcgagcctcgcgattcccacccgtgtaagtttcctccggccgtgctcccgccgctgcccaatcaataacggcggctagcgggcaaactcccatcctagagctgcgtgtttgccatgcccgcataaacgtggacccagccagtacccaccacgggcgccagctccgggcagctcgcgtcctgacaaagtttcccgtgcccatttattaagcaggcgccgaatggctgccgacaagcccagcactgagaaagacgggccgggggttcgagctggggggcaccagggcccaaaggctggcatcttggggaagccggaaggagctggggcgagggggcaccgggacgtagcctttgggcaacttgcaccagcgatcgctggaggcagggagacgcggggattatctgtgccttagcacgttcgaaaatccctccccctccttctaatttatcctcccttcggaaggaaaggaagaaacatcagcatctggcccgaaggtggggtggaaagagtgagggagaaagaggaggagaggaagggaggcagagaaagggagggagggagagaaagggcgcgttcacgaacactacaaagttacaaatatggctcccccgtctctcgcctcatcactgcaaagaaatgaagacgcactttaaactccagccattcccaactccgctgcagccccctccccacgcgctctccccgggggcctcggcccacatttatcagaaactaaaccggactcgcgaagccccaaacttattgtgtgtgcgagcgagcgagcgagagaaagggaggggggaggcgcgggaggggggcggaaggggggatacatttataaaatgtaaaaccccctttttttgttgttaaatccaggaggcagcccctctcctcctcctccctcgttaatcttccccccagacggagtcacgggagcagcgatctccgagggtgatttcgcctcattctctccgacccaaacgcgtgcgcccgccggcccccgatgggtgcacactcgcacgcacactctcgcacccacactcgcacacgcgggagcacacgcacaggtagtcacacaccaagggcagcggcggcggcagccggaacatgctcggatggcattgcaaccccccagccttgccaattcgcttgcagtccgacccccaaacccgcacctcccgggcgcccccccccaaaaaaagtgcctccccccagcgcgcacacacacacacacacacaaagtaggagaatggaccgacagagatatttttggcaaatgctcacatcagagggcgtcctgttccgcagctctaaatgaatccgtctgcccatctccatctctcgcgctctctctctgcagaggctcccgcgccggcggaattcaatcaataaaccccgaacccacggccgcgcgttttaggactttgaaggctcaaccagctccgctcggttctcgagcccccagcacccgcggcgcacactaacctgatcgccgtggaggcgggatctgcggccccatggacgagcggcagcggcccgagccaatcgccgccgagggtctccgggcaacagccaatggcagtggcggcgggggggggaagggaccaatgggcgggctgcgcagccggccagggaggctcggccatttggtagtggtgccggagacggacccctttagatttcggggcggctgaggagcgcggcggctgctctgtggctgagtgaggggggtgggcggaatggcgggggaagggaaggtgactgtgcctcgagggccgagccgcccggccttgccagccagccgccgcctcagcgttcggccgggggcggggccgcaggtgcgttctgcgagggggaggggcgcggccggaggggtcgggtcggggtccccgcccggccgagggcttcgcggggcggcgcgacggggttgcggaaggaggcgggcggcttgaggtccggggaccgcgggctgcccagcgggagggcagatgaaaggcctggaaggaggagaggggtcagggtgcaatgccgggaggggctcgtcgggtcccgggtccggcggctcgcgctggggagcgtggctgcccccgtcacccccaccgcggctgcccagcagcccgcgcgccccttcccctccggcctcgtccctgtcaggccgccaccatcgccaccctcgtatacataagtcagtaaaagcaagatgcttccacttttggatgacttaccgcgcggtcgcgacccttcccacgaagaggcttttcactttgctgtcatattaggtcagcttggaagaagtgatcaccaagagacacccaagatcttgtttaggcaataaatgaatgaagaccatggattaagaaccgttgctagatatgtagaatattaaaaggtggaaaaggaaggtgctcataactcctggttttctggaccaaacataatttctgggctttatagacctagtgaaagagaacggcgcacgg

SEQ ID NO: 62069 - DNA, 1219 bp, Homo sapiens
gcctcgctgtggtctttcgcttgcttggcattgcccctagggtgctcggagatgggctgtggagggggacgttgggaactgcccgaccccattctcgccttttcccgctggatgtgcagctttcggaacgtgcaggggcgggagtgtctacaacctaagaaaagggccgcggtggggagcccggagcagggctgggtgcagggagcgctctcgctgcccggggcgctctgcgctgcgcgcccagtggggacagcacgccgccccgggagtctccaggcgcgggaggtcccagcagattttgcataaagggaggaatcgagtccagagaacaaacaagatactggaggtggtggcacggagaggattgattcggtttgcaaccctacgaggtcgtggccgctcggggcaggaaagcaggctcctgtctctccaggatccagcctcccgatcaccgcgctagtcctcgccctgcctgggcttccccagagacgggagcttgggtgggggaccctggacccgaagccaaggctgaactggtgtgccaagcccagggagcaaccaagtccccaactctttccctgcccttcccgcaggctgagcagaaaaccaggaaatggatggactccacctccgcagccacgcctgcccgtttgcgcttactgaacagaggtcctcaggaacgtggtgagacaaagagaaaggagggcgttttcgccaccctcttgctaatgcttcaataactccccattgccctaatgagctcaccatcagagcctgattaagacctttggaggccctaaaattataagacccactatctccatcaatgtaattaaaaaaaaaacaactttaaatggaactttaccaaaaagccgattttcctctgtgaaattattttaatagcaacgacaagcccttgccttgcagcacactggcctgcccaacagaagatccagtaaggtttgcaaaaccagttgggatctcctcaccttgcctctctcctcttcctgcaccggccggctaacctgtttccagttcctccgaggctcagtccttccctgagtttcccattgccctccagagccagcatatatttccacttccctagctttcagtccaggctgtgttagatgccttcagtgctttctccatcacaggacttagcacacagagtaggagaatattcccgtttcttccctgtcaccctctctgtgctgag

SEQ ID NO: 62070 - DNA, 1039 bp, Homo sapiens
cagacactcccacaccctctcagcaaccctgatatcgttttcttcccaacccagtattgcacttgctagccatggacttcagggtaatctcacccatctgagccttggcaccctcatctctaaatcgcggatatcaacacctactattcagcccgtccacatccgtgtaggtattccagttgctacagtattcaaatacatccatactggttggtgaaaagccaggactctaagcccctgggtttccctcaccccaaacactccagcttccccctctgaggcccacagacatccacagaatcagcagcctacaggtcatgcctgacccgggaggaacctgcagatccagctctagtgctataaccaaggtcagttctgacaggttggtgtctaggcctcactggttgttaaatactgtagtattacccttgaccatggtgatgcaagattacgtacatgaggcacccagcacttcagttcctggaacaccagaggaagaataactttcataatcctcatacttcacagcatggggcctcccatgtttgttttcctgttaaagtccagctgcgatttatcctccttcacctttccatttcaccccttgtttcctttactgagagctgagatattgaggttgggacctggtttgtgtgtgctttctaaatgttcttaggtttccatgtggttttatgcctattttgtttgtgggctgacttcagaagtggtaaggtgaaaagaggtgagcccattttgtaaagaagtgagcggtgcaggaggggctattcctagccatttgtctacactggcgcacacacagccctggggttcatcccccattgtacgttaagcagtcaaaactggctggcccatttcacagaagcccaccctgcagactgagagaatcagctctttatttgacttgctgagcactgtggccaagtacacactttgaagttatatactccatgcttctcggtgcctgtcgctggctgaatggtgggccctaaaaggtatgtccatgtcctaacccccagga

SEQ ID NO: 62071 - DNA, 1112 bp, Homo sapiens
gagccggttgcagtgggccaagattgcaccattgcactccagcctgggtgagagaccgagactctgcctcaataaataaataaataaataaataaataaataaataaataaataaaattaaaaattagccaagtgtggtggcccacacctgtagttccagctactcaagaggcttgagcccaggagctcaaggctgtagtgagctataatcgtgccactgcactctagcctgggtgagccagaccctctctctctttctctctctctttttctctctctctgccccccctccattccacctctatttcctaatctgatctctgagagggacaggaaaaggcagaaccaggttcagagtccaggcctgtgactctcttactacctacttcttgctagatctcccctgccccctgaagtggattccaccctgcagcacagcccttctgactaatgggagcagggcagagggccagtgagcctcttttgaccctgatccagggccagagagcattggaagcagaagagaatctgaatttcctcatccaacaaaatgaaaatgccaactctgaaatcaaaagtgatgagaagtagaaaaccaagtctcagagctccttgtctgtacaggccatttggctgactggctgggcacacaatcaagagagagagagagacacagaaagagagaaagagattgattgaatgaagttgtctcactactttttgtactggcaggcacagggcaaagccacaatgtagcccgcactctttccctgtatggctataacccggaagctgcaaacattgtatccactcacatcttggtagccaaaattagtcacatggtcacatttgactgcaaaggacacaggctttattctgagtgctatgtgaccaggcaagttcagcaagtctgctagtaaaggaaatggggagaatgggttttggaagaaaaactatgagtctctagtcaaaatgatggttgaataaagattatgtatttctaataagcgcctggcggagtccaattcagggggataggagcactgaaaaaaatccacatcaatttcacaatgtgtctaagacaaaattcagaaagaatattcaatgtattc

SEQ ID NO: 62072 - DNA, 2029 bp, Homo sapiens
ctttgtcagaccagatgtcctgggttggggtttggaaaacatgggcatcttaacaatggtgccctgtttgaggtggagagggaggagaggcccaaatcggggaaaggaattaaatggaggtttagacgcgggtaaccggagtgggtgggccttcaacctggaagatgggaatccccagcgcacttcgggcagcgctgtaaccaagggtaaccgcacctcggtttacaccggtgtgaagaccagcctcttccccaaaccaggtgtatctacggcggcctagcaggaccacacacaagccaagcacgtcacgtcattcgagctaccttaccgcgaaagtccactgcctcctactacttctggtcactactacctttgctcacagtttattaaggaggagcggagaagaagaggggcggagaaggggcggggagaatcacctttccttttttacaattggtcgtagtagactccgagtcctgccgcccgtcctgcagccgacaggctgccaggactgtcactcgaggagctgccgctaccgccccccgccgtggccccgccccttgccgtggctgggatctcgcgggaagagctgcgggcacggcggtggctcggtctcccggctgcgcgcggagcgggagggctctcctcacacaagcgcttccttgccgagaggctggagctgcggcaccgcaggcctgagccaccccttctctgctgtctccttctcttcctcagggctcccgtgtctgctcgccctccgacgctgctcaggttagaaagcccggagcgcgtctccgctgaggagcggtcggggagcggggacacggagcagccggagcaggcgggctcctgacgggggcggctctgggggctgcgcggcgctgcctggtgggcgcgaggcttggcggggtttgggagtccggggggcgaggaggcggtgcagtgggatccgggcgcgggcgcccaagggcggtgtagcgggtgccggagctcccgaggtgagggggcaatgtattagggatcctgggggctcttccggcttggggtaggggtgggtggcggcacacggggtcctaggtctttgacgtcgagggagatttatcagggtcttgagcttcttggaggtggtgtagcggggttccgggacaaggggtctttttacccgggtcccgagctctttggggcagagaatgcagtttagcaaggtttacaccggtgtaaaccttgtctctggaggcagatcatcggggtcttgggggttctttgagcgggcgtgggcgtccgtttcgcattgctgggatgaagaagcagtgtgtccgggttctggggagaggggtctgttcatcggtgtctccgggtgagagagcgatgtatccgttccgctggggccggggccgccttggggggttgttgggggctgagggtgtgtagcggcgaccagcgtctggccggggtttctgctttgcccggagcggggcggtaacttggcatggtctccagtcttttgggggcgacggggcgagttagctggcccccgggcagtctctcggggtgggcgcggctccgcaggcgctgggtccgctgagggcgggagagggctttggtgctaccgcgcaggctgggcagcatcctgaaacgtttttgttcaggtctccttctctctggatgagatttactcaatgcttagttggaggattgatcggtgttgttgcctagttgaagaagcagtgcgtttgttctgcagttttcttttctctgccccgggatccctgtgggggcgcgctggtctcgctggagctccgggagctagagtggcagcaccttaggtgggcgtttggtctgcaggttctttaggaggccggtgtccgcaggttgagcgtggatacagctcctgagcaactggaatctgttgagggtggggaagactgattttggcttgctttcctaggtggtggtctgctttgctcatcctgcatgattagatctgttctgaagtcttgcctgagtgaatgttaggcagagtcggata

SEQ ID NO: 62073 - DNA, 727 bp, Homo sapiens
cacacagcttgccataataataacagtttacaaaaccaagtgcatttttcaaaaccaagaaaccaacaggtgccttactaccaaccaaactccagattccaaattgagattttgccagattttccactgggtctcctgttcttgaatccattccagtattacatgttacatttgttatctctccctaaatctcctatagtctatgacagtttctctgcctttctttgtttttcataaacttgatagttctgagtactagtaccagtcagatattttgcagagtgtctctcaatttgtgtttgtctgatgcttttcttgtgattagactgaggttatgagttttaggaagaatacacagagggaaatgcccttttcctcacatcttatcaaagtgcatgatgacagcattacttggctaaggtactgtttatcagatttcctcactgtaaagtcgatatttttgtctttttgtattatattctttagaaatgagttgctaatttcagcccacaatcaaaagggtgggagattgtttcatcttatggatagggtatatctatatgttattaagttttcttctgtaagtaagcctttgtcccttctcttccatttatttattcagtcatttatatcaatatgtatacttattttatacattggcttataattcaatactatgttattttgttgctaaaattgttccagtgttggtccctgtattcctttg

SEQ ID NO: 62074 - DNA, 703 bp, Homo sapiens
tatgtcagagatagaaatataaacttaaggtcttcccaggtattttctttgcatcttttcctggacatgcatgatcattttccagttttgtccatatttacagttgtttttgaatgtcccagtctttaatgtctggctcccaaaaggagaaaaagagaaaaataaatacaggaagaaaaattggctctggccctttaagttccctggaagtcatttcaggggagcaggggggctcttgcaacaccgggaggaggtgcaacaacaatggctggcagcctctttgactacacccatgtgatctttggcaacaatcagtgatcagagtacagatctccatacctggaggacaaggtcctttttgcctacgtgggctcctgcaagctgagtacaaactgctccaggagcacatgcacagctgcctgccagggagctaggagtggaggatggcttgctgcaacagtgttaagagctgaaaatgacccaaattaatgcactttatcatttagtccttctcttggaagttgcaagccttcagtggactacagagttccaagataattactttagacagattctgccagtgcagttgttgtctaagttgggagacagattcctggtggttcctactttgtcatctttcttgaatccctctgtgatttcttatggcagaaattatgttaatagtaaactcaacataagtgat

SEQ ID NO: 62075 - DNA, 808 bp, Homo sapiens
tgtcctctcggggacactccatctctggttgagacccctgggatcaatgatctatgaagaccctcccaacggtcatcctcaggacaggggagaccatgttctctttccagcccctgtttcatgaatgtggactgggtgtgaatgaagactcaacacgtggggtgtgcaaggacttatgggtggaggggccccttggacctcatgctgagagccaaggccagttctcttcgccttccagaccttgggttacataagtcggggtgggtggggcgaggctcggagtgagggggagagaggcctgtggttcgggcccgcacactaaggtcagtggccttccagtgcggggcagcgtggtgagtaatcatctattcatgccctaggactcagcattccacccactttcccctctcacgctgccctgggaggggacacaggaagtgaatcagcccacccaccaagcagaggagggagagagggtggagtgtgggtgttgttagacgcaagggcacgcctgcgccggcctaccctgggttttattttgtttattcctcccaagttagctgtttattaacttcgtccacggaaacccccttctgaccttgtcgcttaatggaagggcagacgatctttggcagggggaggggtttgttgatgaatattagaagtaaatcactgtctctgggaataacagactgtgaggtttgggatagtactaacccagacctattgctctgggggattcattccttcattgaagaaactctgctctggactgtgggctagatgtggggcaggagaagggaatgag

SEQ ID NO: 62076 - DNA, 1121 bp, Homo sapiens
gccggcttcgcagagcaccgcgccttagccgcgaagttctagttcttgctgccggtcctaacgtcccgcagtcttcgccagccagccgtcccgcatgcgcgtttgggcggcgtggagcctgctgccatgaagtcagcgtgagtacgaggccgccgagcagggagagagggcggacgggggccgaggcctcggggctgggggcaggcgtctccactcaggccgcggccgtacgcgggcagcgcggacagcatcccgcccggtgctgctgcggccgcgaccccaaagtgggaacctccacgtgtggccgctccgcgggagcctgggcgcggagacccctgccgcgtcgccccccgccgccccgcctgggcctccaaggggccaggaagggtcggcccggagccggggttgttttacgccgcacccggttcccgggggcggggcagtcctcctcggggtcccgggacagcctttcccttctccctcgctggctgccgccgcctccagagtgcagttggccaacttagtgcgggtcggaggtggtctcgtgtgtggagcagagcgagtgtgctgggcattggttagatgggctccgtttctggagagccctggcaccggtgatcgccgctagcttttttttcagccgagcaccctgtccttgaggccgagcccatccgcttacacaggccagttacttctgctgtattttgtggccgcagagaacctccgcccacattcctaagctaatattttcggcgcagcatcattcctgggtaaagaaatatttgtcgtgcaaaggagaggattggctttattaccatttagggagtcgtttgcaaaagacaacttgtttattaagaggccgaagtcaaaatctttagatgaaaaaaattatatataagaaatatacgttgagtttaacttaagcccaccacaaagtattttgcactgaataacacgaatttgcttgtgtttcatctgagaatatgtttggaaaaatatttttaaactacagtcgaagccaataatcttacttaattttaatgtgttaaatgtatatctagcctatagataaatgtgaagggaaaaagatgagatgctagagaaatggtgaaatcaatcaa

SEQ ID NO: 62077 - DNA, 2638 bp, Homo sapiens
tgtatttttaatagagacaaggtttcactatgttggccaggctggtctcgaactgctgacctcaggctatccacccgcctcagcctcccaaagggttgggattgcaggcgtgagccaccgcacccggcagatcagttttttatgtacactgctggacaaacagtattttggactgactcattgtagctttggaaatgtttggattttttaatagctttaacctttcttgaccaaaattccactataatggctgcttagatttggatgaaaactcaacagctttattttttaaaagtttgatagctttataaatgcttttttaaaaaattccggatgtgaaaatatttatgtttgtagttaagattgacccaagtgggactctagatcggtggattccaacagaaatgtttcttcagagatgattattaaataatgggatggactaaacaaagaaggtgccccccccccaccaaaaaaaaagatatatatacatagaactaactttccggtaaactaagcaaattccacgaggaatgcaaagatgaccatttttgaaggtaggaatttaaattgggtttagataacaaataacgggttgtagacagcttacccataatccctccttcccccaagcactaggcagtgaagttagacttctggattccacctccacgctcaccgcgcggcactatgcaatcttcggttagttaccaggtctaagttaggcttctggattccaactccacgctccaccgcgcggaactatgcaatcttgagttagctaccgggtctaagttaggcttctagattccaaatccacgctccactgcgcggtaactacataatcttgggctagtttaccagctctaagacttaattttgccatatgcaagatggagataacatccaactcctggtgtgtgaggattacgtgaatccttgcagaatgtggctcagtgcctgggacatagtaagcgctctacggcttctgctagcataacgctgttagtttctctcatcctcctacatctacctatctcaaccaaggtcctgcgctaagcaggggcctccaagctgggacgcagcccttactctcagggtcagcgccggctgggaaggccgcgacctaaccaggagattacgaacaatgtcaccagggccacagcggagctcctgccaagtcaagcaactcatggaaccaacggaggcgaagtccgaatacctaggcaaccctaacctaaaagtgtttttaacgttctcaggtcctataatttacccaaataaagtgggaccgtatttgcaggcgctgagaaactttctcaacagtaagaaccaatcaggcgcagtgcgcaggcgccttcagtgggtcctgggtccgcctcttccgcccggtgcgggcgccgattggtccgcgtggacacataagaggctgcgtataggcgcgagagcccctttcctcagctgccgccaaggtgctcggtccttccgaggaagctaaggctgcgttggggtgaggccctcacttcatccggcgactagcaccgcgtccggcagcgccagccctacactcgcccgcgccatggcctctgtctccgagctcgcctgcatctactcggccctcattctgcacgacgatgaggtgacagtcacggtgagtgcgggcgcgggccggcggccgggctgcctgtgggcggtgactttcggctctccatgcggttcccggctccaggccgttcgactgagcacttccggccggggccaggccgcgaacacaggccgcatagggcgggcgctcctcggggctggggcctctctccgggcaggtcctgggcccccgggaccacgtgcgggcccagcgggcatggagtgcgcttgaggctgggcgctccggctccaagagccttcgtgtagaaaagctcttccgcagtgcttgggcaccctgacccgtgcctcgtctctctcagggacacttactcggacctctttcggtgtaattgccttgaattcccccggtcgtggaggaaggcgcccgagctcggctccacctcccaggtcttgtaacttaaaaatagccgcgtgactcaggcaagtcccagcccgtgaaacagcagtgatgggctcgcctcattgcagggcgcctggcacacatctcttttgcttgtgatagaatatttgagctggttaaacatgttatgtacacttattgagtgacgtgcagcattttggagatattacatacgctacgttttgatggattgacgtttttatttgttgtaggaggataagatcaatgccctcattaaagcagccggtgtaaatgttgagcctttttggcctggcttgtttgcaaaggtaaggtgatggtggcaaagtgattgtggtaaggcctgctgatttacgagggcagttgtacatgctaaagtacccccagcggtgccataacgccccacatgccgctggatctcctaggtgtttttcgttgcatgtatatctctaggagctaataagatttcagcttgtcaagtcttacgtttccttatcagactctggtttcccttttgctctgaaaccatggttaaaaaaaatgtgaatcaggtcatttattcccaaaaagggtcactcgggagataggtactac

SEQ ID NO: 62078 - DNA, 1567 bp, Homo sapiens
aatgcctggagagatgaacagggaactcatcagatgccacagcagaagcaaaggcgtggcacctggaggcccacttccttctggacacggagtcccgcactcagggtgacctgtcacctcctctgtcacgtccaacatcacctacgatgaagaagatgcaggaagcttagaggccgaggctaggcggccagacgaagtgtcgtcctctgccccggtctcggccccagggagcctggcacctctccagcgctggcgcgtgaaggtcgcaggcccacagttgagctttttttttttttgagacggagtttcgctcttgttgccgaggctggagtgcaatggcgcaatcttggctcactgcaacctccgcctgccgggtacaagcgagtctcctgtctcagcctcccaagtagctcggattataggcatgagccactacgcctggctaatttagtagagacgtagtttcaccatgttggtcaggctggtcgcgaactttgatccacccaccttgccctcccaaagtgctgggattacaggcgtgcgccacagcgcccggccgacagtcgagcttttagagcccgcggcgcgcccaccaacgcagggccgggaggaaaaggcgggccgagaggcggggctggaggccgagtgtggccgagggaagccgaactttccagtttcgctgaggcctgttaaccgctgggggcgccttcgggacagctggcttctgcgcatgctcttgaccctccgtcccccggaggaatgtcttaagtcaggagctgattagtggttgaaggcagctgatctgtttcgaatcctgtgtgtccggagaggccaacgctttcattagccagcaggaatgggctggggcgcgtttgtagttgggaatcctgagcccgggctgttgcttggaggactcgggagcagcagtggatttcggcgttaccaggagaggtctcgagcaccagatccctcttccttcacttcccagtagtgggttctagccgttcccagcgccttcatttccagaaggcgattttacccagagaaaggagagggaagatttgctctacctttggcttcttatcaaatagctaaatcacgtgggaagctggtaaacaaaaacaaaaatgaatgaaacaaacaactaaacagcttgccgggcccctccaaggcccaccgaaccagcccctcgaggcagccaccgggaattttcataagctcttctgatgagcgggaggataagtcagtcagggctggaaactcccggatcagagcaaacccagctcctcagcacctgaggagaagacgcgtagtcaatatggtttgaaataatgtgtaaatgaatatatgaatgaagagctgtcttcaaacgtggaaggaaaagttaacagtttgataaaaagccatattgacaaacctgggaaaatgggctgttggttgatttgggtgtaaattcctataacgtttttcttctttcttttcttctttactcctcctctccctcctcctcccctacccctcctttcccctcctcctcctctttctctttcttcttctcttctttttt

SEQ ID NO: 62079 - DNA, 502 bp, Homo sapiens
aataaataaaataaaaaggaaatcaaagaaacagtttctacaattagaaaggctgttttatttttacaccctttatggagaaggtcaaatattggattttcagaattaatggaattattgggttggtagaatttcatacatgctggatggctttgctgacaaaaggaatttttgttttccagatgctggctcagtgttgccccatagtggccaatcctgggaagggctactggggttgaccccttcacgctagagtgcttctaggctagggtgtgagttccacagtcagagctgcctggctgcttggccgaaggatgagtgagtcagtccacaccttagtaaggaaagcatgtttgtgtgccctcccatgacccagccaagaggaaaccaagagcactttaatatggtcttccctcccttgtaatttacttagcacgcttcactttgcctctgcaaatgctcaagttcatttcttgtttaaaaacaaagaaagatgtcactg

SEQ ID NO: 62080 - DNA, 1992 bp, Homo sapiens
tctgtttgaggagatgaagtagagccgccgttggcttttacaccatccttgatgagaagccagtgatgaggagctgacttcacctgggagagccccagacagggcccctctatccttattattctatgccccaggtcatctgaccacctggaccttcccaccaaggtgaaaaaacctgagggatttttcacccaacacctgtagaaggttttgtttgtttgcttgtttaaattacagactttacagacagactttacagttctggaaccattgactcaaaagagtcccaggggctggaaatgaatcaattctgccttcacctgcctcttcttccttctcttcctcattttaagagaaaggctctttattggtggcagttcatataggtcagtgacccgggctcctagcctccctgtgtagtggactctgcctccagtgcttgagctgagagttttcacgtgagaagcagtggctggaagttgtactcctaggagctatgagcggcaggtaggcagagtcgtagattcatcctacaggtcagaaagcagcctggggagttcaaaggggaggggcagggtgcttgctggtgctaactggatttgatatcctgaggaaagttatattttggatccagcattctctgatttgtcctcctctagcttccccaagagtcatacaaatattgggggattcacaagcattgtcccccactggtgaacaccaggaacaagtgggcagtgggggctgcagagtgtttctagagaaagggcttaggggtggcccctgcctgggtggcacagtgagcacactgtactcctaggtagatcggatattgacttggagaggtcttggagaaaggctgatgaaggtgatcgacagcctaaatctctgaagccgtctcctgatgcaacctctgacccaacaatctctgggtcttgctgttatcagctccatcagttttactgggtgagtaattcatttacctgctgttattgccagggtgtcatccttttcctagttcctggtggaattggagatatgctatcgggagtccttttagaaagtgccttgtctcctatcccatctttatagccctgcatctcacatctccagcgaccttggcctgcagcctgttaaggggattggtgctgaaggctgctaagctcaccttgagagcccgtgatagcaaaggctggggtgatgctcacagcctcctttgttcttttatttgcccagccctgagcaaacaagcctcaataaactaaatggcatttggatattgaaaatgcaaagagaaagtgtctggaagaacaataaaggagttagagcagaggttgcgtgcaggaggagattacattgtctaattcccctcaaaggcaccatggttttccaaacaagaagtgtttatctgaagcctgggtgagagcccaatcggagttttgctctaacaacatcaaccttatttgactggatgctgactcagaagctgtgattttgtaggcaggacctgtgctcacatcttagctaggccccaggaatgatacaaaatgatgccaggtcgcagaagcccttggcctcaatggggaggaaaaatggataagaacaaagcaactgggggaccataaaggcctgaaccaagaggcaatggctcttccaggaagcttctggcctctcctggaaatcaattacttctttcttccctgtgaatccacagcacttggctagcgcttccataattgcacagaattaagtttctatctttgcatagtaaattatttatatttttgtctctctctttagaccagagggtctgcaaaccatggcccaagtagcttttgtaaataaagttttattggaacatggccactcatttgttgatacgttgtccgtggctgcgtttgtacttgaagggccgagtcgggttattattgcaacagagatggtctgcaaaactgaagtatttaccatctggtcctttacagaaaaggttcg

SEQ ID NO: 62081 - DNA, 2948 bp, Homo sapiens
ctccaactcaactcctacagttatttataaattagatgaaatgcgagatgtgggtgcatgttaagatgttagttatgatgtaagggtggtgcctccagatgtgaaaatggatgcagaggaggatgtgcgttttgggggtcccaaagctcacacaattttaggacctttctttaagaaaatggatgcagcacttgaacccgggaggtggaggtagcagtgagctgaaattgtgccactgcactccagtctgagcgacagagtgagactccctctcaaaaaagaaaaggaaagaaaagaaaatggatacagcaatatcttacttctgcaaattttagccaagcatatgaccaggtgaacactcagtatgggtacttccagagctctgcaatgaccagtgcaggtcattgcactgcattcagagaggttctgaagtccaagattcctcagcctgatggtaaatactccccagggtggatgggttgttacatcaattatagtagaatgagcttggaaagtgctgtcaccccaggcttggagagtcacacaattcctgttaactctttaaatgttctgagaaagtcctccagttcagaaagttaactttatttgacccagagttttcaaaacttggttttttttctttttctttttctttctttttttttttttttttttgctatagagaccctctctgggtgaacatttttgaacatctcagaaagggctgggaaaggttgacttagtcccttctgccttccgctgcccccgcaatgctctttcattttatgaagaaggaaacagcaaggactctgacttctctgttatctcagaaaagagctgaaattatccctcaacctcaacctcaggttgcagacacggcaggtcagagaggagtttttctgcagagggtggtcagggaggagaggggttagcttagaggacagggccagacctactcataaggtatttctaatgtagcgaaacacttcctccagaaaaaaaaaaaaaaaaaaaattccacacctttctcttgttcagaattttaaaagaatggggcattttgcttcagatgggggcaaaagtggcttgatgtgtggattcctgtgtctcactttctcttgctttcttctttaagagtttagcccaagcctggaaacatcattttcaggtccctgtgcaaaatggaaatgctggggctccctgttctagaattattcagaatttcaagagagcattcaaccaagttgggggtggtgccctttggagctcaggccctgaataactagcctcataggttgcgtgcccatgaagccagtcctagttagtgcatattcgtgtttacttatttcaaagttcaaagttctgaagatatttagagtctgtatgtaaggcccagtggcgtaagagcttttaacataatgagccagatctgggcaccagcgtggagatgcatttttacagggtgaatcattaattgggcattctaagagtcactcagccttttcaatgattcatcagccatgctgatgctgttgtgtagttcatattattgttgtaattagctgatgcttgtcaaatgtaaacctggctctaacctgggtgttttcaaaaacagcactagttactgtgtattcaggtagagggggtcagcatactgtaactctctgttttcctgacttgtaataattaaccccttctctcaggggacgcactctcattgtctttcctgtaaacagttggtaattgtgagtggagctgtggagtgagaaagtgggtactgcttttcctgtttcaagggcctgcatgttcagaagcagcagtgtggcatgggagatgttatagcagcagagtcaggggccagttctttcactgcctgataacttgggctttccaagggaaagggagggaggtggtcactgcgggtgagacaaagaaagtgcttggtaagggatttctgggatccttgagcccagagtggattagatgggattagagacccactctgagctgtttctacctgcatcttaatccactccagagctgaggcttcctgatccctctaaccaggtgcatgttcactgggcttccagcttccaagccttctacctgtggaatgcttggtccaatgtctggggcacccactcttactccaaactcctccagatctgcagagtggcccagcatattctcttcttgaaaggaggtctttgcctaacagaagtaagtctgtaaccctaggctgattggagaaaggggtgtggtgtttatgtgacctgttttcttgcctccagggcaggtcaaggaatccttccttgacccttaaaaacagcagtggttttaacaagttttctcctttttgcttttaactttttcttggttcatagtctgcatgctactgtctcatggagccaggagcagagcaggagagggggaaagctggggtctgatggaggctgggaaccttgtggcctgtgcctgagctctgtgggaccatgttggggcagggatgggagtgccctaggcccggaagcaggttggccgtggctcaacactcaccaaatgcacccaaccttagctaagacttctccttatagggggatcatcgataccacatcttccgggcccattttccttacttaaccagatgttaggccatgcagattggagaaatatagttatctctacttaacacgtcataaattacaatcataaattacccccgtgtttgtgtgcccttgttccgaaagcaaaggttctgaaacaaccttagttgagatggacgtttccagtgagggtaggtatatcagtaggttgagacgaagcatgccaatgcaggtacgatttacttatttgtttttaattgctgtagataaaccctaattcataactatttactggaggtgaattgggcccccatccgctccacttttaaggcaagcttaaacttc

SEQ ID NO: 62082 - DNA, 2478 bp, Homo sapiens
tgtcagaaggtctcaggctcaggaggggcatctcccagggtctctcagcaaatatcccgattccttaaactgggacagtgttttctgtctgcagagtgtgctcccaccttggaatgggcttgtctggcctgaccctgaatatgcccagcagggactgcatccctcagttcatagatacagaggttgaaggtcagggaggtgaagacagaaggggcagccagtcagagccagcagctgcagcaggacccagatttcttgattctgagtccaggattctttccactccaccagctctcttgtatggacagctcaggggtcagagaaagcacctttatttctgaatttccttcttctctcctgtagccttatgaccagtgttcagaagatttatctctttctagcttgggacttgcacccagcaagtttccatgcaaggcagctgcctttaagaagaacagaagagtcccagttgggcttatggggaatgaaatcagtcccaagccccgatctctctgaaaagttgttattaaattctgtgcctggccctgacctggatttaaagatttgcaagaagacaaattccaaacagatgcccattagggccgtgacagccgcagcttaaagataacatttacattctgccggggtttgtatctctctgttccccactcggcccctctctttcctccggtgggatcaatacctcggttgaggttacgtggaggtggccacattcttttaagctgtttgctcagtgcttggtttgctctgctaacacgctgggcacttcttccaacagccctgtttgcccagcattagggctgtttgttgaaacacctagcccaatccgagggggctcagctttctaaacagttggtccccgaatctgtcaatcaataacaccaattgggttcctgatacgaacagcaagtgtggccaagtccaatatttgcccaaacactgcctcctccccctgcacctgactgtcccccagcttgactaaaaggacgatcaccaggcgcatgggctgctgggaagatacaatgttggcaaacagggagctggttccaggaaagaagggcacatgagcaaacatgatggcccctttatgagaggtaatttactgaaatgcacagcgattacctgctcacccagccctgatgtaattaaaaatggcaggctaggggctctgtttcccccggctctggcagagaaacctgggtttcgacttgtgaagcttgaggttggatgtgggaattggcttggagtcataggcgatgagagggacattaggatattatgaagcccgtgaactcaactcctgagaaggacgcagcagagcgagagaaaaggtatcttcaaaagaggctgatgttcagtgggtacgggcttttcttttgggatgaggaaaaaaatgttttagaacttgtgagaggtgttggttgtgcagcatcgtgaatggactaaatgccaaagaatcgttcactttaaaatggttaattttatgttgtgtgaatttcatcgaaaaaaaaaaaataaaaagggtgaatcccaatgaacccgggtcgtttacatttcagaagctctaatgcctaactcagggtttggctcagagtaaatgcttaataaatgtttattgaaagaacaacctaacatttgcacagtcaacaaagctctttgttatacattagctcatttcatttttaaagaatcctctgaggtgggcaggggtaagcattctcgtgttgtaaaggggaaactaaggctttgagaggagtgtggcttgcacagtgtcacgtagctagtggcagcactgccagaattcaaacccaaaagtctctggctccaaagtctgtgcttgtaaagcgatactattttgtctacctcatggctttcaggatgggaaagaaagcaatagggttttaaaatatgttctctccccttcttttttttaagggtatttattactaaaagtgttttaaaactggaccactgagtaaagtcactccatctcctactgttcctagcacagtgcttgataaatatttgctggctcattcagctgcagctgcagagacctacctgtgtttgctgtggcgactgtccgggccaaagctcaggcagctggaagtatcagtgaagccagaagattctagctgttcagggtctgtgaggaggagtcaaggtctggggtttgtgtcctctggcatagcaatggcactgcaatgggggagcctgttgctgggctgggccatctcgccactgtcacctgcctgttgaggggtgacggtggttgttgagaggctggatcagaccccagaggtgacatggatgtggcatatttgttggacttacacagccttgcattttattttcatctctgttccttcctcccatgagatcttgggtggtgtttatcaaccctgagtaatcgtttctttgtctgcaagatggaataaaaaggcctacctcattggg

SEQ ID NO: 62083 - DNA, 2580 bp, Homo sapiens
ccatcggcattaggcagcatttggacctctgtgatgtagatgacgtgattaaacggcagtgtgtaaagacaggaagaaggcctatgcaagacctcggtactggcataggaggggctaggagggcagggtatgacggaggctgagaggagcactgtggagaaggagcaggtaacatgcttgagtgctgcacagactgagtcagacaggacttggtctgaccactggcaggaagcccgttggtgcccttggcttgagttcaatggcagaatggcagaagagggtgtaggctgtgaaactgacgcaggagaggcaggctgccgcagccactcctgacggcacagctttgagctccgtgctgggtgttcagtgctcgggataacacatgtgcagtaaacatttctagaatgacccactttgggggttgaagagacttttttgtttttaaaataggtgggacttgagcatctcacctctcccaccccccagcccctgaagtgagtcagaatcagaaaggtaatggataggaagtttccagttcttatccagatctggaaattctgatctaacccgggaaaaatgttgaggtctgtttagaaagacatgagtgctccctgggggcaagagagccttttctctggggcctttccagtagccccagcctcaccggtcacctccaggtggtgagctgggcatttagggaagccgtgccttttggcgctaagctgctgtttttgcaagactgggcggctggagatcctttctcaagtcagcagccatcccagggaagaaggaccagagtaggagtgctgggctaggatcctggtccaagctctgccattatcgtatgtgaaacagtcatctctctgggcttcagtttttccatctgcaaagcaagaattccaacactacattcacaggagtatctgaaggataagatgagataatagatgcagaggtgatgtgaaaagtaggaagtgctttacatgtgccagttttcttcattcattcactctcattcacgcatgtactaatttagcaaaaaatgatgaagcatccattagatgctataattgcaaattgctaagtgttcagggcagagcaagtggacagactttgtaacaaaagcctgcttttgactattttatccctgcccccactgtctgcagaagaaagagaagggtagagctgatgggtcagtgggcatctgtgccctaggctgggggtcatcactagccctcattttgccctgcaatcagtagactctgtgcgtgggattctgtgatgggaggaattttctaccctctttgttctggtagggaagagtttacaatgagtagggtcaagggttgttttctgctttgtagtgttgattccagaggctgcctcatctgttgtctggcagcaacggcacactggccattgacatgggcaaaggtcactgtactgagatgtgagtgcaacagaatcatggggcagctttagcagaccatcatcagagacagctcagtggatgcagctgccttctgaggataaaagatttggattcaactcgggtgggtgaacttggacaaggtgcttaaccttaccaagactcaacttccctatctgtaataggggactcttaatacctaccctttatgcttggtgaagataaagtgagagtcatgagagaatgtcctcctctccttcttccattgacgtcaattcatgatcactgacctcatcgggcagttatctgactcaggtgtatcagatctagcgggtacagtgacctctgtgccactcatacgcccctcagttattaggtaccaggcttctggtgatgtgaagagtgtctgttgtagccactgtttctgaattgttaataaaataagacagctctggtctggaggagagttggggagaagcccaggagtctgcttaaaccccatgtccaggtgggcatccccgactgctcttcttccctccctaaaggttctggggattcagcctgttgcaacttcctcattaaccctttcacccatcatggtgctcatggtggggttctgtccctgagcctggctggggaatggaaagaagcctctcagcatgccaccactcccctcaccgttcccaaagacaagcactctggccatttgcataatgggggctttatcactaatcagagaaggtaaacacaccaggcaacaaaacagtaagcacatagaaaggcaaagttttcagaaatctacaaatccctgatgccgcaggccctcacacatggaggccctactggacttattctttctgtgccaggctgggtgaagaggacaggagctagcagctttgatccgctctatcatcacacttgcagtttcaggggacttccagaccaatcaaccactcactccatcccctttgcctaccccaacgctagcccctctgtcccagcattgtctggatctctactttgtctttgcctgtctctgaactgtgggctccttgaagggaagaagaaaggtattttcttctttcctgtgtcctcagagctatcatatgtttccaagaaggggatggggaagtttggcctcaggtgtgagg

SEQ ID NO: 62084 - DNA, 760 bp, Homo sapiens
gccctgatcttacaggtgattcagctccacttccacttctttttgggactcactggggattatttgtttctcttaatgggcaacaattagctaataccccaccactacaagcaaagtaaaaactgggcctgtgttaacagttctctttttgatggggtcattggtgtaacagataacttctagctgcattaggactggtagcacatcaacattgcctctctgttgtgaaaggaaaatagaaacggctaagtcaaccatatataaaggcttatatttgctcttcaaaagttttttttttttttcaacatatctttgctggggttgggccatagcttgatgggtatttgttgaatgactaattattgacttataggctaacagcctcctttgaagtaggctgagcaaacaaaccattaagtggaacatggtgtctaggttacacagctcactcatctgctaatcactggggcacactgctggttattattacctgagaccctgaaaggaagcactaaagaaatgaagacagaggaataccaggagagaaaggaggtccagttagacctaaaggtgggcaagaagaagaagaagaggtgagatcctcagtattgaacaagtacagtgcagcacataggtgatgtcttaataggggtcttggtcaataattgtttggttgcaagaaatagaagtattataaatttaactctcagtaataacaatgatttcgttggaaggctatgaggaatctcaccgacttcaa

SEQ ID NO: 62085 - DNA, 1095 bp, Homo sapiens
catgaacacgtggtggctgcattagcttatccacagggtcctcctactctaagcttctggtcccaatcagtaagcgactggcccctactagacccccacctactgggtatttgactgatggatggagtcaccatctgtctgcttgggcacctggagcccctgagctccagtccctgcaagcctttccctgcagagcccaaccgcagggtttggctgatagcctggaactgcctcaccatcatttttcactggccccaccccaaaggacagcctccccaagtaacctttttcaattgctccaacttccctggagtgttgacttagccagagagcacgctccctctctaacctcggtgtgtttgctcagcggaggagcgggcattaggtccgcttgactccatgagcacacaggttcctctgtctttacaggagcgtcccacggagggggtgcggcggggggcaggggagactgaggagggaggcgcagcttcctgttctgctgccggttatcacaggctgttctaatgctgctcaaacaatattgagaataaccccggctcaatagcaccagtgttaggctgcaaagtcaatattggctgagcaaacacagcaaataaggagttgctatttgcgtagctatgagtacttgtgtgctccggctgcctcgacagggcccttggaaatgaatgggaaggaggagggtgtctggaggtggagtgggttcctgagaggggataggccagggtttctcaccttggcattgttaacaattggggccggatggttctttgttgtgggggaatatcctctgcgttgtaggatgtttagcagcagccctggcctctgccctctagatgccagtagcacccgctcctgattgtccagagaaaccaaaatgtctcttgacattgccacatgtcccctgggaaaggacagagggcaaaacctccccctgctgagacacactaggctaggtgcaggacaaggctgaggagcagacgggctagaaaagagagaagggctgggaggggctcactatgcctctttgaccctcctgctttccagctggggctctccccagtctcttgtgagtgc

SEQ ID NO: 62086 - DNA, 705 bp, Homo sapiens
atcatgggtccagggaggaaagaagtcaggtcctggagatgtgcttggatggggggcagggaacgtgctctcaggcacataccacaggctttagagctcaagtcagagacattttctgcccagaaggtgcagtgttccctaagggctagcattggcagaaaaggactgctgagccaatgaccatggctgtcaggaactcagatcctaaggcaaagatggcggctcacagcaagaattggttgctccatgctgggcctgtgggctcttgaccaataggaatgggcagtggccagaggcctgcaggtgaatcctgttactaaagcagccagcggcatttcaggctcttcaaaggctgggtccatgtcaccacctcatcccagtgtttgtccaagtcccattgcatcagaatctatggcatgggaccaggaaccttcacctttaacaagcttccaaggtcctgcttagatgcactaaaatttcacgaccactgcctcctgtttctctgagttttcacataccacagctcatggttggacaacataaatatttcagcttataagtcacagggggtcttccctgttccttgagatccaggtaagattggctcagatccccaaattcctcctccatggagatccaaggaccctaagatttctgagcctctccagaagctacacattcaattggctctggctgcctcagagt

SEQ ID NO: 62087 - DNA, 673 bp, Homo sapiens
aatttaacagtggtttaattttgtttttgaaattaacaccattctgtgattctttgtcaggatgcccctaaaagctgaagcctctgaaactgtgcccagctaagcactagctccccagttctcctgtctgctatggagaggcccctcttcctctgccaaaaggaccatcctactgtaagacaaaaaaatgtagcctccagttccctggaccggctaccaccctgtggcctgggccaaggcaggatggtgacattccaggtccctagtgctcagaaggtgttggctacgtgccccagtaaataccgtatctaagggcagagtgcatttggcaccaatttttgaaaagggcctcccagggagccaggcttttctcttttctgatccaatgaaccactcctgaggccaagctcggtgcagcttcatgggtcctcatggtaggggctgcagagagggtcagagaacaagttctgactccaagtctatgtgatctcttgctggggtgtgcactacccccacttacaggcagtcagctaacaaacctttacctgagcactgactgtgcacctttcccaggtttctgcattggtgagacatagatgtaaggaaaacacccaagaacttggcacctgtcctagggaactaatgatcgtggtgagcacaagacattttccag

SEQ ID NO: 62088 - DNA, 892 bp, Homo sapiens
tggttcaccgtaaaagttctcccaacgtaaacccagcccctcccctgggaaagggacatgaagcaagcacatcccatccctcccagctgtcactgtgccatcatctgctagtaccctcttggggtctccccacaaagtggaagcagggattgggcctcccccatctctacaaaggctgcccaaccctgagaatgggctgcgtgcactctgcagagtcaaagcatgaacaggaaagctgttcgctcaacattttaaagaaatgtttattttttggagggtggcgcttgggggaggggaagttcctggaaatggaaagctggcttaacagaagccctcctaacaacagtaatgaccgctgatatcacccacccaactcgccatgtgtgcatccacaataaccccgcggagaaggcgcttgtcaacatctccacttttcagatggggaaactgatgcccagccattaagtgatttcactaaatgacttcctaccaagaagccaaattttgacatttcaagagagcttagagaaatatttttgaaagaaaaaccaccattaaggttaataattgacagcacttctgattagaacagctgttaaaacagcattggatccaactcaaacaagctctaaacatcagttccaaaaaaggaaaaaaaaaaaaaaaaatcaagtgtgacttcaacaattgggacaggtcacaaatcacaaactggaactcgatcgtatgttggaaaactccttttggcaacttggcgcaatccgttatcgataaggcggctgtagtttccagaggccgacctccatccttccctccatctcggtcccacaaagccactgcttttgagccaggtcttcagaagcgaatctgagaggtggtgggaggtgggaag

SEQ ID NO: 62089 - DNA, 6519 bp, Homo sapiens
gggagggcaagaccagattatgccctctctcagggccgccctgcggctgggcggtggtggggacctggcgctcatctccccagatccacgccgcgcccccggccggggtcggcgccccaaccgccccccaggcccgcggccgcatctcaccatcacataatggcgctgcatctccgtcttctcgtttgccagcttgtcgtactccactttgaggctgcgagggcaggaggagccggctcaggcgtggcgcctggacagcctcctctgaggccccgacccaagggcctctagagccacttttccactttcctgacacccccccgggggcgcccccattatcccacagcctggggacgcggggggatttgggtccccgccgtggggagggggatgtgaaacaattcgaaacttcccgcgagccaaaggacttatcacggcagcaggggagtaggaccctgacgctggctcccgacacccagaacccggagtgaacccgctcgccgcgacctagaccctcattcggggaccccacgggcggcgctgggagccgggctgctgcgggcagtaaagggttaaggcggcgcgctcggaaaggggaaacaaaaggcggaggcccgggctgccccgccgcccctaggtcgggagccccctccgtccccgcgggggatggcaggagccgcgcaggggacccacccctccccgccagccccggggcggcccccaccggccttacctgtgatactgagcttgcaggaactggaattcgtctttgatcctgtcacaagactcagccaccgtgaatttaaatcccggctgcccgggttgatggggagcctggagcccgcgaagacaagacaggggagggggcgggggcatgagaccgcgctcagagcggccccggcccctccccaacggcgcccaaccaaaagaggccaccctcagcccagaaccttcccagcaagtttctcagctctccgacggggcggagggggggcgccccatctctccccgtcggcagcggggctcccatgcctttcaccaagggcctccctctccccagtaaggcgggggcgggagacaagccgggtgagttgggagacttcagagcggggccggggaccgcgtgaacagctccccctggaacacaagcagccccccgcgccactcgcgcggaattaacctcctctctcaacggcgccccccggccgcatccccctttgtgtgagagcacacacacaaacacacacaccataaaggtagcaacaagcaaaatggaggtgccagataaactgcctcgtttaccctgccatgatagatgcttaaataaaccgagttgcaattactcaccggatgtctgccctgcggatacatggcagggaggggtcgtgattccgagagcgtggaagcgccgagagcccgggccggggaggtgcgggggaggggggagccgagcccgagcggggggcggccgggaaaccgagagctcgcccccggcccccccagctcgttctcgcagcgaaatcccagagtcgggcgcccgccccaagtggagacaaagagccgcggagcaggcggcaaagtcgtcggcgggcgccggggccgggcggcgggcgcgggctttgtgcgcctagggctcggcgggcagcggccggccgccttccctgggctgcgtcgagcgcgtcaatgcctgggactgcgcggacatcgtcggctccccagcaggtccggcgcggggtcccgaggccgggggcccctcctggggcgagctcgggccccctccgggtcactcagcgggtcgcgcctgtaggggggcgcgccggggcagccccaagcatccggggcgcgcgggtccgatcctagaggcgtccgggcctggggctcgcggcgagaagaggaaggaggcgggctacgaggtggtggcttggggccgcaggagcgccggagggtgagggcgggagcccggcgcgggcgcttcgacgccccccctcggagaggagagcctgctgttccgtctgctactgccgctgccgccgccgccgccgccgctgcaagcccttcccagggccggggaggaactccgggctcagtaggtgcaaatcaaacgccctggcatcctaagtccagcgggcacgggaagcctccgcaaagggttctcgctgctcccagcttgagcaccgcgtccccaccgaggagcgctcagcgccaccgccgctgccgcgtcggagcgcacaggcaggagagcgctggaggggagacgcagcccgagaccggggagctctacggcttccttccttcccctcggcccggctctcctctccgcgccccggcaaacccccaaaacacacacacccaacacacacacacgcgcgcacgcacacacacacacaccaaaaaaaaaagtgccccggacctacggataccacacacagacaggcgaaggggacgagcacgaggtctgaactgccgcgagagcagttccaaatagggactgaaaagtaacaaaataatgtggcagcttcgtccggcgctggccaatgggagcgcggggcccccacgtggggctgcgggactcggcctacgactgggtgccgctgggcgcgacgtcacaatgccctcttgtgtctaaaactatgcatgaaaagtagcaatcaggccctacccgctggtgactttcgcatgggagtgaaaaacagcgctcctcagatcaggaattaaccgaaagacatataataaatagatatatattatagtcctgggctgctcgagtttttttcctccttttttttcccacggtctactagcaaataattatttagcgggaggaggaaagagggaagacagaggaataacaacaaaagaaaataagacaagctgtacaatcttcaaaacctgtggctggtagtaatgtatcagtttattctgcagcggcggcgaacgattcctccctctaatctcattaggtctgcaaagcagcccaattagatactataaaacaaacaatcactttgtcactttaatgttttcacttcaaaagatttaggactgataaaacggtggctcctaaagttgcctccgacctttaaaaatttgctcggaactcaggatgtccccttttcttcaccccttcttctgcccgcctcccccacattagcccccagctctcctttgttcactcgcccttcttttcagaaagccaaataaacagctcctttgatgtgcggcggctgcctgcgaggagaagtctgagggactctggctaggcgggcagcgcagatggaagggcccggctgcccgtggacaacaggctcagccacggctggccccattcggggcgccttccccgtgggcacaacttcaccctcgacgcagcctcgccgcgcgggctcctcactgcatccccaggctgagggggttggggatggggtcgggaccctgctcggccgaggcccgggaactccgagttcccacctggtttgctcagcctgctcccggcagtgccacggcgttggcggaagcctgtaggtgtctcggtcgctagcctggacactccgagggacgcggacgctcccccgctcgctcgccccggccccgggccccccggaccccccgcttggtcgcacaggccactcgactccggggccagcttgcccgcaaaccgatggcctcgccctcccgcgctcggggttacggcggggcagacgagcaagcagggagtggacctcaaagcgcgcaccgcccggtggacggccaaggcgggacccccggggccctccccggcaagtccgcgagcccgcgcgcgagccggccgcgcgtccccggatctatattttcccctcattaggagccggaggttcgcttttgcatcttaatgaggagctgagagctagcgggcgctcggaggccggagcgcggggagttacacgtgagcacccgcctcagaactgaacctccccgcgcccgctccggccgccagccccgaaccgcgctcccctcttcatttatttattctcctaaataaaaacataaatcgtgtttcggcgcgcaccgaagacgggggagggagaagcccggctcgacagatgcgagcatctggccgcagcattcattagaaacaaaatggctcctctttggcgcttcctttccccctcccccttctctgccctcccccttacgtcacgggtgggcgcacccgcttcttactcgccccgcccatttctcgctccagccccacgtgggggacgccgaccacgcctccgagcaaggtgcgagtcaccaatcacggaccgccgaaggggctcttcgttgctgattggcggagctgctgggccctgtcagtccgcggccagagctgtcagtcaaaaccacgcggggtgggggagcgctgacaaatgccgaggcttctgagcctcccgcttgcaaatagtgcttggaatggctgcttaattagctttgaatggcttttccttccagctcaaacaatctgtcactaccatgtggtataaaggagccatgcataaaaaagtaagcagaggctaaatatcaatttgattttgtgtatcaaaggaatattttatttttctccctagtaatgaaacgtatcaatttaaataataaaaggtaaaaacacacacacaaacaaaaaaaaaaaaaaaaaaaaagaagaaggaaaagaaaagaggaaaaaaaagaaagaaaaagaaaacccaaactctacggtgtggcgactcctgcgcacgcctgaaacaggtcacttccacagcccacgttctggaggaagcctgaagactttcccctcccccctttaaacttgcatttagtgttttgttgtcgtcgtcctccagaagtctagaaggagtggtggaggaggggtggcctgtgaaaggggacgtgggggcgggggagggggcgaactttaaagggagctctttgaagctgctactcaaagtagagggggttttaagaccccgtaaactgggggtcctacagcaggtctcgatttgggagctgagaggagagggggatgagagcgggtgtgcgtctcgctcggatttattaaacacaatgccttcaagatgccagggacgcggcgcctcgccgggcctccctctcagtctccctctggactggctccgacggcgcccgccagcaggcggccgagaagccgcggggcccccaggtcgggtcttccgaagattgtgtacagaaaaggacagcagctctgtctctcgcccgggtgtccctcctgccccgacgtccacgccccccggtgaccacacgagccagagcgctccagcagggcagacccacgtcgagttcacctgtgagccccagcgccagggccgagcccggcacgctggaggagttcgcggctgcgtgtccccgacgcggttttgcagagcgccgcctcctccgcagagccgggcggtagaaccacgctacgcagtcaggaagaacagcgcttgagcgctcactaggtacaaggcagggcactgctacccaggcagcgctctcctctcccttacctcactcccgagggaagcagtttggctggggaccccattttatagagcaaaaaagagaggctgagaaagctcaatcatttgccccaagctgggcagagggtcaggattcgaatccagggcagccagtttaatggccaacctcagcgacccctttgcttacgcaagctggatacgtgcaagtttttgctgaagaaaaggcattcattcattcattcatgcccagccctttctgagagcctggctttgggagaacaggcctctcctgcctgtagctcccactcactcctcacccagcgtcactccccgctctcaccggctgcctgaaccctgagcaggaagggggcagggaggtaaggaaccaggccaacatccctttaagcttaccaccgctatctccccgcacccccccaccccgccccaacatgccaccccacaaattaggaaaaacaaggagaaaaatacatgtcttttatgctggagaaagagaaaagaaaataaaaaacatgtatacaacaccccgtccaaaggcttgacaattattttaaagaaggaggggagtcgagagaaagagttcaaacgtctctgtctccagttctaattggaaacgtttcaactgtttatgttacaagaagtgtcagggtcatttgctaccggagagctgacttttcattggctgcttaattgagtacctcggagtccaccccacgtgggagaggaattcctggcacattaaaaaaaaaaaaaaaaaaaaaagtcacccgggtgagacagaaagcccggcctggatttacagagcagcggctccccagcccccagccccttatttggggtgcaaggtggctggtgagcaactgtctgccagtccgaggagccacttctctgagtcttttaaaatattcttcaagcactttagctgagttagtatatgctttacccccttaggaattaaagggtatggctcaggccagccaccaggctgtggtcacctatttgagga

SEQ ID NO: 62090 - DNA, 1355 bp, Homo sapiens
tctcatctttcagggctcagcttaaacctccttaaagaagtcttcttggaacaatttcatctttacttgggatcatagaaccttgttaatttctttcacagccctgaccacaagttgtgatatgtattcatttatctttctctagcttgtctatttactggaacgttggctttagaaggccagggaacatgtttgtcttccccactcttacatccttggggcctggccaattgctgttgaaggggcgtttcttggctacacaaatgattgctcatccatgtgcaaatctgtgctctgccctgcccagttgggtcaccggagacagctgccttgctctgtgtctcggcattctcatctgcagctgggtataacggtacccgcctctctggatttcaagcctgttgtaaggatcaaatgtgatgccaggtgggagatgtggaccccagccatgtgtgttggggtgctggggcttattagtcccaatggctgtgcaaatggcatctgccctccctgtctccctgctgtacgccgtgaaggggttccaggaactccaggtggcagcaaagaggtgaagagaataataattgatgaatgaaaataatgataaccaagtacataataataataaaagtaataataactgactttattagatactgtatcagatgctgttctcagcttgtacaggaattaactcatttaactttagaacagcctggtgaggtaggtcctctcatggtttctattttataggtgaaaaaactgaggccagagagattaagtaactcatccaagaagtggaggtgggatcaagttttactttttgatgggactttccctcaaatcccttcaatctaataactttcctcacttagtttcatgactgtttattggattgctaaaaccaagagtttatgtctgagtgtgactttgcccctttggcaggccctggaggcccagcagtgagtgggactgatccctgcccccagggaacccattaatggggtgcgtgcgtgtgtgtgtgtgtgtgtgtgtgtgtgtgtgtgtgtgtgttattctctgctgcccagccagtcaggaaactccctgaggacacagggaggactgttccttctctgctgtgttactctaggacagaatgaacacttagagtcctagaactccagactatcagcaccagagtcagctgctcatcagcaaagttactgatcccttgcttggtactgggcttggtacttcatgccaggaacacagtgggagcgaagccaagcccccatcctcaagggacatccatatttgggggtggggctggaactccgtgggtcaattcttgggtcaacagagtccagagaggg

SEQ ID NO: 62091 - DNA, 1442 bp, Homo sapiens
cctggtggcccagtctcctttctgagccttctggacttgccaggtacaatttactgtcccttttgctgggctcccatagattttggtgcctatctctattgtgtttcttattctattgggtcaaaggcattttgtaaaaagcgtccactctctccacctccccacccccacacccagcccagtgtctaatttgcagtaggagatcaataagtgtttgttgaatgaaaaaaaatgtactagcaagagtacaggaccactccttaggcatattaaatgggaacacaattaccaattgaattcgtttccttcaaaagagccatgtatcctggaagatccattccagacgtccagatggcaagactggggagagctgggagttattcctattgaaaccgtttcctccagaaggtctagagttcaaaagggaggcatttgccacaaacaattgggccagtgtgagacgatgtgggtggcacgttgccaaggtcttggtgggactttgagcagttaccaatgcaaataggagagaagacttatccccaggggcaactgtggtcacccagaaatggagcctttggcaacaaggagaaaaaaccaggtcagccactgcacggggattttcctagggctgtggagtggcctctggacttggagtcaggaggcctagcttctcagctgggatctgggttttagatcaagggttaagatgatctaatgccaaccttattttccagaggcatttttctgagccaagaattaaatgcagggcacatcaaaggaattttcctgatttgtgaattgtttctgccaactcaagcttcagaataaagaccacttttctcattctttgagatttatctattgaatgctggactattctgaaaaactctatgccagtgaagctcatctcccagagctgtccctgtgcatcctactgtctgacctcactgcctttgctcacgcccttcctcctttcagagagtcatctcctgatattgcagcgtcatccagactttgttcaatgttaacttttctttgaaagctttctctgatcaccacaatttatagtgatccagagagagagagagagccaataagcatgtagaagatatggagcacctattactatgtagtattggctcagcacttaccatgtgccaggcatcgtgctaagctctctacaagtgtgatcacactcagctctcacaacaacccttagaagatcattcttagacaattttaaaaatccccatttgtgggctgggtgtggtgattcacacctgtaatcccagcactttgagagacacaagtgggaggatcacttgagcccaggagtttgagaacagcctgggcaacataaagagaccccatctctcctaaaaaataaaaaaaaattagctgggcatggtgatgtgtgtctgcagtcccagctgctctggagg

SEQ ID NO: 62092 - DNA, 1508 bp, Homo sapiens
ccaaaccctcctagaaacccacggagatctctatcaagtcaaccctgcctccccttctgacttcctctacctctgctgttgggctaagacagctcctatgagatcagtgaggctcaaataaatgtcattcctccctgcccagctcttggcaggacgagaagtttacatactccctgggtggagaggtgggggtgggtgccagagcagaggaggggctggaagaagcactgagttccagtatttctgtagctaggtcttcaggagatgactcttcacaccagcctttggtcccagctctctgtgccctgggctcacctggacatacctctgcatgccttcgtctgctcttcccagccagaggtggactctgtgagagggagctccctcttccacctccagtggctcctgtaggcccagcccaagagcagagggccactgtgttcccccactagagtctgattctttcgcccacattacctccagcctctctgaatacaggccttgagagacctgagcatgtatgggcttccgaatgcaaacaaggagtgaagtatttcaaaacctggtatttcaccagaaacggcccttcagaggggcccaaaatacacagctcggtgtttgcacttcaaagagtgggaggcccagtcaaggctccaggcagccaggtcttccctgtgtcaacaaggggaaggaaagcagcttggccctgtctggggcatcctgagaaaggggttttccgactgcagctggagaagaaggcagggcagggaagggctgccaatccccggggtgcttcctgcagacggcgtggagacccaggggctttcttgtgagctcacagaggaaccttttggggaattccccaatgataatgacaatagttcccggttactgcctgtgatatgctaagctctttccatggtttttcccattcatcctgatgaggccggcagtaccaatcttcccattttgtagatttgaaaactgaggctcagagaggtttggatgacatgtaggttaatggcagaactggatttcagtgcaggccagcctgctgccaaggcctgtgctcctgatcagcatgtaaagctcatcccctctccctctaaggtcactgagccccatcagggtctaggcgctgaagatactgagagaaacaaagtacaacccctgtcttcactgagctgccagttaaaaggagaacagcctcggagaccagtggccaccatgtgaaagtgaaagtgctttgtcagaggctttctgcacagtcgtgggagtgggaaaaggaagcacttgcctcttcaggggccctatggaagagggggccagcaagctaaatctggagagaagagatagcatttgccaggtgggcagaagggacagcacctgtggccagccagaccctgcaagctgtgtttgttgtggtcactgagtgggcctgagtgccgcaaagtgaaccactcactctgaggtctaggtggggctgtggaacttggaggattttaagg

SEQ ID NO: 62093 - DNA, 2260 bp, Homo sapiens
cacggcagccgccatcttcgccagctgagctgaagggttgttggcctctcagggtcagggctcctgttccccccacccagcagccttctaggggagcttgggtgagagtgccttcctccaggcagcgccccccttgctgaagcagcctctccactcccccccagccccccacctgcagatgctgcagacctctgaccatttttcctgtggttccaatgcaggctgctttgtcattggtgtcccttatctaccaccttacggagctaagtggaagcttgagggaccccctgaccacccctgtctcatgcctcagatggaaatggggcccagagagatgaagggccccagccccctcagccaaggccccacagagagtctgagggacaggaccctgcttatggcaccaagaagtcccacttcctcctgctacaccgcacgtcctaccccggcccccacagggcctcccactgaccgtggctcctcatgaaatgcttgatttctgtgcattccagaaggcatttctctttcctatgcatgagtttcttaacctctccttgggctctaagctggcccagagtctctggcttcctgtgaggtcaagtacacaggtgctcaggggacaccctgtgccctgtgactgtgtcctggactgccctggctcagggccaagggcttctatgtaaaactgggagcagatggggatcagggaggatgcagtctcttcattctgtctttgtcaccgtgcaacacacaggaagttccagtccctctctggacttcgactttctcatctgcaaaatggacagaggttaaatgaattacctgctcagggtctaccacaatctgtaagataaaggcaaagatattgaaccagagtgggggtctctaagatcccctgaggaccctcagcattactgcaactaggaggcatttgataagaacaagctagtgaatgaaggaagaaaaagtgtaaatagctaaagcaaatataataggggccctaaaccaaataatctcaaagctctgggcaaaggagagttaatctctccaacccttgttttccttatctgcaaaatagagataataaatatttaccaccagggccgtcttgaggactaagtagaagaatagagggaaagctcagagcccagaggttggagtatattaagtgcccccagggtaagggggctgtcctgctcatcacctcatgacttgtctgtgggagattaacagaacctagtgcctggtatacagaagatgcttaataaatgcccattgcctacagtgagagtcatgtgccagggctgactcactcagaagtctgcatgactcagtggaaggtcaggcctgaaggtcatggggtgaataaaggaggagatgcagccagtccagagccccatgaggtcctcatccagacactgggaagagggtgtatttctaagagccaccatgaagtcgaaagagggcaaggtttgtcctcagactgacctgggttcaagttgtagctttgccattcacaagctgtgtgatctcgggcaagttacttagcttctctgagtgtcagttttcccctctgtaaaatgagggtggataatgcccacctctcaggattcctgggaagattatatgagggtttgtgtgcacttccttgcccttctctgcttctctgctcacaaaattgagaataaggggccattggcacgttgtaccgggaagactccctggaggagactctgccttggctctgaggaggccaggggaggcagagtgctggactgcaaagctccttctcacgagggcatctctgtgtcactgtgcagtgggacagacggctaccccatcaggctgcctctaaaaataacctcccctcttgctgacagcactggcgcttgctcagggcttcctcttggcagtgcccctgccctggcccggttctgtttatggctctgcgtggggtttctgtagagcagctccagcagaaccagagacctgggaaaagggggcagtgcttctcggaggagggagggtataggctgaggacgaactggaccaagcccaagggtcccctgctaatgcaatctgaatctcacacctggtatcacgggggcttgaaggaagaggctccttggtggcagggtggtccatagggcctgccagcaacctctgagcctgcaggctcctccttcctggcatggccatccagccaaggaaaagccctcctgagcgacgcagcgaggcaggtggggggcggagaggtggc

SEQ ID NO: 62094 - DNA, 1533 bp, Homo sapiens
tcagtttggacacttgctagttgtaaacttgagcttttcacttaacctgtctgaacctcaatctccttctctgcaaaatggggacaatcctaatcccccttgtcaagttttatgacgactaagtgagaaaagggcatgaagtgctttgcccagtacctgagacataagcgcccattgtgattatattaatagaccctgctcttactcgtccatgacctcagggcagaaaaggactttgaggaattcagagaggcctggtgccctggccagctgacagcagagcctgacaattagctaggtctcccgactccccgtccagtgttctttctgccacacaagctgccactcttagactgagcacaaaagacaaatcttccagtctggggatggcagatcgattttctcacccttgctggctgtgattgattggtggtgctgccctgagttctgcagtgagaaaagctgtgaggtctggccccagctcagtgggaaggagggccaggatcgatcggtgatgtttgccctgggtgcagtcgcggggcgggggcacacacgcagtttgcttgccattcctgctctggtcttagctctgacctcacccctgtggctgtactaggtgctgggtgaacaacgtgctccaggcctttcatgtcacagaagaggacgcaaggtccggactggtcaggagattggcctcatggtcacacagcaggatgtttcctggtcagtgactttcccatgtttccattcttcccagatccctggggagtctggacaagtgtgtgtctggctcctgtggcctgagtttccaattcccaactaagaaaggtagagattccagggctttctgctctggctcaggcctcaggcagggggtccttaaagcaccagcatggggaaaaaggcttctcggctctttgtttggattcagacagggcattttcaagtttcttgagatcacagtggaggccagccaattctattttcactcgaggctcaatcatctctttccctggtcttctgcacacacgggctggcgtgaactcagatgcggcaggcccacaattaggagagagggaggagtagttactcaggcgctcagggccagcaggtttggagcaccctttccgaggcaaagacatgacacaaatcttcccactgcccagccaattcctcctcgtgtatctgcctggggtgacactcagacaaggtctgcactcaggcccagccattaaggaattcattaatcagaatcctgtttacagctctctggcaagcgatcataatttactggctcaagccagaccctgggccttcctgcaaactgctgtgacatttggtaaaaatatcagctggggactgggccaggccgggaggtgtgtatgcaattcatgctgacttgtgaaacagaggtgctgtgtgggtcacaggcactagggaaggctggaggacaggctgtcactggttccaggtgtcaccttggacaagtcacttccctgtcatctcacatctgtattgcaagaggtttggagt

SEQ ID NO: 62095 - DNA, 3231 bp, Homo sapiens
tgatgagcgtgaaatgagaccaataaaagattgcacaaatcttgttggactcacacataggatggaaagcaatatccatgtctgaaacatgttggagcaggccttccaccaagccctttagaaaaagggttgtatgtgttgtgtagagcaaacctggctgacaggcattagcatgcccattttacagatggtgaaacgggatctgagaatttacgagccttgctcaagcttccacagctatgccaatgccgccagcccgccatccctggggttggagccagggcatgtggggtgatgtttttcttggtcgtgagcagatgggctagtgccctacctgcacagtctcaccgtagctcaccctcccatacatcctgttaaaggtccagccaagatccacttccctccctcgttttcttgcctgggttttgcctagttccttctcttcatgcaccacaggacgcactctgagcaggcggggaggcccgtgagcctggcaaacaagctatttgctctgggaggtgggctgcttctgaggacagcacagggtttctgggacagtgctgaggaagtcacccacagcctggctccctggctgagtggacggttgaggtggccagaggaacttagaagtggccctccagtctcagggggaaaggctggagggctggaaagaaagcaaactctgtgattgagctgtgggaagcctggcctgagccccagggccttgctgatggcaggctgactgctggggcacccccagacaggccaacggagccaagccgacagccgggagagaggcctgctctcccacacacgtgggaatgagggctgctgagtcactgcccagctggacgcagctcccactgaaggctggaaggaaggcaggagagtattcccagccaggctggtggcctcaggacaccctgaagttagctgagccctctaaatgggccatggtagcccgggctgcccctcgccctgctgaactgatgcatatttgcctcttgccggcttctggggagctccaaccaggcaaacagcccttcagacaggacattggattagaggtcagatccctgaactttggaaaaaaacaatcccagggcaagtcacttcatctcccatgtcctcacctttcctctcagttacatggtgaggccaacagggaatacgggaaaggtcttcacaggttgccctgcatataataggattcaggcaggctaatggctctgctccaagccttcccctgaggaagggacagcagcccggccccctcctcccctggcctgccactgttccccccttagccagtgtcatccctgccgtgtgcccttcagagcaaccaggcccctcccagggagagttcctggggaggagctggggtcacctcccgacccgggcctggcctggaatccacctttcacctcgggcagtgggcagaggagggcactggccctgcaggcggaggcttctctcccctccagcaccagcagcacccgctgggaggcccaggtgttgtgcaacttgagaagcagctaagccagtggaccactctgccaggacaagaatcaacaggaaacctccccgcgcatctcgttcacattccaggggcaccgagtccagcccagagacaccgtaacaagacaccactctggctggcgttgcctgtgacacaaaccaatcttttatctgccatctaagcctcccaatttgcatgccagtgacgtaccttccaccgcagggtgctttccaaaccttctagtgaggctgtgcctcctgagctctgagcaaacagggagtaagcgatcctttagacacaggaaggctttgctaatgatcgtcaggcatgagcccttcaaggaagggacccgtctgtaggccccagcagaggacctgacaccagtgggtgcctagggagcacttagtggcagttcactgagcaagccacatctctggggattaaagaaaagaaggtgaagcagaatctggttaaatgggcccatgtgtgcttggaggaatcccccccacctctctctctctatcacatatgcacgggccctccccctccacacacgcatcactgagttatttctcatgattggagcatgatgctgtggcaatacggaattcaagccttttatctctcaggcccaggatgggaaaaggactcactcaaagtcacccagcagattagtgacagcacttttgatgtttattattttgtattttcccatgtcctgccatttcatcgcacaattgtcctccttctccatcccactcccagccaagtccctgcatctgctgcactcgccactagttcccagtactgtgtttgaaatgcttagggaaaggggattgctggcagagggaagagcacgtgcaagctccctgaggcagcagggagcaaatgaggtgagcaccccactcccgccagtgagcaggactcagagaagtgggggtcagtgggggtaggtgggagtcggaataagatccgacttcataaagtttgtttctggatgtggagctagcagcccatggggccaacttgctgccttcaggcaggtgagtctccctgcttgtgactaaggaagcttctgtagtcctgaggcacggaggatctgggcatgagcctgctgggatgtgggaaaggggcgtgtgagagaacccacatctcctgcttcctaggtcagagcaccaaggaaggcttcctggaaggggcagactttgtgtggggcccagaggagagctgtgtgagcaccctggacaagctctacggatctgggtcaggagtgatgcaggaggtcacaccacaggcgtcttcctggactgagcacagctgcccccaggtgtgcctcaggcactgggcccagcctgacgtgtctcaacagggtggggttggccagaggctggcatgggtgtgtgttaggggaaaccagcggaggaaaggtgagccagggctccctgacgtgacctgagagataaccctgaggtcaacctgtaagggccccggggaggaaaggtgaagggagcctggcgcccttgctggttgtgaaatgatgacatctgctgtgggtctggaacaaacacatagtttgccacagaccctgatccttggggaccctgcggtcagtgcaattggagttcaatacacacacgcacacacacacacacacatgcacgcattgcgtacctactgtggccaggcattgttagaagtggtggagcctctag

SEQ ID NO: 62096 - DNA, 1208 bp, Homo sapiens
ttcatgtatcaggaagcctcccttttcgcaaatgttaaggaacacagctcccttgggcataaagtcaaggaggtttctttttatagcagtctcagtcgcagctctggctttgcttatgaactcgagttagggaaattagaattaaaattccaccccgacgagaacacggatttgtcctcctgggtcctcctaccctcagtgcctccaccgacacatatgaaggctcacagaatgccttctccacctacatggcagcgcctacgtcagtgactcctatcaagggtgggccctactgcaaaagaggtatgacaatgggcacatggccatggactcccctaatcttcttgtgtacccattacagagaagcagtggcccatgacaatggtgaaatggcctgtgaaaggctgagctcaggtgctagcttggggaccaccccctgtgggactggaggactgtctttagcatgttgtctatgcacctaaccaacaggcaataaatggtgctgtcttcctactgctggaatccatgggtctgggaagccagggctgaacgtccattccctgttgccatcactcctagtgaccctctagcaggatttacacttgccacaaaccttaggctctgtgaggttaggggtcatggtccacagacagccaatgtttctgttgtggggctagtatttcctgcaggtgacactgtaaaggtcccactggatttgaagctgtgacagctacctgtcactttagttttctagtggactagcagtgatgaaaggagttaccatcctggcaggataattcaccagattattgtgagggccaagtcctgttgcttttcacagcagggattctctgcgagtctcttggtgttcttttgcctgatgaaagggacttgtgagtcagcaattgcagcaacaacagctcaataagaacaggacaagccaagggctcagacctcttcgggatgaaggtctgagtcatcctgctcagtaagcagcacagagcagacaaattgccggttgagggtgagggacatggagactggggaatggaggggagatctgatgagtacccataagggcctcaggacaggtgcaggcactgtgtcttgttttattaacctcttgccttaggtcatctcagagatcccaaggaaactctgtagtcattggacttgtacccacttcttagagaaagcagggacattca

SEQ ID NO: 62097 - DNA, 442 bp, Homo sapiens
ggctggcctggaatattagctgggttaattgtcccttcaaatgaacaaccagtttaatcaaggacttaatgccctcagctattcaattatgcctgcctctggacatgcagattccattaccacccaagcaccttgcatggagggagaatgagattgtctggtgcgtgtgtgtgtgcatgtgtgtgtgtgtgttgtcattgcccacaggcatttgttaagagcaaactgtgggcctagagcccaagctggcaggcagcacctgaccttggctgttggctgcatgacctcatcaggtagctctgcttggttctgctcaagagggttttgccaccacatctcacttgcaaatagtgtgtgtgtgtgtgtgtgtgtgtgtatgcagccattccaggactgacatgtagctctattcatgaacatgcacattacacattactgagtt

SEQ ID NO: 62098 - DNA, 757 bp, Homo sapiens
ttccatgacaaccacctcataaactgaaggccattatccttctcctcttttccagttaagggtcttctgctaccttaataaggtctctgacaggctcccccagaccccttgacagctcagccgttctcctctctacagtcttcaaaccttgatgtgctttttaatctatgacacctagaaataaataaaaatcttggaaagtggccgatgagcacagacaaaaataaggctgtcactcttccggctctggacgcgttggctctgcccagtccgtggaagaggagagacttccctgtttagcggctgcatcacactctggcttctattgatctcgtggccaacagactccccccggtcttttgcacaagaccggctgcaagccagcctcccacatcctgtacttaggcaatcgatttttctgaacctgaaatgcaaagcgcacactcactcatccctggtaggctgtatcctgctagaatcagccgccggcccaggcctgccaggatcatgtgaatcctaaattggccagcacagcacagggaggtggagaaatttgcccttaggctggtctgccacaaactgactgtgtgactttgaacaagttctgtgtctttgtagagtgggaaggggtgatctctaaggtctcgcccagcctgacactctgaaacacttgaatgatcactctctctcccagctttgtgatcaacctgccctctgtgtctgcatctaccaggctgctgatccaagtgtgctgatg

SEQ ID NO: 62099 - DNA, 861 bp, Homo sapiens
ttttaacaggagaagctgagatattttgaaagccacccctgaggcgagaaagttgtgcagaaggcactaattgtcaacgctccccaaggacagcctgcctgttccaaggcaggaggaaagggccgagctgtcagcgcccgattcctgggggagtctgcctcgcccgcgctcagccagccaggccagcttcctgcccggcatggaggagataaaacacaggaacacagacgatcttacataaccgaagcgggactgaacattttcagcaaattacctctgttatgagctctgccataaaatcgcctcacaagtgaatttagtttttcttccctccgtgcccaatcaattagcacatgagtaataccaagcccattaggacaaactgatgccgggggagttatgtcatctgctatagaaatgattgcttaatataccagttggctccgaggagctcttagccacacacaatcttgccataatcgatagcaacagtcaaacaacgctgtttccaacgagaacactgctgggcagagcctgagccagagccagtgtcggggacacagaagctgagtgggccccaaataccagctccctccctccaccttcctcctccaacctcccctccctgctgctgcccttcaaagccaacaggagaagcctgatggtggctcagagaaatagaaccccggacaggtggggtgggggcagcgacggtgagagggagtgtcactgtgggggcaggggagtgtgcagagaaagcctggaagacagggcttgccagagcctgggagttgtgggaattcctatccaagagaaaaaggaaaggcatggaactctttctgcctccatatttcctagcaa

SEQ ID NO: 62100 - DNA, 2184 bp, Homo sapiens
aaatccagatgggtgtctgcccctggccaaatacacatgatatattcttattaataaagccagactagtgtcctcaaattattcaaggaatacatttgcccacccacagcagtgggggaagcgattacttattaataaagcaatagctaaatctaattatatccccatcagaggcagctggtaataaaaccaggctggtcttccagagctcggtgaccctgctgacctcaaatcaaagtttaaaccatcagtcagcttccaatgcattcccagcacacctaccaattacgagcgccctggtgccgctgtctgccaggggtcagaggtcaccgcctgcactcgatagctgggagctggaatggggctttagaaatctcattatcctgttaaccatacatttatctgacaagataaaagagactaggtgaccaagctatcattaaagattaatagaaagtataaaaaattcagctgcaaccagcattgctgtttagagcttgtgatcggcatgacagggttattaatcaggaaaccaaaaagatttcggtctttgctcttgatattttctatttttatttttagttttgttttttccctccctctgtctgaagtcattacctcgtctcctatcaccccaaactggaggtcaaaggagactcctgctaattggctcttccggcttcaaatcataacccattgggctaattagaaaattgccaggactcaaggtgacatgggatgcagcaggggacgctggtggactgggacagcggtgccagctgcttattgggctgccgcccttctcgcgtgccaggcctgttaatcagcaggggaaatcaatacattttaaatttaattcagtcctgtaaggcacacccaagccccaagatgatttctcctcattcgtgattccatttcagttttacatgaaagattttcaacccacgcctacccaggaatcagagggcaagctctgtttttaaggcttagggattctttttattctttctagttctctcttatcgcccacccacccctgccgaccagcgtcctccccacggcatcctccttcgcctttttgatcataaatcaatgtccttttcctctgctgccctggaagatgcaagcttagatgacaactcagctgttccccttccgcccccagggccaaggcaaagagaagccaggaagatgagccagtgagggaaggtagagggtttccagagcaaagaggcagctttagtcaacccgtggaagggacttgcagacccggacgatccttagaaggctgatcaggaagcgacattgaccaggggtgcctggcattcttccctgccctgggatcagcgtggcctcaggagtgcacccaacaatgccatcaggctgccaggaccctctactgccagctgggtgaccttaggaaagtcagctggcctctctgagcctgcttccctgggtggacaatggggaaaacccctccttcttggggttgtttgaagatcaaatggaattcttgagcacaatctcttccattgtaatggcttcctggcttgctcctacttcctccctgctccattaaagcttaatctgataaatcaattaaggataaaatactattggctgacctctggttagttgccagagttcaaggacaacaatttattcctctgtgcatcttcctacccccaaccacccccccgctccacccgcgcgcgcgcgcgcgcacacacacacacacacacacacacacacacacacacacagtgaattgtctaatggcctcttcttccagataggagacactctttgtgcctccataaatgtagcctggcaccagtaagtcctgtataagtacttagtagataaaggaatgaaagcctggccagagggaaaatccaaacctcctgctaggaggaaagccaaaggtcaaagttgggtaaataggggaaaggaaccagccccagtagccaaggtaggtgaaacagaaagaaaaatcagtagagaagagacaggttgggaagaggagtacaaggtaggtcaggagagttgtccaggtcatgcaatgaacaaggtcttctgggctttgaaagacacatgactgtagctctgtggcttaaggctggacttcatggtttctaggaccagactgctctggagaccatggaaattgcactgcccagctgc

SEQ ID NO: 62101 - DNA, 810 bp, Homo sapiens
gaagaggaggtcagaggtcatttgcacttccctgccagccgggtggatggaatccgcctatttccacaggggacctggtttgaggatttgaggaaagttccgatcaccagcatttggcctctttctgtttttgtctcacttccaggacctgatgcaggaagcacactatgacatggtcacatgcagacacacgtggtgcaggatggactaacctcaagctccactgaaaccctggctcccggccgaccagccgtggccagtgaccacgtgcagtctccgatcttcatttgtgcgtcgatgtggggaaattcaaagtcagcatgtgaaagtcagctctagggcatcaggatttaatgcgcaaaattttgcaaaatttcgcaaaatatttcacacgagaggggggtttgagttgacgctacccacgtgggtggcggcctgggttggtggtgccccctggtggctggcaggagcaaacgcaaatctcctctgtagagaagtgttttgtctgatttatcaaagagaacaaacaaacaaaacactcaaaaggccggtgcggtggctcacgcctgtaatcccagcactttgggaggccgaggcgggcggatcacgaggtcaggagttcaagaccaagcaatgagtcaccattagcaagagtgcagatgcagagccaacaagcaacagattgaaaccaggatgtcttaatgtaaatgctataaacatttcggaccaaaatcctttactgtggggatgcttagcagcagccctggtttctacccacaagatgccagtagcatctccactgccacctcc

SEQ ID NO: 62102 - DNA, 1682 bp, Homo sapiens
agattccctgcaaataagtgttgccccaacttaaaacaatttgaaaggcatgagcatggaaaccacagctctaacccacccctcccggcttgaacaacaaagggagaaactcagcccccatgatggtaactggtaagcccacctcatgggaagcactagcagtggcacctgagcggcaaccaggatccttaactgcaagtgagcgctctctccccatctccagcacactctgggtgacctcttgggctctgcctgtttggggaaggcaggaaatgaggctcagatgggccacgctccccagccacagtggaaagtcctctctgaagccaagatgtttccttgcaaagacaagagagagcgagagagaatgagcatgtttagtgacttgagagggagggaggggtggccaacttcagagatgattatcattcagggacttgttggctggaggaaggagcgagcttctttttataggagctccagttcctcgttttgttctcttcgggttattctccaaagaaagccggctcttgagtcagctggcaggagagcgaggcgaatgcgctggtgctggccgcaatggccccggttcaacgctcgctccagctggtcacgtcctcaccggggcggccggcggcctgcctgcccacgctctgccaggagcccaggtcagcccttgcctcgccggggccggagcccgtccaaaatcaacaagtcttttgtgcctctcctttggacgctgtataattacagcaaacatgtattggcggtgcacagcgattgtgaggcaattgttgaaggatctcaaatgcgcttggcatttggtcttggagagcaattcgaggaaccacagctccagttggctcatgctggccagaaaacaagagattttcagaagtcgtgagtggtgtgttggcacagcctccatgtagttcatcagctatttccttgatagtgggttgcgttttaccaccaagccaactgactgactcatgagtcagggacttaaaaaataaataaataagggaggccatcggtgcccgctgagcaaaacacgtcaggctgccgacaaaatgggcccctgctgctttccgggtggtttcatttttcctctttttgtctttttgtttgaaaactatgaaagtgaaactgcacacctcccccctcaagctattctgttcccatgggcagccagaggagatgggtgggtgacggggtctcccagcaacaccatctctcggcaaattcacattcccatcaaccaggcttgaatgaggtgtctagtgtgtgcccggctttcagagggcctctgtggagggagatgatgttcattgagctgatattaattgaacacatgacatggccgagggcactcacccaggtgtggcttgctttagcctatcgagagcttaataagggcaacagctttagcctcaatttatagacgaggaaacgaaggcttctgaggctaagattcataggtcacacacttagtaagtggcaaaactggggttggaacccagatctgtctgattccagtactcctcctaccaatattcatgtcattccaaggctcacttttccataaatatccaatgttttcagtgcagtgagttccttgagcttacaggggtgattcagactgacatggtccttgcccctccaaggctgacatttaagct

SEQ ID NO: 62103 - DNA, 581 bp, Homo sapiens
aaaaaaaaaaaaaaaaaaaaaaagaagaaaagaaaagaaaaggaaaagatgagtaacagctctccaaggcagggctcacccagggcctcacagataaccactcatgttgaacaaaccttgcctcaccaggctcttaaaagtgaatttcaacagagggacaagtgaatggaatgaataaataaatatttaccatgtagtatgagtcaggcacagcaaatagggtgtcttgtttactcacagtggccttaggaggaaggtattagcatctccaatggactattgaggaactaagactcaaaaagattaagtgcctcaccacgtcacacagctagaaattgatatgacctccacattcatggagaagtgaggggaagtggagggagctaaggttaatgtgggtgatgtcagaggtactggtgacttgcaactgccctccccctcatctggcccctcccacttccagcatgcactctctcacccacctcatgccccagcactcacacacaattcatgctgtagagcacagttgggcaaggcaagtggcagctttgagctccctctggaaggggcaggggaggggg

SEQ ID NO: 62104 - DNA, 1344 bp, Homo sapiens
gaagtgtgggaggcttttgattgctatggcttctgtattgagttctccttcagatcacacctgagtttagacgactcagcccaggctggatcctataagacatgtccctcttcacttaacagatggggaaattgggctttaggagaggagaaataagcccaaatcacaagctagcaaggggccacaagccttttgaccctcgcccgcaaagtaaaatcaataaattccacctggattccttttcagcaaaacgccgtcagacacccgtaggcaattcttttctaagtggaatcacttgtggcttaggcctttgatgtgactcatctgggcagaatccctgtaaacagtgggcctgacccgcgaggacttgggggctgctcgggtcagagcccctcggcccccgtcacagaccccgggggtctggggaggggcgtcaggcctccaccaaagaaacagcaaagacagagcagcgggacccgggcgaatccgcgcccgtccctgcccaggctgcccgggttccgccgctgggcgaccccagcatttcctttgaagtctgaagctctcttatccccgggcccctgcctcccggtaccgccgatgcgcagcgattgccaggcaggtctccgccgggctgggagagccgccgccgaccctgtgcgggcccctcccctttgcccgggtgcgccgcgcctttgccccggtgcgcagcgccccctgcggaccgagcgtggacccctttccagcccgagcagggtcgctgccgcggcgggcaccagaggccgagccccgcgggtgaggacccctcccccggcagcagcagttctcaggagcgcagggtttcagcgtcaaggggttctgggttccaggcgggactggacaacttgggagctgggtagctgggacgcgctggtcccctctgtgaacgcgctccatccgcagatggaaatccccttcccccctccccccctcgaccccagcccacagctaacttcccgagctctctgagaaccacagcagtcgaggtaacgtctttggcagctcctctcctccccgcccccagtctctgcacagtgccctgtcaccccaggtgacctcacccctccctctccagagcctcctctgtctctctccccgcagcctcccctgaactctgacctgtacaaccacgggtagttgttgcggagcacttacttgagagtcaggagattggactccagtcagctcagccagccttttagggcatcgttctgttccccaggttggagtgtcctgacgcaatccctgtttactgcagcctcaacctccaggctcaagcgatcctcccgcttcagctcccacctccgc

SEQ ID NO: 62105 - DNA, 983 bp, Homo sapiens
cttatgtgaggtggtccccaacatataattacactaactgcctgcaggactgcaccagttttaaagctggaagtatcttcctagattaagtaggtaatgacaacagcaccagttttagtaaatagagctacactcaccctcagcacatgcagctggcacaaatggagcagtcaagcttctaaaggtctgatgtgagccccacatggacactgtcatgcacaagcatgagccaatcacgtgtgcacctctacctgtctcaaataacattgctcttctctccagcctgtgtcctgactgcatggccccttctgtttactttagataagtaaacactgtttgatttagccacggaatgtctgtgtctggattttcctttaatctaagtccactattgacatttgtcaatacagtatagtggtcgtgtggtttttccattacctgatgggcttaagttttgaaatgtaaaaagttggggtgtggggggatgttgttttttctttacattttcgcaatcatctcctctgcagaaggaatcagcacagaatgccctagttgcttcacagtagaagatggaatggagaagagacacatcccagttgcttttttacagttttattttttaatattatatacatcaagttcacaaacaaaaatgtgcagttacatcatgagcatccatgtagtcaccatccagggcaagaaacaggacatcatcagccctccagaagtccctgggtgctttgttgctagcatcaatcttctctgtacatgtagccaccctgttgactgtgggatctggactgtgtcaacttggctaaaatggaattaggattcctggaattcctgagttacttgtaaaataactcaactagatttgttccttccctactccaccccactcccaccacctaatttttattttctttgcaagatggaaggcagaagtgaacagcaagttttgtgtcataaaggctgtcacagtt

SEQ ID NO: 62106 - DNA, 1388 bp, Homo sapiens
tctccaatgggaaaaatatatatcctaaataaaactaaacatcattgatgtttaggcaaattcccccaaaacacctaattaaaaaagtacacaggcttctatagtaccctataattaccaacattctctgttacacaagctctatcacaattcaaaacagcagacagcaaagcttacgaagcataaacattccttgaagattaggctgcacaattaagaactgttctacagttcactggattgatgatggctagaaatatttcccccattccatttagtccaaaggttatttattactcccacttacataacagcaaattagagcttatgtaatagaaaaggaaaagaatgttaaaatataccggggaaacaaaagctgtacagccagcttctttctccctgacccctgactctcttctctttattatttcccttatccttagttaattatgcctcattcacttctgttatccttccactgtatgatttgaaagtatgtagtttggactcaatggaacaaacagaagaaagggaaaattatatcctatcaatcattttcctgaccaaggcaagaacaggcttaatctcactttaccggattcttctacataaaaatataaaggacaaaaaagatgatgatgttttaaataataaatctaacctcttcagcatctaaggtggccatgaaatctgaaaaaaaaaattgaagaactggagtcagaaagactcagaaaccactgctttgccaagatttcctaaccacccggtttgattctattctagtctgttgtacaaataccagactgtctgcccctccctaatgcaggtatttgttactttattagaactgtctgggcacttaaaacagtttatgtaaaatatagacaagatgtggcttctccacgtttaacagttatcatttgtactgtaatattacttattttacccttcctcaagaggagatgcattaaattactaagtaaatatatacatagatcttaaacagaacaaattataatgtgtatcatacaagaatgaagctttcaggctggataagattttgtttaatattcccttaaaaatactacacaattggttatttggaaaaaaataaattttgttccttggtattttttgaaaagtgtattcgacaagagttcttaaaaagcctaaatgtcataagtaaaattttttaaatataaagctaaaaaccaaggagggtcactgtgccttctatccctatatataccaatgaacacagtaatagttacggtgaattttaacaaatatttttgccaatgtttgatatgtatctcaaaacaggagagttttagaaagctatgtttattctcaacaaagtaaaaggcaaaacagatacacttattaaa

SEQ ID NO: 62107 - DNA, 1396 bp, Homo sapiens
agactcttcaagtactaaactgaaaacaaacattacactattagccaatatttttataatgtaaaatgggaattataaggttatatatataaaagcagagggttacaggaaagcatatgtttttgtaaacatattaaaagttagctgctcttccttttatttattaaatgaataatacttctgcaccaatgcataactttcccccaaacacagctatttcacacaggatttccttccagtgagtcttaatacatgtctcccatattaaaaatacatggccaaattaataatgagaaagaatgtttgttctcatatttagatctataataaaaacacagcattataaataaggattatatttcaaaattgtttagaaaaaacctcttaagtgttgtatatacacaattcttaaacttgaagaagaacccttcaagttaagtcaaactgttatttctactttccaaatgggatataaaggaactaatttaaggcggtggatgatgcagtggatgatgcagccactatccatttctttcactgctataagcccagccctttgcaatgtgattgtgccactcctgtcatcaagaaatgacatttatttcctcatccgttgaatccttgaatccggcctggacttgtaacttaatttgacaaatacaatgtggcagaagtgacctttgtaggagatcctgctgcttctgctctactctgggaatgctgctagcacactgtgaacaagctagcccccttgagggtaggagagcatgacagaaaaagagcccagccacccagccacaccagcaagcatcatgtgccagacattatcagtgctgccattttagaccatccagtcctcgtgcagccaccagacgactgcagccacatgagtgaccccagacagaccagaccagcagaacaaccatgtagcagagtccagcccaaattgctgacctacgaagtcatcagcaaataaaatagttgttataagccactaaatttaaacctaggactgcctgaatctagagcctagattctctccactaactacagctgcaagtattctttggtttagaaatacaaacatcttacctcttgtagtctaattcaattttatagatataagagcagccaaattgagaaataatagtttataatttttttatccattatctaaaaataggggatgagctgggaacagaaatgtctttttaccctcctaaaagaaggaaaatagatacaatattaataatattatgctgataaaattttattagaaaaagtatttttcctctttcccaaagatatgcaagtattcatttaaaacctaacagtattcatctatgttttatcaataaaagctgaactcagcatctgatctaaaagacaatctgaa

SEQ ID NO: 62108 - DNA, 1310 bp, Homo sapiens
aggagaatcgcttgaacctgggaggcagaggttgcagtgagccaagatcacaccactgcactgcagcctgggcaaaagtgctcaaaaaaataaaaataaaaataaaataaaataaaaataaaaagggggggctgggctgagagtagggagaggaaagtgcctacggtacaaaatatataaggagggactcactgtcaaggccaggcaataagccaaaatgtgaggcaagagcctgctgttctcacttcacctccagtccagcaggaactgcacttaacagcaggcaaataacacagcaggctgatttctgcactcccaaggtctgtcctgtactaagcctcagcacttacatcttactcttcactatctctgtgtcccttcaaagaaccacaaggcctatctacatgtgctggatcaaacagggatctggggcatgtgctgattccctgtttgatacatgtgctagtaccaaacaaggaactggggagcccagcagaaagaaagggtcatcaacaagcatacaactgggatacttgccaaagttttgaaactatgaaggtggaaaagaggggcattccaggaagtttccaaaactctgttctttataaagttggctttgtgtttaaaagtagtttctaatttaagcatgtgtattcacaatttcaatgaaaatgttattttaatcatttttttctaattattgctatttaactgaatcaatgttattactcatgaacaatgaaaagcaatagtatactatgtgattaaaacgttagttttaataagtcagttcatgcaaaaatgactacagaatagggtttcatcctcacaatgcaaaagtattccttcactacttttggtcctctttcaggagtatcttcaatactagcagttagaagcaaccacaagaaatttcaccttacaggttagaatgaacaacaaaaacctacctgatagcctccatgcattaaatgagataatttgttctaggatacacacaaacacatcaccacacccaaaagtgtttacaatggatcataagtgtagttccttcctcttttgtgactcacccttttccaggatgtcaaaacagttcaacagcaggaatgtaattagatatgagcaattagaaaacttgctgatctattttctcaatgtgcatacaaaaaaagttctgattaatacagcctaacttacagaactccctgcaatacggttctttcattaaggctaaattacttaacatggttataagtaataataggcacaaatcctttcacatcttcattttaaaggccatacataacata

SEQ ID NO: 62109 - DNA, 2431 bp, Homo sapiens
tctagaaacttgtatcttctataaggctaaaaacacaacttgcattacagaagtagaatcttaactgtaatgaactccaatatcactaaatgacatttctgccagttactttttttaaaaaaaaaagtgaaacaaagtaatctctgttttccatgagcttataaaacgacttcatgctttatcaaagaacatcaattacgtcatctgaatctactctctttttttgaaataggaatttaagtctaggtagttcctccacaatttcctttatgtccaagtaaaataatcctcgatataggtggagagaaaggcataactgaattaactcaaaaaagcagaagcagattaattagtattctgataaaaagaatataatcatttggtaaaatctgcgttgaattgtaaaggttcattttaattaccccaactaggtaactgtgcagttggagcataacaactcctttacgttcgactcttccaagactttgtaagtggcacttattttaatgatatagaattttgatgatatcgccattcttgtaacgtgacaaattatctaaatcacaacatctgcggtcaggctgtttctcaagatttctgttctcctgccaactaaagaggccccgactactccttggcgcgcacactgaggccgcgctgcaggtcagcaccgaaagagccccgcacggatcccgccccacaggtgcgatttacacaacccacatcaccaccacccctcccaacttcaccacctctagggtcaccaccctgtggggttttgtctttacgactaagccgattccctctgcctcgctggggaatcaaacttcccagtgacaacgacagcggccagcacgggacgtccaccagcccggcagggcttgacgctgtctcagacccggggaaggtccggagtccgggcacggtggcgcggggtgcgcagccctgcccacctgccctacctggtgcgagccccggccccggggactggggagccaacacggccgagcgggcgtgggcagcagggcgagcgccgggagaggagagcgacgagggggggtcaacggaaagagcggagtaggggtgccaatcgaggaactttggatttaggaggagggggccagaaccgccccactgaggtttcttccagaagttcggaggcttgggagaaaggggtggggaagagacccgtagaggctcgggtgcggcggcggggaggatccccggggtctctgggctgacggagtctccggcctcagggaggagtcgccagggccgccgaagccgaactggcagaggaaaagcagaggaaggcggcgcgcgaactcgccagcaaaggagggctgcgctgctcccggagcggagcgcctcgcagcccggaccgcgggactcaccgcgctggcggcggcggcgccagacgacgcggggccgggcacgtcctgcctcctcaggcgggacttgaggctcttcatggctaactcttgcctggcccccgcgcgaaccttaaaggctgcggagtgccagcgcgcaaggagtagacggcagcggctgcagcagaggcggcgcgggctgtaccagccccacctgcctgccacctgcgggccccgggcagcagacgtcgacaggcctgaggcggggctcccctcccgtagccaattgacccgctgccctggcgggggcgtggcaaaccgcgaccaatcggaatgcgggaatggggcgggacttcccttttaaactgagtaacacccttcctctcccagctggaggaaaagtttgggaactttagcccgggaaggggcggaggaggtgggcggccagaggcgtggagatgcgcgcaggccgggctccaggccaccggcgcccgcccacccggagcttaagatctagagagagcacggggtcccgcctttgccacctctcatcttcccggactcccctcctctttccacccacgcgctctttaccaagtaaagttccttcccttccgtctggtcttagaaatgactcttggttacctgcacacagaacagctttcaggagcaacttcttttcagtctcctgttttactaccaaatcctggtgcctggaaaccaccacacgcatcaaaaattccagaaataaacagtctctaagaaataaggtgctgattgtgcagaaaaacgtacagttaagaaagaccttgaaagacgttatagtaagttacagtacaagttacgtgctcgtttatttgttgagtgaagaatccgccgtattggaagcaaagggacggaatgggggcggggagggaggagaagaggtgccatcaattaaaaatgactcccacagccagtgatttaagttgtcaaaaaaagttacgcccttttttcttcaaaaaggttttttgttttctgtagaaacacattacatgtaaacgtatacgatgaagttaaat

SEQ ID NO: 62110 - DNA, 712 bp, Homo sapiens
tccccctattgtgaacacagatggaatgatctgaggctatggtcctgctcaaatatttgtgtctcaatcaactcctttctctgggcttaagataagcacccatttaccatctagtcctctgactgaatcttaaatgttaattgcttacaagagcactgtctcagtaattggctcttgagttattaattgcagtgttatgttgtactggttgtctcctgtaacatccaagttatcatagtcctggtgactggcctccttttctgttgttactggataaagcaaaggaaacagacagaaccacaagtatagcttgcatcaggttccaaaaatgttgggcaagttatttttatgaactgtctggatgatgtccccatggtgtctgtgtccagtggcctttatggatttttccagcctagaaacttgatagctgatgtctgcttattcccatttgagagcagctaagtaaatagcactggtctgaatattcagtaaagcttttttacattgatctggaagctgcctatatgaagtaaagtcactattattagcattcaaccagacaggttgggttttattttgttaactcttatcactattatttatttttatcttcccttcagagcaaagggcacttatcaaacctagatgaccttttgtttgttatcacactgagcctatataaaatatttttttgttttacttcttttttttt

SEQ ID NO: 62111 - DNA, 558 bp, Homo sapiens
caataattaagaacagttcctttgaaccttagaagggtgtagtccatgaatttacttgagatcaagacatcgcattttaaggctaaactaaaaggcatatttcttctactactgagacattgagctctaagagaacgataaactctcaagatccatgaactttttggctcataactctgaagtggcactcatcaagtcaacaaatacaaaaaagcctaaaacccctaacacccagagggttgagctctttttaggcaagtcaaaccccagctaaaactaccttggggaattcccaaatatgaatcacagcaaatcacctaacaacaatagaggttgctcataaactcttacagccagagagctcccattcaatactacatgactccaagtcaacattccttgacaggtagctgtgcggtctatgccagaatgttaacactttgaatgcttttgtttaaatcacaattccatccagaaagaaattgaggcaacttgtgacaaatttcattaccgtgcttcctgacaacaaagggaggaaatcaacctcaggaaggaaga

SEQ ID NO: 62112 - DNA, 1902 bp, Homo sapiens
tgcagttgtccatgaaatgggaaggacagataattaactattatcaatcgtgtcatgtagttatgagtggagttgtataaataagtgtaaaaccaaaacctagtaaggtatttatgcttgtaaatagtttgcccatatagaaaaaaaccaagacttgattaaaatgatttatacctataatgattcactattgaaagttaaaataggctgggtgcagtggctgacacttgtaatcccagcaattttggaagccaaggtggggggattacttcaggccaggagttctagaccaacctgggcaacatagtgagaccccatctctacaaaaataaaataaaattagccaggcatagtagcacacacctgtagtcccagctactggtcgggggaggccaaggtggaggatcacttgagcctgggaggctgaggctgcagtgagccgagatcacgctacagcattccagcctgggtaaaagagtgagacccagtctcaaaaaagaaaaaaaagaaaattaaaatacttcagacagaaagtcccaactgaaaaatggaaatttgggaaaccctgttgacagaacaaggtctattgaagaagagactcaaccagtagtatactggtaacctattagacagctgtttttttataggtgggaattggggggctaatttatagcaatcgtcaatttcaatggtataaatacttacaccatggaattcaaactgtcagtgtgacattagtcatccctcaaaaattcttgaaaatctaccagtcagctcttgtgagtcagttccagcactccactggaagaagctaatatgaaccctctggcaccaccagacctcatgttcccttgggtatgtctagcaaggatcactttgggatctcagaactgcagtcagcctgaggttttagcccttctcctatggaccaaacaaatgaagtaaaaaaggaacaccgggcatgaattatgctgattctaatgtatttttgatattggagttaggaataggtatgagagaccatcttgtttcagtctttgctttttgcttgtgttttctctctttttttccaaagtattcaaaagattaattgaataaaatataatcagatattaaaatgaacattaaaaactggatatagagattgtcagagtggtcacttcctgtgtttcaacatgcttgtgtgattccatgcctgtattcctaaacagtacttacacagcttccccatgtgagcgcctgagaagttggtattgatttatttgataagtgactgagttttgtgtatgaaaacaattcacgcatagaaatttaacttaatgccatcttaaacaaaggattcattgacctaatttcaagctcatgggtgattgttacgtgaactttcagaattatgtctttccagtttcattcttgattcacaaccaaacaggtatggtttagactctaggattgaaacaagggtctagggtagaatcaagttttctttcagacttgtcccacagatttttaaaaatatcagagctcctggtgttatatgaacactgcattcttttgtcacctccaacaaaaaaactaatcaatgctgcctaaaattgagattctagataaatatctcaaaaaataaatgaataacaaataatgttattaaaaacagggaaaatttaagcaacatgagaacttacgacagagaaaattaattaatttatttattcattaaatatttgctgagtatttacttactaagtgccaggcactgtttagaatctttgggattcatcattgcctccaaaggacagaggttcctgttttcctcggatatatccacatgactaattgccttacctccctcaaatgtcttttttttttttttttttttgagatgaagcctcactctgtcac

SEQ ID NO: 62113 - DNA, 2837 bp, Homo sapiens
aaaaagaaaaaaaaaggaggcagctctctgttgtggccaaaaatcaatggcaataaaggaggcccctccagaattggccccatctcccacccactctcttgagatccccacaacccacaaagcagtggtttggattttgtaattagcagtttgtctttaacaaccatggttttagcattgcgggtgccaatacagtttctttgaggcattggccaggacccaggcgttgctcctaatttctaattaaggcctgttcagatagtaagcgaataaagatcagtctagcatttcaattagaacagggtggtgtaatggattcggcttgggcaaactccttttagacaaattgttttgacaagttcaagaaaaaggaggggattctaggagtaacaagatcaagtggaaagaacactagccctgaagtccagctcttagaggtcaagtcccagctctgctgcgaactaactgattgtatgatcctggccaactcacttcactattgaagcatcagtgctctcttctgtgaaagtttcacctaaacaatttctggaccccagcgacatcttaagagatcatgggattcagggcacatctcctcttcatccactgccaccttcaaaaaattgacttctgtatgtttcagagtaaatgttgttctttaagagtaagggtttcacagccagatgcattgcctcacgcctgtaatcccagcactttgggaggctgaggcgggtggattacctgaggtcaggagtttaagaccagctggccaacatggcaaaaccctgtctctactaaaaatacaaaaattagccaggcctggtggcaggtgcctgtaatcccagctacttgggaggctgaggcaggagaatcactgaacctgggaggcggaggttgcagtgagctgaggtcgctccactgcactccagcctgggctacagagcaagactccatctcaaaaaaaaaaaaaaaaaaaaaaaaagtaagggtttcactttgtgcctatcttggagcaaatgaccaaaagtgtttctcttatgcatgtatttgttcagttactctctgagcaccttccaggagttgaaagaagtgcctgagtactaatcctttttcaggctcacacactcaaacccctctacatagttttccagctcagcagcatactcttaactcctccttttctgtactcatagcagtcagcatctgttcaactcatttcctaatctatcccataacctctctttcactctgaagtttagccattaaattgttacctcatttctcaaaggcatttgccatatctctaaccagatgtgagatctgaagggcagaaactggactctgcacttcctacctcccacagaatctaattcagtgtcctcctcatgggtagtgctcaattaatggtccttaattgatgggtccattagcattgtgggtgtacaaaggcatataagtggacgttcctgtcctcaggaaagattcagtgtaattgagggagatggtgagacctgaagagttaggtgacagttgcaagcaacatcaccaggactgtgattcattgtcaataaatgcaataggtcagtggttcccaacctttggaccctagacctcttgtaaactatgggttatgctaagcatcacaaatccttatatctgtaagatgactcagacatgtctcaaatggtagtctcctccccacttatctatggtttggctttctgatgtttgttacccacagtcaaccaaggtttgaaaatatgaaatggaaaattccagaaataaccaattcatgagttttaaaatgtgcactgtcccactttatccagcctgggatgtggaccctccctgtgttcagtggatccacactgcagacactacctgctcgttagtcactagatagccatctctgttataagacgactgtcacgtatcacggtgcttgggttcaagtgactcttattttacaggataacaaggccttgaataacgttgtcctttttttttttcttttttttctctgagttggagtctcactctgttgcccaggctggagttctggagttcagtggcatgatctcagctcactgcaacctccgcctcccgggttcaagcaattctcctacctcagcccggagcagctggaattacaggcacgtgccaccacacctggctaatttttgtaattttagtagagaaccctgtctcaaactcctgacctcaagtgtctacctgcctcagcctctcaaagtgctgggattacaggcatgagctactgtacccggcctctgttataatgttgataagaaaaaaaaaaaataaattcttgtctggggccgacatctgtgtggagtttgcttgttctcctcatgtctgcgtgggtttcctcccacatcccaaagatatgcacatgaggtgaatttgcatgtctacctcatctcaggatgagtgagtgtgggtgtgagtgtgggtgtggctgcacgctgtgagataatggcaccctctccagggtgggttcccaccttgcaccctgagctgctgggacaggctccagctacccatggctctgaactgcaataagaatgtaaataattatcttacttgcttttaataatgtttcttaaatacatgcatagctcacatttattgtaaggtttaatatgagtagtttggcatatatttagaagtttgatgacagttttgtcaccagaaatatgctgagggaacttaactattgtttgtgtcattaacctatggtaaaattgatttccttatatgttgtttcacttaaagtcctagtttcttttttttttttttttttttgagatggaatttcg

SEQ ID NO: 62114 - DNA, 2419 bp, Homo sapiens
acccatgaggcagaggttgtagtgatctgagatcttgccactgcactccagcctgggcaacagagtgagactccgtctcaaaacacacaaaaaacaagaaaaaaaagaaaaagaaaaaagaaaactcacagggcaggagaccctaccaggaagataattgtggggctcccctagaagctcttcacccgtatgggtaaccctgaagagatggaacatgtgcacactcattagtggatccatgacctgccaaagtggcccaggcagaaggtgctctgctgtgcttgtcactaaatttagactacaggtggcaggaagggcacaggaggaaggattaaagatccaagagggcggctgcttaggacgttttaggaacctaaatctgggttgtgctgttgagtggaaacaccagttccagacatcccagccagctggtgtggcactgtttgtcctgagaactggaggtgaacactcccttgtccacacaaatacccagcctgcgcaccaccagcaggagtctgctgagaccaggagccaactggccaggcaaccccactagagactctcggagtgctctgcttgctcttgtaggctggctgatcccagctgctgggaagtcagatcccacgggcagacgttgcaggcagcctggacaaagcctgggaaacacctaagagaacttcccttcattcaaacatctggcatagaggtgaagtgtgagggctctggagtgagagccctcacactattgtcttccagctcttctactaacaaggctggaggataaaccttagataagctgcttgattgcctcactttccccagttagcatggaaccttggacctgacatatggtggatgcttgacaaatgctgtcgaatgaaggacaaagagtaggatagggtgggcctcatcaagcagacccctgaggtaggttcacaggggcttctcccctttgggaagagacacatggtgtgtcatgcatggttccctgctctcccacaccccttcaccgctcaactaagagggaatctccttctatccatgcaggcatgtttctggctttcctcttggtgggcaggcacacatccacaatctaggccacaattaggcatggctcagttttgtcagggtttggggctgcagagtcctcaccatcggttggtgggagcttctttcctacatcggtctcacaatcttgcttcctctaacatatttccatcttagccacaatgttattatattatctttaagaatgtaggaaaaccctccccgctaattcccaccacccctactctgcctctggtcacaggcgatggagtccaggcttgagccaaatgtaaccagcccgcaagggtcaagagggccccaggggggcttaaacatacaaggaaaaaataagagcacaccaaggccctcccaaggggcagccgagagaatgttgaagcccacgcagaagttctttaacaattgagagggggtgggagagcctccctcaagggtgactgagaaggataaataggaaaaccagcattcaaaggagaggatgagggaatggaggctatccccaaacacccagggtgagtggttacacgagatctcacagttcacccacagctctctctcattctaaatctctctgtgacctctgaagctacaagtttctctacttttaacctcttgagcagagacagaggcatgtcaggcgtgaaccacagtaaccagctcacgatggaaattcaaggagagggaaacatctcacaaattgctgcccgggctttgtgggtggaggggctgagggagggtggggatgggagatggggtttatccaccagctgatcaagcctaccagcagcaagtcctccgggtgttggggatttgggggcttcttcccaggccagtgtagctaatttaagtcatctgtgtgccgaaattcagttaaaatggagttttagcagaattcttcatgtggatgctgtggttaaacagaaattccttttcaatgatgtttgaacagtgagtcaaaataaggccagtaataagctagtgatgagtaactccaggacagagcaagacctgggtggagaggatgtttatatggagcacacgggccaaagtagaagggaaatgattccttctccaggtctcttagcaggaggtggcctcctgctctcctcccacccacccctgttctatagggattattgtttccttacagaattcctgagcctgactgaacttcaatgatcatagtcaaggatctgtctttttcaacataaaatttcttttatcgctttttcttattaaaaagtaccactgctccacaggcgcggtggctcatgcctgtaatcccagcactttgggaggccgaggtaggtggatcacttgaggtcaggaattcaagaccagcctggacaacatg

SEQ ID NO: 62115 - DNA, 554 bp, Homo sapiens
ggaatcaggaagccagagctctatcttcagccttgtccccattgaagaagtcaactcgcctgtctgggcctcagtttccccgtcagttaaaacatgccctgcccacctcagttttgggaataatctgatgagagaaaggatgtgaatatttcttgaaaaaaaaatagctaaagagctatataaatggaaggcatgattgtttgttttcctaagtgaagctgtctctttgccatcactgctggagaggctgtttggattgtaagtatttggcctctgaactttcattctggactggagcagctgtgggtggcaggaatgcagagagggaggaaatatcagagttagcaagcctgggcctcagtctcagagttggccaagtttctaggggaaaaaaataatctcaagtagctctttgtggtcatgaaggatacacttatgcaattgttttcaatattttaagagtctgaagaaaagctttaaggaacacttatcccaatggaaagcaatagagttcctcattcaacctagaccgaacaaatctgcataaaatggcg

SEQ ID NO: 62116 - DNA, 1288 bp, Homo sapiens
gcagaagagggatctctactagagagagaatcctggaattcacatggtacttgcagacacagcttttgagtttgtttcttctaagctatgaaacctaaagattctagttttggaaatgaagcatgggaaagaggagggagataaagaggggggagaaataacattcaactccaattcctcaaaggaaaaaaaaagtataatgtctctttatcgaaacatgtatttaaaataatcacaaaaaattaagttcagtttttgcagagtgggctactggaggagaaccataaatgaccaaagaacaacaaagcagaaaaaataagcagaggagaaagaatataaaaacaggaagtcagcaggcagcagttccccatgaggtcactggcaaaggcccaggggcctcttctctacaggtcacgggtggggaagggaaagctgggacgcaggccttttctcatagtcatgggcaccgaacagggcagaacacagggtcaatgccagacacacctggcaattttcaaaaactgtttctatgtgggatgggggtggggtgatctcaaggctgccccgctggaggcaaagaagcctggttcaaatcaggagctgagtcgcccctctgggtctgtcattaagcgattgtgtgacctgggcaagagcctccacctctctggcctgtttcctcacctgggatttagtatgattggcaaggcctccacgcatgggtggccaaggggcatgttgaaatccactgtgcactctggcatgagctgaaaccaggaagaacaatttttccaatttataccaaaacattgttctgccagccaaacccacagcctccggagatgggaccactcagagaggtccctttttctccttcatatgtaggaatttcctgggcaaacagtggcactgaaatgaggtggtgtggaggcaaagaggaccaggtcggaaagaaagggtgaagccaccctggggagagtcttggatgctgtgataaagaatttagacttgttgttgaaagaaatggagagccagatctgcctaaggtcacttgcctgcccccaaggccttctcctgaccacttgcacaagggagagcccctgcttccaccgacaccccacttcccaacacagcaggctgtctcagccaccctgggggtgagtgctgggttttggcatgaacttcattatgcctgctgcgatgggaaggagctgaaacagctccagcacccacttccatgtccaaccttacctaggtccgctgaggctggcccaggtacacaacccaaagt

SEQ ID NO: 62117 - DNA, 1426 bp, Homo sapiens
cactccagatatatctcccactacccaaaatgaatcgcaaaggactgatgcaatcaacatgactgtcatcctgagggatgcttcatgaggctgaagtactaagattgtagcttacaggattattattattatttgagagggaatttccctcttgttccccaggctggagtgcagtggtgcgatctcggcttactgtaatctccacctcctgagttcaagtgattctcatgtctcagcccccgagtataggcgcatgccaccacgcctggctaattttttgtattttttagtagagacggggtttcaccctgttggccaggctggtctcgaacttctgacctcaggtgatccgcctgcctcagcctcccaaagtgctgggattacaggtgtgagccaccatgcccggcccaggattattttttcattaagggaattagcactcaccaggatctatgtcagtgttaggaataaaaagtcaacagtccttgttggttcaatcctttcttccttagatctttgctgttagtttctaggtagcttttctgtcatgtttacaacttacaagaagtagagtatatggatgaaaattactgggaaaagctagctcacattttatggaaaaagtatttaaaaataatcgatgaacaatatgtcttcaatgagtacttgctcatgtgtctgtcttgtgtggcagaaaccaaacagagcctttttcaacccagccacaccctggagtgatgcaatagtaaatgagacacaggcatggtcacatattcgggatatgaagccagcctgccagctcaggaagttaccccagagtcagacgggtggtggatcaaggaggaatgttcagagagccttccccacaaagcatacagcacagcagggcataacaggcagttgggctctttttctctgtacaggaagaggcagactgcaattttttatttttattttttgaagtaaggaagttatgtgaccagagccctattttagtaagataggtttggtagcatgatgggagataagttaatgcagaggcttagagacagagagaccttgggaggagggtatgtggaactaagtaagcactggggaagaagggagcgtgtaagaaatatttcagagccaaaaaatgacagttctggattgttgattgaatacgggagatttggaagggaaaggtacaaatatggtagcctcacgttctttgagcatttaccatgggcaaattactaagcattttacaggtattgactcattttaattctttttttttttttttttttgagatggagtctcactttgtcatccaggctggagggcagtggctcgatctcggctcgctgcaacctccgcctcccaggttcaagtgattctcctgcctcagcctcctgagtagctgggactacaggcatgcaccatc

SEQ ID NO: 62118 - DNA, 851 bp, Homo sapiens
tcaagcccaactctaccaatttagctgttaagccttagacaagttaattacccaagtaaagtctgtttttttctggaataaaatagagataatacctgaacatttctcttgtagtttttgggcagattaaatgagataatgcatggaaagctcttagcatagtccctggcacctaatcactgttcaataattattaacaagctctattaaatcctgccaaatagccagagcataagccaacactggaatctaggccaatgctctttctgctacaccaaggcagctcctgatgataacaaacattaacccaagtgagaaggaaagagagctaacatttatggagggccagctgcattccagacatggacatcgtaacaaagcaattcacagggagatgatgaggttcacggggcttagtaaccttcccaaggtcacaaaatagtgagagattgggggtcaaatggactgacctcaagtcctgcagcctttgtccatccagtggttctccagcgtgcatcagaatcacctgcagcgtttgttaaaacccaaattccaggcctttctcccagactttctaattcagtgggcctagggttggcctgagaatctggatttctaataagttcccaggtgagatcaatgctgtgggtcctggactgtacaccctcagtatacgccaagctgcctttgctcagtaaaattccctgtgatgagacaccactcaggctgccagaagcccaaggagagccctggggctgccctggggtacagtgagaaaccctaaatgccctgacttgatcactatgcattataaacatgtaacaaagtttctcatgtagcccataaatgtg

SEQ ID NO: 62119 - DNA, 678 bp, Homo sapiens
tctctcttttgtcctactatatgtggtcacattgtaatctttcagatctctctcctttattggactgtgagcttgtcaaggacagggggagtacgatcttcactctgtacatcctgcgcctagcacagcactcagcagagacaatgagcatatttgatgaatgaataaaggaaaaagagcgacagggccaggcagagtacaccagtgggtgaggcagggaagaggtccaaggagaaaagctctcctccagtgcactctgacaaagtacacagacaacttggccgggacccacttgttacgcatcccgttatgcaacaggccgcgtagtgcttttccattctagtaaatgcacttcccctaagggagacacagagttcttactccaactagtctgtcaactctctgagaagtagacagtacacagcccaaacactggatctatatatggcagggacaagcagtctgctgcccagatggcagcaataattacaaatctcatctccctattgtatagataaggatgatggcgtcacacaggcagagcatgtgtgtcttagagaaggctcatttctgagagttctgggtgctcattctctccctttgcttattcaacttgacaaatgaaaagcttgaatttcatataattttaggcctggcaggtatctctcaaggccttcg

SEQ ID NO: 62120 - DNA, 2043 bp, Homo sapiens
cagggtcctagaagaaagagagctcctaataagtgcctgttggcatccaccagaatgtgcaagttctgtcatttccccactctcatgtctatgtctatgttttatctcctttcaacagcaggaacaaaacaccagtccttaagggcctgggcattagtggacaggagccaaggtgcctgaggacaaagctcgggacccgggacaaggttaaacaagtgccatagcagctccaaactacccaaaacccaggaacaccccccccccgccccccgcaaggcagcaagatgatgcaaacataaaggtctggtgggaaaggctgtgtgaaaatgggaatcccccagggcggaggaagtaaagcagcaagtcctctatccgtctcaaattaccttgaaatcccacctcctggaatcccccatcagcaagtgtccgctgtacctggcctgctaccacctaaagactgagcgcagccagcaggactgggaaaggcagggcgatgatggcagtgaagggtaagcgggaccactcgcaaggggaggggaaggcgggtagggatggactttgcggcgatggggaggtggtgtcttgagggagcccacagagaagaggcctcctccagaggagggggtggcttggatggcccgtgaaagtcctcctcctggatccctgaacatccccacgtccaggcccctcagatcccggccgccagccctgggagcctcggttgggcgacgaagctgcgggctggggcaccggctgcctccacgggccggttctgactcaggggctcggcccggagctgcttccccggcggcggggctgactcaaccccctctgcccgaggagttgtcgcgcgcagtcagcgccccgaactcgcgcgcggcccggcgccccctcggggcccacctcccgggccagccgccgcgcctacctgtgcccgcggctcggctcctcctcgctcgcgctgccccagccggggctgaggtaccgggccgggtccccggcgccccgagtctccgccccctcctcctcgtcctccaactcgtccacgtcctcggcctcctggatggcgacgcggatctgcaccgccgtcttgggcccgggccgagcctccccgccggactgggccatggctcgcgggactgcggcgccgccggggtcctcacgccgcaaggcccagccagccggtcggcagcgactgcgacgagggggcgggggcggtgcgagcgcgcctgccgctcggcccaggggagggacaggggtcgcggcgccccgccccgcgccgccgccgccgccgccgccgccgccaccaccccgaccgctagtggagcgcccgcgcaggcggggcctcggaggtggagggcggctttccggagctcctccgacggaggcccgtcccggaaggatccccgcgacccccgatcactccctccgtcttttcgccgctgtggggccccagcccgagaggaggtgtcagggctccctcctcctgcgccttctttcacggcgccgcagggatgggcgcagcacagctgacttctgtttgtgcttgactccgggggtggcagccagagaccacagctccaggggcttccaggcctcctgcgtgtctcccccactggcctgccaagatcagaaaatttccatcgttagtctccttgacataataaccaccctagaccgcgtcttaggaggtcaggggcttggctcctgccttgccctgtatcagtttttctccaagtgtggttcccagaccaggagcatcagctgcaccggggaacttgttagaaattgaattctcagggctcatccagacctcctgaatcagaatctatgattcagaactttgtgttttaacaaggcctctaggtgatgctgaagttcacaaaagttcgaaagccgatggcctatagagtatgccctgcacatagtatgcactcagatgtttgttgaatgaataaagggagctattgaaatgtcaggatgttctaaaacactgccaccttttcacgtgtaacttcaaattgagttccatctcacctctcc

SEQ ID NO: 62121 - DNA, 1952 bp, Homo sapiens
tcctctgcaaacacctgtgatgaggctcagaaggaaagagctgcagcagccaccatgccttccagtttgataatttcggttcctgaatttcacaaagtgatacccattatctatctcatttaagccatctcgtgtggcaaagacatcaggggttgttatccttacccacaatgatggctcacattcatctcaggttttatagtttatgaacaattcatacatgtcttttcagggtttccaaatgcctgatcataagagtcccctggggacttttcttaaaatatagattctgaaaatacagtttgaaaactgacagttggtgggtgaatctgggctgtagaagcgttttacttggtgagagttttgaaaaaaagaaattgaatttatatgtccttacattcaaacatatctgcctatgttgtttctgttattacttatttctgactcctcataaaggaattttggatctagaaagaatgtcagacatcatccagctcggagctgctcctggtagggaatgggtagtctggcagagtacccaagaatgggtactcttaggggtacccattaagtcatagcataaatatggggcatctttctggggtatcaattttacttagctatttgagagaacagccacaatgtatatattaaaacaacttggaatatctgtgaaatcaaatgcaaaacttgcacggaatgtttaaggcaactcacataagtttctcatttatagtagttggcttagaataatgcctagaggagcggaggacagaaaccctcatttgcactaggggtatttcatgggagaagtccaactcgatcacgtttgcaatgaggagagtgagtcccagtgaggcttagagggaagggcctcttcttccactttgttgcacccgattttgtctagcagggagccttcatctaggaacacttgctgatttgctttgattagtcctacccacatacccatcatttgtgtcactggtgaagaaaccagggcttttaaagggctcctttcgatttccagcttattcctccccagagccgtggcaggggaagggaggccagtcccacccaggcctgtcttgaacatcattgcagggagtttgcatcaccactgagatgattagcaaagcctctttaaacaaaatcatgacctcagcctggagttggcatctttcccttccctggaatcttgacagctcattttcatagtaaactcacaaggggaaacagctttttccatagctcctgaggatgaaacaaaaggaagcacattgacaagccatcaggatggactgagattaggttgaaggaaaaactcaaccctagaagacctttccagtatatacaagggtgttgtttggaatcaattggaaatatttttgagtgtgcctggcactacagctggaaaccaaggacttggaataagatattgtggtgaagctgggaagttgggacaaggctaagcgttgaagagaagaagagtagtcccagctactcgggaggctgaggcaggaggatcccttaagcccaggaggtcgaggctgcagtgaaccatgatggcaccactgcactccagcttgggcaacagagaccccatcttcaaattaaaggaaaaaaaaaggggtctgttttaactgtaggttcagagggcatttttatctactcatttaatcatttgtttaagcatgtcccaaataccaggacctgtgctatactcaattttgtaaaatgcctgagacatgatccatgaataccaagagatggagggagcctaggaaagacagccttcaataataagactgtgtctatgcactaaatgctgtaacagaaatccatatagggaggcacagccagtgaaaacatccccaaggatgctttgaagctgactagaaaagctcacacataagcagcagggtataatggaaacacgctcactttattat

SEQ ID NO: 62122 - DNA, 1235 bp, Homo sapiens
tcaatctctaaagctttaaaaacatgatagatccctatcattcttcaacaaatattaactgaactacatgccaggcattgtagacagagcagtcagcgaacaacagcagcatgcccctgtggggcttacaggattgtttgagtttgatcaaatggttctagatgatttcactaagtaagagttgcaagcacatccagcttcattattcagtcatttctgatgaagagtgggatcaattttgccagaaatggagacattggattgctaagacaatttgcaggctgggattataccagataacttctctgatcttcagtttcttcatctacaaaataaaagtgtgaaccagaccatccctaaagttccattcagctccaaaattccaattcggctgcccagcagttctttggtgctttagctcagcaactccatctagtgtctctgtgaaatgaacttagaaaacatccagtgtactaactattgactaaaatgagaggccacaaaagagactggacataactaaaggcagggctcggaatcaagatatatgggtaaggggttgatgggttataagtcatatttaacatgatgtttacaatgtgtcaggtgctgttctaagtggttagcatacatttaattctcacaacaaacctatgatcgaggaactaaaaacagccgtactttacagatgagggaacggcccaaaaaggcaaagtaacctgcctagtaattggcataactagaatggaagcctaggtagtgtgttacaaagtccatcctcttaggcaatatcctttcctgcctctagctaagagttatggaacacttaccatgtgcccagcagtgttctaggtttttcatattgtaatcttctcaacagaaatatgttgtaggtactaaaatcacaattttgcatgggagtagactcaggcccagagagataatgtaatttatctaagtacactatagccgataagcgtcttggagcctagattggaacttcggtattcagccagggtgaaagaagcatccaggctgttgccatgtcccaataattttttctcccactttcctaaatgtcactgatcatgattcttggtacataaagggaagatgcaaggagcaagtgctagacagtttctttcttttttctttttttttagtggattatctgcagagccaactcttgaatattcagaagttaattcaattaatggataagacaggcttaagtg

SEQ ID NO: 62123 - DNA, 1610 bp, Homo sapiens
acaagactctgtgtgtgtgtgtgtgtgtgtgtgtgtgtgtgtgtgtgtgtgtgtgtgtgtgagttttgggggaggagcagttagaaggaattaactgggtcacttaattccaaagtgttaatgataagtgggaccttggagatcacctctaaagcacacccctaactttgcagattagaaaacaggaactttcgagatgaggtgcctttcccaaggtgacactaagtggaggagcccagccagagtccaggggtccttacacaaccttcggtggtctctctttacctgtgaagctgcagcctgcttcccagctcgggggcgtgtacaggagactggacctggggcagcctcagaatgcctggctgcctggagctctcctcgcgtgtccaggcggcctgcttggtctccctcctctcccctcttaggtgccggggcgggcacccggtgcagggtgggcacggcgcctgccaccagcctcaggcgctgggagaagcgcaggttcttctggataaccgaagagacgtcaaaacaggctggggcaaagtggtcagagcagatgaccgagcggtcattgcctccgtaccagtcggcgcggcaaccccgcacgaagcggtcccagagcagccgcacggcccggtccttgggaaagcggaacagcgacttcccagacttggtggtgttgccgcagtgggcggccacacaacgggccggcatggcggccgtcttcggtgcgcgggagccgggttccctggaccttcgcccttgggcacgctcctcgcagcggcctcggcgaggcaagtcctcccctcctcacctgtccactccgggtcgggattgtttccttccctacctctggtcaccggaagtggcgatctggggcccccaatgggagggctctttgatatcttcctcctcctcctccctgcgctgctccccaggagccagtggacacaagcagagggatacaaatttcgcgcgggcagcgctgaggtgggccgtaaagaggaacggaccggaagtggtggtggttatagcaaccagtgtggccagcctcttccccagcttatcctcctcccaatactcccgctctgtttttatgaggctgggaaaatagaacgaggaagtggtgacgcactgggctctcacgaatacaactagaagctgcaacgactgtgtggctctatcgattcgggagaggtccagaccggaaatggtcgtttccatggtaaccctgagcaggttgcctgggagatgacctctttcgggtctctttgaatctccgctgtagcgtcacctggaaggcagatctaacagagaacctggactgtctcctatcatgattcccgggaaatatcgctctgtttctggccgggctgcgaacaacgtaagttgggccttctactttctctttcttcccactggtactctttctgactggcgtctttgtcctaggagatgggctgtattattaggaccggcaccgctgggtctactcaagctattgtctgaccagggtttgaggttcgtgggctggaccaaggcacaatttaatattgtatgatgggtactcaaagtcttgtccaggatctgggctccccagaaggtggagc

SEQ ID NO: 62124 - DNA, 619 bp, Homo sapiens
gtataaaacaagggcaaacggcaaaaaaaaaaaaaaaaaaacaagaagccttaaaacttagcacaggctctggagaatctacaggtatttcaaaaagacagttgacttgaaatgtaggaagcccaaatgaattctgaaatagagtagaaccgtgagaacgtgcttgtaaaatgtgtcaccacccactgccttccaactggctctggggcctttccagcactgggtggtatctgactgataagtatcattctttgttaatgtaaccatggtttgtcatgtttgccaaaggctggaagaaaattgagccaagagctggaagccagaagttccccatgcctgccctacacatccaggctctgagtttttactttttctactatattgccatgcaagtaactttaactttgcttctctgttctctgtcactgagaaataccatgtctccatggcaataggaatgcatttaccttcaccaaacctgctcaaatccttgctgaacaggacgtagcaggagttgactttccaatggtggaggttcagagtacagcctgtagccacagagaaaagttgcttgttcctgaaatgcagacacacctccaatccagagagcaagtcatct

SEQ ID NO: 62125 - DNA, 3043 bp, Homo sapiens
tcagaactggctctgccaggctccgggccagtagtcggtgctcaaaatggtgtttctttctttggcctaatctcttgagtagcctctttcccttttgttaatttttttttttttctggaggacaatcttccctgggagctcccttctgctcccacgaagcgctctgcacccagccctggtgctgcctggctctggggcagggagcttgcattctgccacctccttcattgtcctctcggtatacctgcactttcaaaacaacccctgcaggcaagctttagaggcagcgataaacaaacaggctgactgaaatttagggaaacgcctgtatctggacagcctcttcaaatatttgtcaccccctccctgctctggggaaagaagagacagttcctcacagtcactctatttcctgccttcccagctctgaacaccttggctcgaatgtaaagaatttggctctgaattaggactcaagaaacggggccctagcaattttccctccattaactaaacgcgtcactttggtcatgcccttttgggggcaataatttcccaattcgtaaaatgaagggatcaaagtttgatttttatcattactaatgagaagaattattatttttttgcagcaggcttttttttccccaacaaaatattactctgaataagacaagaaagaatcccgaacggctctggccgtcagggtgtgtgtgtctcctccccatgctgtctaacccccgttggaatttggagggctcttgtcctttccccttggcctcagaaggagcccagcgcgtcctaccttgcgtgggagtgtgtgtgtgaccagggctccttcctgcccttagagtcaccgcccccttctcgcacaggtttacagcaccacttgcctcgcccactccccgctttgcctccgccccatcctgatgctgccggaatggctgttccaaatggaaggatgcccgcgtccgtcccctgccccagtccttcaacaggtccccacagacctcaggataagatgaacgcggaattcagggcctggtctcaaccgccctctcccttttcctctcacttagacgaccctggccagctgggccactctccactctcgccccctcccgccctcgtggcctctgtctagaccgtactccctcctactgggtgatgtctcttcccctgggacccagggaccatcccgttgttgacctccggggtcaggggtgcggatgggggccggcccttcccgcggtcgccgccagggggcggcaggagcggctccagatgacagcgggaggccgcaagaggggagggaggaaggaccgagggagcgcggatcccgctctcggatcgcaaactctgagccagagctctccgcgcgcgcctgaaccgctggccgcccgcgcagcccgacgcggaatcggggcacagcgggagcccgtgcagggcgggcgcggggcggctgggcggcggtggcggccgtccatgcggcggcgctcggggctgcccggcgccgggaaccacgcgggggcgaggcgaggcgaggcggccgccggtcgctccgggacgcggaccgccaggtgagcagagccgcgcgccccgcgtcccctgcgcgccgcccgcgcggccccgacccggcttccgctgcccaggctccggctcccgctctctggccggcggggcgggctggcgcgggctacccagtgggtgtgtccggggcgccgcgggctgcgccgctccgggctcggggagccagcgcgcgcctggtccgtgcggacggctgcgcctccttctctggttctcttccttgctgggagtcttgctctgtgctggcgccggcgctcatccctccaccctcgactctagggacagtcttaaactctagggacaatccacctcagtcgtccccgggtcggggccccgtgctccccgggtcgggtcggaggggaccggcgagtgcacacccagcccgtgcgccccccacctcagcctcgcctccctcccgcctggggcccgagagccgggcaagtctcggtcagcgctccttgagtcctggcctggggcctcggatctgtgtgtctgtctgtctcagtttagttgctgcaacccagcgagcgcctggagcccgagtggatgggttgtttccgccaactctggacacttcctcaagtgcagcctaagtacctgcggccccttggcgcacttacagaagtagcttttgcacagcgagctcaccttggagctctacagatctggaagttaagttttctttttatttgaaataacatcagccctcacttgggaaggggattttagggcgttctcgggcccacctaagtatctggaatttgtggtctagtaagttttttaagcagtccgcacccagcaccgtacctcccagcctcctttgccgtcttactaaaagtgcatgcttgcttctcttcctgtctcctttgcgatctctaccacgctgcgcttcgcccttttcgggctatgagtctaaagcttggacgtgggtagcaatcattggatgcctgttggaatttggaattagagaaatagatacccgagagagatctaaggaatcgccttgtccaaccctcctttcacagttggaggcacccaggacccctgacagtctgaagatttttcaaggatcacacagcttttaaaatccgcgtgtcttctacttgattaatattgttggaggtgatggagtaactgggcttactagggtcttactgggtctcaatatacaaagaagcaaacattttaaaaatgtgacttaaaatacggaactcttcaattcctatagatttttgttggcatcatagttgaattcctttagaaaacaaaatcctagccctgaaattaatgtgaggaagcaagcagatgggcgtcctgggactttcctataaatctctgcagggctggagcagggatttcccagaggtctgggcctgggaaatgagtttgggtgatcaggatactggagccccttctgaataagcaactgggttggtttcttgtggggaggctggccagt

SEQ ID NO: 62126 - DNA, 1170 bp, Homo sapiens
aggggcactgcgaacagatggtcaaggttgcataaggagagtttgcgtaaatgtcagcaggacaggagagcatattggtgatgttggtacagacaggacaaggctgcagtggtggaggctcctgtcttgccctgttgggaccctcagaggcagctttcctaggcaggttctgagaacgtgtcctcaccacatgtgactgggtgctggatttggggtctggagctacttccttctagcatctctggtcctcattccttgccagtgagtcacttcccctccccagggatgagtgcttttgtttgggtagttgctttaggctgcgggagttccagaggacagcgtgtgtaggagggagggagggagggaggtggaactggcgcctgcagtggggccttcctgaaccccgacttgagagactgagcagatccttgtcttctgaggcatgggttcctccaggagggggtcctccaggagttctggtcaggccctgaggagaaggggcaggaaggatactcagaggtgggcctgtgtgtaaggggcggcagaatggtgtcatagttcaggcagcatggcatcccttcggctcagggaatccttttccacccttagtttgatgatcctgaccctctgtctgaccccaccgtcctgagccttgggcctgctgctgcctcctcctggtgtgtggggatggccactttggcctgaaccaaatcaggtgactcattcaaccttcctgtaggatctttgtggaagggagagaaggtggggcctccatctcccaaggagcatatgttctaacagaaactagattgttagattttttgttcactgtgaagaaaggttataaatcaacaggagcaaacctcaaaaggcggacagagctccgcagacagcacgtgtgctcagccctctcggtgcacccttgccagacggatatttgggaaccctcactctttccaggtccctccctgctctacaacctacaatggctctttcttgcccatcttgtcaacattggcctggcgccacctttcagggcctgagataatgtttggctttgccttggcttctaggtttaattccccacaatcacagttctaggcctccgctgccctctggtcttccagaatgaggacttttaaacttttctggctgggatccacagtaaga

SEQ ID NO: 62127 - DNA, 1167 bp, Homo sapiens
aattagcatgtgtgcttttttaaaactatagtttaaaaaagagtttaaaagatatttcaagacatgaaatatgcatctagtttgtggaagttccaaaatactgttataaaactatagggtagtgagaaatgcagttggcccacagggtcattgtaggaccatggcattttaagcacccaggaccccatgtaggacaaagaagtggaggtcacagtcggttattgaacttattcgaaaagggcaagcagattatgaaaggtaggttcgccatgtgctaagcttgtgtaagtctggctgtcgtcaaaaaggcccctaaaagtgcttgaggaccctcaaaaatgtggccacccaggctgcacaggcagggagtttcttgggaggaaatcccttttgcaaagttttttcttaatgtcttggatttttttctttcttttttttttctttctttttttttttttttttttcaaaagagacaggattttgcttatcacccaggctggagtacagtggcgcaatcatagctcactgtaaccttgaacttctgggctcaagcgatcctccacctctgcctcccaagtacgaatagccatgtcctggaattttaattaatgcccctgcaaacagtctcctgtaatgatctgagcagggtgtgtggtatggagatcatctccctttgcgggaggcctggggaactcacctctaaactgtgcattatttcaaggaaattgcccacagaagggaaattagcaggatgggagtagttgaaagctagatgctacccttgtggtggagctctggaagccttgacaggcctccagcacgagagtcctgctgcagggattgtttgaacagagctgctcagcgggacattttgccaagaattctgctgtcaatactagaggaagaaaatgtgaattatgaggacagctgattctttaggagatctcagcttgagattcccatcaaactcccttcttcataaaccaggtgcacatcaaccattttgcatccctgtttttagggccatgtaaatatatttttaagagaaaaagaagcaaaagtagagtgtcttctgtttaaatgcttttcagaatgttatggggaaaagggctgtgggttacttgaagcgtgagaggtctttgacaaaagtggtagatgagaagcaca

SEQ ID NO: 62128 - DNA, 3098 bp, Homo sapiens
gggttttataggttgatggccctaggtcaagtgtctggttttagtcttctgaaacgtaaagtttttcttttccttgatgcatacttcagtaaagtattattactttaatgcctgtcagctactgcacttagaaatacaaccaaaagggttgaggaaatgagaaagagaaaggtggctgttcttaggagtaattgaaaaagatcctgaatacagaaaggaagaaaggggttaagaaaacgtgtttttatgtgtgagaaagagaatgccccaagtagtgatatttaaggtacaattgatcagtgaaaactgaaatttcccttgggggtaaagaaatatgtaataattgtgtggggtcatggagtcgatcagtgtccctgtgccagtgatcaggaaatggggagaaagaggttggggaggagggagtggaggaaggagagggaaggagaaggaggaggagcaggaggaggaggggaagaggagcaaagggaaggggaggccaggcctggatcacaagtattaaacttcatggtattaataaggcaggccagaatttgtgtaactgacatctaaactactacttggttaatgcttaataaatatttgttgaagagtaaatgaataaattaataactaccttttatgtacaacagataaggttgaaattttctctttcctgaccaggatagttagctagttaattacaaaagtagggtgaagcatggaaatcaaacaaataacacacacacacaccttcaacagtttacttttaacttaaaacacatgtacatccattcaccagtttttgatttggggccatgggcctttctttgctcatgaacccgattgtctttcttgcacaaaccacacccataagcattatgtgaggtttccatttgggtttctttaaagtgcagtgagaatataaagacatttgcaaagcagtctgagtaccagaatgattctggatttttattatttttgcccctaatcatttgcagttgtctcatccacacctaatttgccagtagttttttttttttttttttaatcttggctgcttgcctttattgaaactttccaaagcaattaacttcatttttgtagaaacaactaacaaatgttctttcttcttgtgcttgctttcatgggtttgtgtactatttgaatacttatgtcactacaaagcaatagcaactggcataaacaggtgtggaaacatggttgacactatatgaacacagtacatctggggggtgcagaagtgtgcaagtgtccagggaagaatcggccgcagtcttgtctgtgggaagcccgggaggagccatctgagtggtaggcatagaggctaggaggaaataaaatagatttttggaggactgccctggcaaacccccatctgtaaaatgacggcaagcattcagacagtattgatttttctttatgcctggcacagccctgtacctggatcctgtcctcatcactcactccttgactgtgggatttgctagaacattctgtacccaaaaaggctcaatggagtcaaggtgtgatcactgggctgccaattacccattccttatatctctaagtgtatttttatgccttgggttaacattgacccctcctcttcctgccagggattagaaccagtaattccaatttgtagaaatctgctttttaccattgtcttccttttcccagctctttggcttttccaacagggaattctgggatgcacttagaaaacattttcttgatgaaaactgtcacagagcagcactttttgtttttgaatttttattttttagagacagggtctctctctgttgcccaggctggggtccagtggcacagtcatagctcactgccacctcaaatgcctgggctcaaacgatcctcccacctcagcctcctgagtagctgagactacaggtgtgtgccaccaggcccagctcactttaaaaaaaatttttttgtagagatgtgatctcaccatcttgcccaggctgatcttaaacccctggacagcaacacgttctttagtgactgatatttcctccctcctctctttctccttttcttccttcactttattctatccttccattcttttattcagttgatatttattagtcttgaggatgggtcaagattatgcggattgttttgtttgctgcaaaggtgtatcagaaaccatttcttcaagaaacctgccactgaggagggaaatttaccaaagcgtgttgtgtctttaaaagctgtgctgtgtaggccagaaaggtggctcactgtagtcccagcactttgggaggccgaggcaggcagttcacttgagccgaggagttcaaggctaggctgggcaacatgatgaaaccctgtctctacagaaacaaacaaatgaacagttaactgggtgtggttgcatacacctgtggtcccagctattcaggaggctgatgtgggaggatcacttgagcctgggagatagaggctgtggtgagctgtgatcttgccactgcactcagcctgggtgatagagcaagactctgtctcaaaaaaaaaaaaaaaaaaaaaaaaaaagctgtactgtgataaaccacctcacattgccagaagtactggtcgagaaaatacaaatggctgcaagacctgagaacctggaaacaagcaataaaaaccaatttgcagttaaaatatgtgtccttaagtccatgctctataatggaaatatttcactctgcgcgagccaggcaggccttttcccggggcctgttggtcttggtttggctgcagcttagttatctgaatgtttccaagaccaaggcagatccagagggagcccagttaagaggacacagggtcactgacagtacagtaaacaacacctgatagcaggaaggagacaactaagtgccaaccagattcagaaagccctaggtgtctggagttctcaagccgaaggctgctgtgcgccgaagacctccaccttgggctgcacaaattgattgatattcaccttggtgcctctgagccatctaagaaaggtttcttaagctcagatgaatttgtgtaagaaaacagagaaaataaatagaatg

SEQ ID NO: 62129 - DNA, 1103 bp, Homo sapiens
gacggggtttcactgtgttcgagaccaggctggtctcgaacttgtgacctcaagtgatccgcctgcctcggcctcccaaagtgctgggattacagatgtgagccactgtgcctggccagcaaacatttgttatctccagagtgcactaggcaggatttcacttcaatgctaagattttggctctcttttgctaaggtcgatataattttattagtgatctggttgctcccaaaatatctcttgggttgtattaactgaggaagaaaggaagtagtttttttttcttgttttccttgttttgttacttgatatgcccaagtggtgttgagttcattgaggtaatttgaggtacacaggggctgtgacagtatccaccctcactgcagctgagatggtagcgggggtggagagtgggattggccaaggcaaatacagaagcccagagctccagttccatgatgtaaatcttgtaccaaatttcaatgagcattattttctacatggggaaatgaaatgatggagtgtttaaaacctagaacagcactgggtagatggcataactttttttttttgtttggtgtgaaatgttaggttatttcaactgcaaggtgaatcggaaagtcttggtaggaatgtagcttcccccacgccacttggaaaggagtgtgggatttgtttgccaaaggccctggtagccttcaatctgtcaaaacgttgcaagctgggagcggtttgccaaagcaaactatcaaagtgaaataacacacgagttgcacacacagagacacatgcatgctctctcattctccaaacattaattttgaattgggtcaggaggaacaaggatttgggctagattgttggtgttttgaaaagaggtgggcacagctacagataccaattagctaagtatgcgcaagcagggtgaggtatcctaaaacagagtgtgctgagcaggggtgggaaactttcagcccttggcagagtttcctctggcccctggggttatatattgctgtgcctgctgttattgtagcccaaagaataattgcccctctgggggaatttattctattccattcagagcagagaccatttaatat

SEQ ID NO: 62130 - DNA, 575 bp, Homo sapiens
agcaccatgctgcctccctcctttggggccaacactttgtgtcttcactgggtcacatcccagggcctgggttgggctgttccccccccatccactgatgagatggcgatgctgccttccctgggtgctgctgcctggaacatactcaccatcctgcctgttgctattttcccttttcagtgtcctgtgtttccttctgctgcttggattccagttcgtctgcccacagccctccactcaacacaggaaggtaagccatggccatccagaggttttcttctctgcccaaggggctagggccactgtggtcactgccctgaactttgttctgtttgaaggtgagtcaccactgatcctgaaaggaagcaccatttacagaatatggagtgtactattctgttctcacattgctataaagaaatatctgaaactggggaatttataaagaggttttattggcccacagttctgcaggctgtacaggaagcatgatgctggtcatctgcgtggcttctgtggaggcctcaggaaacttacaattatggcggaagacaaagggggaacagcacttcaca

SEQ ID NO: 62131 - DNA, 4143 bp, Homo sapiens
gcacctattatgtgctagtcattgtagtaggctatagggatataagaaataaggcatagtccctgccctgaaggagcctgcagcctggtcaactaaggcaggtgtgcaaacaataagcataatagaagattgtgctgtgacagctacatgaggcccagtggaaggacaaaagagaagggcatcagttctttgaaggagagggttggagggcggtttggaccaggaaaaacttcattgacaccaaaatgcttccgttgaatcctgaagggtgactaggtcattattttgggaaacgatgctggagaaagcagctgaggaggaggaaacagcataggtcaaaacatggagaataaagtcccttggcctactgaggaggtacaagtggtgtgggtggtccatgcagggccagggctgacaagagatgcagcaggagccaggctgtgtaggttgagtgggtaagccaaggagtttgggtggaatgcagagagaaggggtgggtggaagagccagccgtcttcaggggatggtggtacttgggagtaagacagaacagtggttctcactgtggcccacagaccaagagcatcatcatcatctgagaacttgttaaaaatgcagattctcaggccgtgccctagaccaatggaatcggagtttttgcaggtggggcttcacagtcttttgtaacaagtcttctaggtgagtctgatgcttgttcaagtttaaggactactgagatagagaatatgggaagagctagaggggcatcagttttgtggaggaaagatggtcaatccggacttgagtgtgttgacttcgaagtgacacgtggagctatcaaagtgcagtcccaggacccaccacatcagcttcatctgggagcttgttacaaatgaagcagaggcctgtgctagacccgctgaagcagaagctggattttagtgagacccccgggtgacttatgtgcacttttcaggctctagtctggaggttagctaggcacatggggttgatgctcgggagagggatcttggcaggaaacagaaaggcgggagttgtcagttccaggtgatgattgcagatgacacatttccagggtgagtgtgtagggagggagactggatggagtgactttgcttgagtcatgctgactgcttagcattatctttgtagagctgtggaagatcacacataaccagccctggatggcagccagcctgttgtaaggaaaacatgctgtttgcagccattatctcaacaactattatagcaacagcaattttcccagacgcccgttggatgaactgggcctggaacctggacttagaacccttactgtgcactgtcatgttcttctcatagagccctactttatggtggtgtgggggcggggtgggggtgttccatgtacttacgttgtcagggctggaaatgtgaacaagtggaaaaaaaaatcacacatgatgctcaataggcactcatagaagttgctcaataaaggtttgttaaatattgttgaaacaaatcattaaaaattgctttcagatttaaaaaatgcatttctatcagtaagttcaatttgactttacaacatccttgtaagtaaacatgctttcttaaaaaaaactttattgagatataacttacataccgtaaaaatcaccatttaaaaatactatgtaactcaatagtttttggtatatttacaaggttgtgtgactatcacgactatctaattgcagaacagttccatcatcctaaaaagacactccatccctttagcagtcactctcttttcccctctctccccaatccctggaaaccactctctgtctctatggatttgcctattctagacattctatagaaatggaatcatatgtgtctggcttctttcacttctttcacttagaatattttgtaggtttatctatgttacagtatatatcagcacttatggctgaataataatccactctgtgggtataccaatgttttatttctctctacatcagttgataggcatttgggttgtttctgcatttttggctattatgaataatgtagctatgaacattcatgtataagtttatatacaaatgtatgttttcatttctcttgggcatatacctaggactgcaattgctaggtcttgtggtaacactacatttagtcttttgaggagctccgagatagttttccaaagtgactacaccattttacctacccactaggaatgtatgaggttaccaatttatctttcccaacacactattatctgtcttttttgagtatagccatcctagtgaacatgaaatggtcatgctctcattttacagctaagaaaactgaaggtgcattatttgccaaagttggtagagctattaaatagccaaactagagcttttcttacataaaggcaaatacttgtatgatgcatactctgtgtgaagcattaggtcatttgctcttaagtcatttaatctttgtaactatctataacaaaggtactattattgtgtttatttgtaaatgaatacaaggccagaactgggcttggagtgcagctagggaggttcttagggtgcaacatttaagaagacattactctcaggttcctaccagcacttccacgaccctgactgttatctccttaaatattgcatcctagttgcttcactggcctcatcttaatcctggtcctgtttgaagaaactgaggcatacaaagattgggtaacttacccaaagtttccaaactagcaagtagcagagctgggattcaaaccccagaaagctggcctcagggtccatgtcgtgaaccactagcctacactgactcccacatctctgatctgcaaactgtgccttttccatttctttctcaagacataactttcagaaattagccagtgctttgacaagtggagcacctaaagtaaaatcccagagatgggttctggggagactaagccgaactactcaacagctcccctgggcgcctaccacatgattctcctgaaggagtttactggccacacagatcgcctcgccacatctgtacttatcatagctctgcataaatctccccagttccgtggaggcccccctgcaagcggccagatggactctgtcctgttggagaagaggccattcagacccgtcaggattattagctctgaccagctgtaaggaaaacaaacgttctcctggccaagccagaatgaatctgccacttgtccaaatgttctgagtcaaatacctagaaatcagatctctcataaacacacccaatttggtagctcatgctctttggtcttttagaattaactggtcatttgcattcatttcgtcacctttccaatgctgttgctctgtcattgggttttgaatggttctccaatttaggcagagcttcccacaaggcaatatgaatacaaaaatatacattggtgcttgtatattttaccccctcaggcctttgggaagatgtttacacaagtcatcagccaacagcaggttcttcttctgctccccaagaggaagctcaagtcagttttggttcatcagtgctgagtgagctccagcagggcagcctgtcccgggccagcagatcttttgtatctgcctcaaactcagaggtttttggtttgaatttcattgccatttttccttcattaaaaatggtaatttgcagtgttgaattttcacccttttgtttggaatttctattttattctatgactgattatcaaagctgtgggtctgtggaccagcagcattggcatctcccaggagcttgttggaaatgcagactctcaggctgcaccctagatgtcctagatccagaatttgcaacttaacaagatcccaggtgatgcctgtgaacactcaagtttgagaagtgctattccacatgtccatttctctgttaccttcagctagggtctccattcagtacttactttgaggctaaaattttttggtagactttcagatcttaaaaaaacacacatacgcagaaattctttcctttgcctttgcatgatgtcattcattttacctggcctgccacaagaaagaaaaaggcaaattatatccaagttttatatatatgtgtatacacacacacacacacacacac

SEQ ID NO: 62132 - DNA, 1252 bp, Homo sapiens
atacatcatatgttgctatggtagctggtcttttgattgaatccatagcagtgaaaaggataaaaaaattacatatctgacgcaggcagccttcaaggtcatgttccttggcaccgctacattggagatgatgctgtccgtctcctggggagatgacagtaattaattaccatcagtgtgatcactgatggtggctcttgagcagtgaagttgggtacaggcagttgtcatttcagattaaccagggtcactagaaatgtggctggagtttccataatactatttgtgactcatagcaaccccaggcaattgtctagatagaactttggatagggctcatattgctttataaggattcagctaatcatattaaagtacgtctttatttctcttccattaaaagtccagtggaaacatccctccctcttttgggtgggagtcatttgaagggaggttatctcccagaggcattacttggctctaaatctccagactttgttggtctcatcctgaatgagcctgatctctatctacatggcttttcccctgtctcagttttctggccttaagattacaagaatctctgcccatgaaaaggatcagctatctgcaagaaacctgcccccagggccagttcacagtgtaatgtacagacaattactgataaggtgaaggtgactcagtccatgacatcaggaaacaaccaatttaaaacctaagaaaggggtaaaaggatctgtaacctggaagttttcacttcagagagtctgttaaaatgagagatcacatcccgataatagtatgagaagtacaaacagatgtaatctataaaagagacatgaaacaggatttcccaggccctgcttggttttcatcctcactccgcagctccctgctccttgtggtggaggccagccacttcgccaggcctcgggggctgattccggctttggcctctagccctatcctgacaagacacagttatggctctcttgtctggggacccatcacaaattaactttgttgtctacacagtcacgaagggcaccatggcatagtggttactatgatggattctagatgcaaagtgtcagggttcaaatcttgatttcaccacttatgagccctatgaccttatgcagctcatttaactttttgttgccttgggttcctcatctgtacaatgggtataatagttattgtgaggattaaatgagctgaatatatgtaaatcacatagtggaatgtctaa

SEQ ID NO: 62133 - DNA, 3386 bp, Homo sapiens
ataccaccactactgcctcccgccagcactccgccttgtgaggaaagcactgtgtaactttgttgacaaatgtctgcttaattatgtttaatgattcagaaataaaacagggagaagtcccacattttaatttcaaactaaagactgctagaagccaacagaatttttgtttgcttgtttttgttttgttttgctgagacagggtctcactctgtcacccaggctggagtgcagtggcatgatcatggctcattgtagccctgatctccctggggtcagtgatcctcacacctcagcctcccaagtagctgggaatacagccatgcactatacatttttgtactttttatagagacagggttttgccatgttgcccagctggtcttgaactcctaggctcaagcaatccacctgcctcaacctgccccgatacagatttttaaaatgtaggtgattaataactcacttgtagctctggagctgttcaacagaagttgcaactcaagaacgctatttagtaattaataagaaaagtttggggaaacaaagttctacattgtgctctgctgatctttttctttgaaatcttactgcagatgctgtttctctgcggaggcaaggaggaggaccttgactagtctctgatggggcaaggagtttgttcgattgtgccagtctgaaatatggcaggttagaggggtggagaaagccaagtattgcaggggtaagaaacgctaggcagacaaaccttgtcacgagtttagtgagcccagaagtcaacaaatgagtaggggcaagaaactggcagggcgaccatagatttcatatggttattggattaatttatttttgctttaaaattttatcgagtgagccataatttattgggctgagttgagttttgtccaggggattgaagtttggatttatcccaggaaacagctttcatctaaagtcatgctccagcaaattatgctgattttaaacggagcagcctattaaaaataggtcagatttcaacaggacagtggaacgtttggtttgaggaaactttgagtacatcagtaactattatgagatgttctgctgtgatcacgtggcctgcctgtcatcaggaaagggagaaaatggaggggaggactcttacattccagtcaattcacgtagcctcttgatgccaaaaattagaaaggggaagcatatcagatgtgtacagctcaaattccatttgtacttaaggttacgtaacagctcatagtgtaatagctttggcccgtgtccagtgagcctgtagatattggcggctttgcgtgcttaaaaggcccccatcaatcagtcatgatgcctggtcctacacccagttgccatgtttgtttaagccggctttggaggttgtataaatagtgttagcaacctgctctcccacccttggtgataaatggcacctttaaaaatcctttggcacattcttaggatgcgaaggagtagaactggatccattgacatctttggtggttatcagcctccttctgcatatgttcttgtggcatctccaggagggaagtgtggagggtgcctggggcatccgtaccgccctggcttcttgggcctctgcagcctctgcctgtctgaatcagctagtggagtatcctgcctcgtggaaactggcaagggctgcacaggggctcccaaatgaaactgtgactcaggactggacaagcgaattcgagttcacacagaatggaaaggtgtactttttcccctttaaaaaaaaaaaacacaaagattgctacaacatgttggcattgattcatgcagtcactttttgttctgtacaaacagtggccttggggtagcaggaagagcaatgggcaaaggacacaacctcagtgcaaaagccctagctcccttggaccacagttgcatatctagaaaattaagaaataacttcctcttgttgtgaggttccggcgagatgccatgtgtaaagcacgtgtatcagtgttggacattccactattggtgactgggtgcctgctgtatgcttatcctccaggtagagcttccaggagcaagtgggactgggcgtgtgcagatgtaggggaagggtgttccaggcagagggaaccacagaagcaaaggtgcttgggcagaaaatacaggtgttaggaaacatcggcgagtgtccttcctctggagcaaagaacttataaaggggaacagtgtaggacgaggttggcctggaagtttggggccagattatagagggcctcaaacaggaggctaaagaaactggactgccttttatgggcagtgaggagttattggggtttgtaagcaggagagtagtatgatcagagctgagcttcaggaaaattaatctggcagcaaaatcctgcaaaacctctttggaacaaaaggggtgaaaataaataatttgaaaatttggcagtcatgttttcaaatatgttctgaaatgtgtaagctataatatgtattttgaaatgataacatctttctttttctgttcctgcacagcagccaaattccttgttcattctttatttcttttcctcattccctccctccctccctctctctctcatttttcctgtgtttctgtttctttcattgtttctcctggtttcagtgtgtcttcctttctcactcacccagtccctccctcactctttgccctgttctgtctttcatggttagtggtgttttggaggtgtgtctaaaccgagccagggactgcgagttccaggacagtccttcaaaaaggtccatctgctggtttttgtgcccagcatacccgctgtgaatggactacattactgaaggctgtgaaatcacccaaatttgatcttcaactctcatcatacaaagtatcggtattttgaatttgtaggtgaatcatttgtaattcatgggggcaatgtttctacaattgaactttctggactcatcaccaaaaggttcagtcagcttctgtaacttgtgggttagcaagtggattctatagatacgccccatgtccctgcccaggcaaacttaataaatgtgttcagaccttaggtgttcatggatttaactcacaggtttgtgattctttgtgggttcccctgtgggtctgtggcacagagttgggctgaggtatgaatccgagaagtctactttgcaagacacatgttatggaaaagggtcatttatccttattgttctgcgcattcatgcatttgtaacaatgcttgttaattaaaacattgtgttgtgtctgtgaaaaacagccatcaggtgagagcaacatttagtgaaatctgaaagtagggttaacttgtagtgtgaggctatgcacaggaaaacgcatatggctctccatagaa

SEQ ID NO: 62134 - DNA, 3582 bp, Homo sapiens
ctcccctgcttggggaggagcatgggggttacgtagtagcctggctgcataacatgggcttagtagctcagttttccatcatgaaccagagcctcatctttcatggttcctgtgcctccgagggctgggctactggggtgtctgtcagtccagatggctttgttctcaagtttcctccacagtggatatgaatgtttgcaacttacactcaattacaacgctttcctctacttttctccaagtttgctgaaatctttatttgtggatatctcctctctttttgctttgtcctcataggttaaaacgttttaaaattccctaacagtaggaaatttagtagggttttggaagggagaggaggtgtaagatggtcactcttccatgtttaactggaagtggaaagtctaggcttttgcttcaggcctgggaggtgcacatgaaacagtccctcccagtggctgcctggggggtccctgaagggtgtgagaccaccgtgaatcctggggcagggcacttgcagtacatgtgctatgtgtttgctagtattgttttagatgtttgatctcctagcctttgcttttctttgtatttttcctgctttagtccatttcccttctagctccttctgttctcatttatcttctgctgctgcttggagttacattttcagcaagtctgtaacacctctctgaaccaaaggctctcaagttcatctttctttctccaagcctacgcctgtgctgctgtcatgagtggcgagcttctgtttcttctgtcttcttgtcagtcccaagtgcccttttacagagaatgcctgtttttcactgtctagctcagttaccaggagtccctgtgaatgacacccacaggtccctcaaagaagtcagatttctcttggacctgataaagcaaacaaaatgtgacccaagcaggctgagttggacgggtcccttcttaccttcgccctctgccatgttgacattcttatctgatggcacaggctgggagttcaggatccacttagatggggtccgttcaggggataccagcgttcacatttttccttttaagaaagggtcttggcctgaatgttccccatccggacacaggctgcatgtctctgtgagtgtcaaagctgccatgaccatctcggtaacctactcttactccacaatgtctatattcactgcagggctctatgattagtccataatgtaaatgcctggcccaagacgtatggcctgagtttatccaaggcccaaacgattaccaaacattcctcttagatagaagacagatttctttcccttggcaaagatcttctactaagatatgttacaggatgttttacattctcttggtcttataataacaccacgcccaatccagtatttgatgcgtcggtggtcactcggaaggttgttattttaaaaatacttattgttctcagtctgcagttctcacagctgtaaaaaaaaaaaaaaaaaatacagtcttgtttccacctttccagagttttatggcacctgggaactgggatcaagctgggactgggtccaagattggggtgggtgagtggcgcttgcgtcagggaatgtgagtgccctgcaggctggaagggatgctctggttgtagccttaagataaacagattgggctggacatctgtggtttcagattaggcaggaaggaaatcatctcctacctggattactcaatatcttccttactggtcctgcagtgatcctgggagggtgatatgatcggctttgtttacagatggatgaaccagatgagtccctaggaagtgaagtgactggcccaggatcacgatgaactctcaaggccaagtttgaacccaggccttctgactccaagcctgtagtcctttcactggcctacagctgcttcctgagcccctttcctggttcagtcaggcaaaacaaaccagcttcctgcgagttaagggggaaaagggtttaatggggactgactcattgagattggcagtcccctttggttaatttcatcaggtcatctcctagcgttccatttccttttgtggagacacagatcagaggcaatctggctctgtatgaactcactttgtgactctgggtgaatcatttccctctctgggtttcaggttcctcattgcacagtaagtatattggaattcagtggttctcaaatctgctggaacgtcagaatcacctggggacattttctttaaaaaaaaaaagccagctctattgagtcacattttacaatcaatgagttttagtaagtttaccaagttgtgcaactatcagcataaatcagtattagaacatttttatcatgtcagtaatatccccatccactcccactccctgccctaggcaacaagtaagctatgtactttctgcccctgtagatttaccttttctggatgtttcacataaatagaatcatgcactgtgtggtctcttgcatctggcttctgttacttaatataacatacttgaggttcattaatactgtagcatgtattgatagcctattcctttctattgctcaataatatggcaattgtatgatatgtcacatgttatttatctacttatcagttgatggatatttgatccagttgatgagtcatgaatgatgctgcttagaacattcatggacacatttttgtgagggcgtatgttttcatttctcttgcgtatatacctagaagtggaattactgggtcaaatggtaactcttatgtgtaacttttcaggaaatagccaaactgtttcccaaagtgtctgtaccattttacattcccatcaacaatagataagggttaccctctggagagctttttaaaaattgtcatttctgtgccctacccacctgaggtctggcatggggcccaggaatctgcattttatgagctccccaggtaattcagatacatctggttcgtggatatgtgtttcggcccactaagaccggatgacctctgaagcctccctaaggcctgttgtctctattagtctgtgcctctcgggcaagacgcaccttcctgccaagtctctctgggtgtttgtctttggatcagagaatcagtacgcagagcagggctgagggagttggccaagcagcgtgcataactctgcgcagcacctgtcctgcattatcctccacactggccaaggctttgtgtccctggcttcatggacataaaattttatcacaggtttttatgtgttatcacattgtaaaagtgccataaaatcaagggtccagttttcagtgcatctgaaaacgtcgtattcctttaagttataatcttggttgcagtcattttggtaacttgttgagaagcctcatcccgaccctgccatttattagctataactagatttttaattgctccgagcctctgttttctcatctgcaaaatgagattaataacatcgacatcatgaagtctcttgaaaggattaaatgagataacctgtgaaatgctactgtaatggacctcagtgctcttttctttcttttggctgtttctgccccatccctgcttccattattatacatcttttc

SEQ ID NO: 62135 - DNA, 732 bp, Homo sapiens
gccctgttggtggtgctgccctgttaaaagtcagttaggatggccctgaatgtgagttttgctaggctattaatgaccgtttatttggccaacaagtgttacaaacacgtgattaagcaaaggtaagcaaattctttattacaggagttctcagagctcttactgtactgacatgaattataaatctttaaaaggacggtatggtaactagactccagcaaaagggtcatagaaccatttttaaattggtggttgttgttagatctcttggcactaacattcttgaaaatatgcttggggaaatgctaactcagaaattaacgtttgctgaacccagagtccactgggttacccctaggtgaacttctagttcccgaagttggcctttggatgagtcatcttcccccatcaggttcaactatgtgaggatcattctgcagtcactcatgataaccatttctcagtttaatggtacaattccatattgccttacattttatataagttgtaagctcataaaacatctttgtatatttggaatgtactaaagactgcaagttaacccagactaaaacaacctcaaagttatttgcaatcttctgaacatctccatattacagcaactgcccttctcacgagcaggtccattttccttttttgatgaggatactagcttctggcaagctgaactctcctttggatcacaaactttccttctcctaaaggtcccag

SEQ ID NO: 62136 - DNA, 2534 bp, Homo sapiens
aatgcataaagctgtatttggatttcttttttataaatcttgatttttctcttgccccttttgcttcaccctactccccatatcatgtgccttcaaatatacacaaacacaaccttttgtatttatatatagtgacctgcttgcaaaaataaatgtgttaacaatgtagggcctaggacacctgataccatttgagcctcagaatgtattaattcagccgggtctgtgcaagaatggtgatttttcaattaaacatactgtagcaatgatggcctcttttcccacaaacttactaaggtaaggaatgggacaaaagtaaagccaccttctttcctccattacaataggccgtgtcctcctttctcaaaccttggctcagaggcgaggcttgtagttcactgctgcattctgctgggagaaccatggtgaccctctgggtcatggtcccgactgggacaccgtattttcgtgcttcttgtttttattgttcctctatttctttttcttttgagtccaatcttcagtcaagccttccgtgtgaatgatagtggccacttggggatctccatctgcattttattgtatggccacgcaaaaccttttatctaattcctagaagacatcgattgctgcatagcttggtgggtgaagaatggaaaagcacaatctcactttattttgctggtggctttgccctccctttcctacaagcagtcattcaggcctaatggttctgttcctcctaattattcatttgttcattcgttcattaattcattcagtctgccattcaatatatatttatcaagcatccactatgttccaggtgcgattccaggcttcagagatagaacagtgaatcaaactgataatgcccccctctccaggagccagcattctagcgagagagaatgacttgctgaattgtttcagttggaactttttttagactctgaaccttggaaaaagtccactttccatgggcttattaaatgtgctgaatcagacagttggtgctgtttactagagatcagggttcaaccagctttagctgcatgacccagaacatttgattttatgatttacaaaataaaaagttatggccctctgcagatgtcccatctaatttgctcattgtgttccttagaggcaatgtggtattgtgaaaaaagcaagaccaagctttgcggttcaagtggcccgtgcttgctgggcctcagtttcctgatctgtagaatgaggctggataaatctaagtttctctccaactctacagtctgatggttctagtactacaagatcaagatttttttcctaaagagccatttgtcttattttagcttcaagccaagccagggcatctgagaaataccaagcctccgttgtgatgtgtcgccatgaaaatgttggctgccctctggatgcaagtctgcttgtgctgtgctgtggctcagagttaaatttagataaaaatcagttaggagctaagaatattcccagctttcctgacaggttgtatccatcattatgggaggaaaaacaaggaactggctgcctggcgacagggagcgggccaggctgagtgtgaggtcaggcctcggctggaatctcacggacttgaaaggacagagacgtttcctgagatgtctgcggcagaatgtgggaggcttcagcctgaggaaagttcaagttggagagaaaggttgccagacctttgagtgacccacactgcttataacttctagaaggttcttttagggaaacctgcttagaatgaaaccctgaaacgtcctttgctgcctccttaacaacttgcattagagagtttcttcagccaaaaggcgaatgtctgttgagtggaaaggagaggacggagtcgatgttgtcccctgtgagatgtcatgtctcaggcagtatgctggacattcccgagacgccagctctgctcaggtgacttgtgtgccctgcccttgtaagcctcgaattactcatcgtgaaattgaggtcaagccactcactcacagacagggctgtggtaacaataaaatgaagggtgcttagcacattgaaaataactcaggcagtgttccattattgctatgggctgggcgtggtggctcacgcctataatcccagcactttaggaggccaaggtgggtgaatctcttgagcccatgagtttgagaccagcctgggcaacatggtgaaacttcatctgtacaaaaaataaaaaattaggcaggcatagtggcacgtgcctgtggtcccagcaactagggaggatgaagtgggaggattgcttgagcctgggaggtcgaggctgcggtgagctgtgatagcaccattgcacaatctaaactgggccacagagcaagacctcgtctccaaaggaaaaaaaaaaaaaagaccaccatgattgttctagtattgtttattgttgtgccctcctgggccaaacgaggaggggtgggagctgccctgggtgtgcctatgaggagggccttgtggtcttgtggagtcactcagatgtgctt

SEQ ID NO: 62137 - DNA, 946 bp, Homo sapiens
atggaagctcagaattgtcaacactccctctgcttttcctttgtcttccctcagaacacctgctcaccatgacctgtacatccaggtgagtgttggttttcaacagagataccttgcgagtctgtgctctggcaatgccaccactccagaaaacagctcagagcttagctcttagttgtgttcagagcccgattgagctaaagaagggacaactctctgttttatagtcacacctaatctaatggctgttgtagcctttgattaaaacttatgcttcccaatacaaattgttgctccagatttggtcccaaaggatacgactgttagcaaaaaccaaatttacctgctaaaggatgagctatttaaaaggaatgtgtcacttgctgtgtaactgcattccaacaaggagttacataaatgttttgagacagcagcatctttggagtaagtgccaagcctccagaggaaccctggtaaagggaagcagtggtctcatttggatatgcaggttcttgcatttttgttatgaaatctactctcctttgaagttacctcttgtattgtaatctctatagtaatccattctgtatttcagacataaattctctttttctgggccatccttcctatctgtgttcacaagtccatgccatctgccaacattttgccacgtggagtggtaggaaaaccaggacaggagcaagctgacccagcttcaaatcccatttcaattgttagcagtgagatcataggcaatttcttaacttctctgaccttcagtattctaattaaaaacaaggctactctgagttacagggattaaagtagatatgttgtatacaaaatgtaaattggatacagaagtggccagcccagaaaagcacctaaaattgttgtttccctttcttatttttttctctttagtattaattacttctttgcttaa

SEQ ID NO: 62138 - DNA, 958 bp, Homo sapiens
tgcttgatgagtaccattgtgatatctccactggattggcctggaaggtctttagaggtgactcctcctctcatgggctcttttgagagttcttctgaggctcctcctgggaacattgaactatatttcccatgacaacacatgttgcattttcctctggctgtttttcccaatggcccgcactatatgggccctctcagttggggtcagtcactttctcatggaatcctcttatgtgggatttcaaatcaatgcagtctggctctctccccagtctgccttctcttcagcctatgaaaaacactcccacattatttgctccgatcatctccaagagaacagtactcaacaggcacctgtcctttgctcataccactggacacccaatcttttagatttccaggtgggaattagacccagtaccctgtgtcccaacaattgtagggagaccaaatcgaaccctctaatggtctcagtgaagcgcccttctcatactgtgaaggagaggaccctgacccttctccttggcagagggaaatgccagcacagctctctccaaagagctcctctttcaagctccattttctcaaaacatattccatcttctgtgtgaacaagggattcaagagtcgttagtgagttttggctcatgaactttgaaatgtttgtatagcggtccttcaaaatgtagcttccactatttttagaacacaggaacaacccattgtgttataacacccagttacacaaggttgaccttgatgatgtcatcgcatttgttgaacaattacctcatgctaggctctcttttttttttttattttaaaaaaatattttattgttaaattacagagtctaaactgattaccactatgccattcttttttttattattattatacttgaagttctagggtagatgtgcacaacgtgcaggtttgttacatatgtatacatg

SEQ ID NO: 62139 - DNA, 1173 bp, Homo sapiens
tctttacacatgtatgtgtttatttgctgacctttgttgttgttgttgttgtttaaaaaaaaacttcagacaaattaaatttaacagaatttaattgaatgattcacaaatggagtagcccttggaaccagaacaggttcagaaagaccagggctgctacatggctgaataatatttatggacacaaaaaggggagtgagatacagaaaacagaagtgaggtacagagaaagctggactggttaaagcttggagtttgccttatagccacctgtgattaactgaaggttgtctgctgtgaccggctgagactcagctacttattacaaaggcaaattccaaagttaggttttcatttttgtttacgtactaagttggttgcagttatgtaaggactcaagtatgcaagtacagaggctttctcaagccaaatttagttgaatttaacaattcccttcttcttttggtcagcctctgaccaaattttgagagattgatcaaaactttgggcattggtgccactctctgtcgtcatcataaaaggacttatttggtctcagtacagaactcataactcttatttggtcacagtatggaattcacaagtcacaatgtcatgtcatcagttgaataattttttatattcttgctaatctagtcaaaatgaaaccgtttgatgctcaatgaatggctgcatacaaatatttaagacttgagagggtacaacacacccaggagacgactgtgatcactatcaagagaatagtatcaaaagaccaaagtacactccttaacaagagcccatacagaccaatctaaatcaaacaaaccaaacttctggaacttgaggcagttcaataatagctgagtctaactgatcatagcccctgttttggttttgatggcaatcaagggaccctatcttgttgcaaaatagtctgactcaaagaggtatccatcttggtagtgagcctggcaacacatgtcatagcaatctggagacacagtagaagaaacacagattggaaactttgaaaagccaagcttgccacccaccacttaggatgcctccaaaccaactgttagctgcttccgtaagcatattatattatgcattcctttccctttctcttatgggaaaggaacacataatatgtttattgccgtcccattg

SEQ ID NO: 62140 - DNA, 1902 bp, Homo sapiens
gtctgtctcatggttatccaaggctgaggtggtcctttctgatctaatagaccttttgtctgcatttaaaaaaaagttcctaagaactagaacttccccacaatgaatggcctattccttgttataacaccttccctgttaaaacggtgcaagtgcttaataaatgcatgatgaatggtgggttgctgggtggacaggcacgcagagaggtatttgggttgagtgtggacaaactggtaagctggagaaactggtgccaaaaagggatgtttacactaagtgcagatttggacaggatcactgctagatcccttccatctaagatattgcaaatcacaaattctgaagaactcagtggagaattctaaagcatggggtccacctgaagagtcccagactgatgccgtctcttctacagccactggtgtcattgttaatcttgtccagtcacatgtcaatgtaactcttagtcagaagacagaaatataccaagagaatccatgtgtcgtctgtagcccatgcctctctcctgagcaccagactcatctgctaattcactgctttccatttctacccacacatctcacagcacctcacgctgcacgtgactaaacctgagctcattatattttcttcctcccttgtgcacgctcttgggtttctgattttggtgagtgacacctccactcaatgagtccccatgacagaccagctggatgccttcttcattcccacctctccatgatcattggtgacccagttctatttattcttgaagtctcagaagagcttcatttcacatcatcttctttggaccattgcagtggtctactaactagtcttccttccttttcttattctttttcaggtgagctttcattttaccgtcagagggattctaaaatataaattattcccctgcctctgtgcccactctacctctccccattgtccacagataaaagtccaaattccttagcatggcattcagtatgttccatgatctagcccctgcctacctctccattcttaaagcaaacattccaaccataccaaaccacgtacagctctctgaataggccatgcctctgggctctgtccctacttgtttttctatggggaataccttttcctatctgtacacatggcaaatagctgttcacctggcaagacacagcttcggtgtcatttcttctatagtgctgttactcttggtccccagagagggtggcttcctctccctgtcgtgccccaaatagacctcttttaagacacccatcattctttattgccctttttgatttacgtatctacctccccacagatgcacagaaaaatcctaaactaggaacaaaccttgtcttactcatctttgatcctccactatctagcacagtgagtcagcgcataatacttactcaaaagatgtttgttcaaatgaacaaatccatctattatttaaccagtcatgagatcaccatgggagcaacactgttcatctggagctgctgatatcataccatatgttcattcttcaccaggtgttacctggatatcccctcatctcacaacctcagagtgcagatgtgtcacatttacagaagcaccagcaaagtcaatgttctgttccccgtcatcttgattgacaggaggttctctgttttctcagatgatccttcccatcatttccaaattgtgatctaaagtagacagctgagtacccaagtctgaaattcaaagcattggttaggaccactgttttggctgactggaaagaggtgatgatttatcttcatggctaatggctcagaaagttcttttcaaggttgtagaattcaaatgttatccatgacgggatatgaaatccttacgatgtgctttgctttttttgtacatcaaagc

SEQ ID NO: 62141 - DNA, 1985 bp, Homo sapiens
gatctcttgacctcgtgatccgccaccttggcttcccaccttggcttcccaaagtgcaaggattacaggcatgagccaccacgcccagccctttcctcctctttgccaggctaattgttgaatactcagctaatgagtcaccctcggagagacttctctgaccacctctcttccttttgatgccttctgacaagttaatacagctatagaatttatcctaccagaccacaagtgcctcgaggtaggactgtcttttagtatctgtcatagttactggcacatagctacaggcatatgtgctaatatttgttgaatataaaaataaaagacaaaacctgagttgtgtcaattagcgatgacattctccttgccacagaaaccctagagtggtttaaccaaaagagatactgtttttctcatggaacaactccagaggaagaggtcctgggctaataaacatgcacttacaattcatcacaggcttgggagccttctagagtcttgttctgctctccttggcatgtcactgcatgttctcatgaacacatcctggctcttccacctcctgagtccatgttccaggcaaaaagaaggactaaaggtacaggttacttgtcaattgaatctgtggcttttcctctggtaaacagtagctttctcggcagctctgcttacttgacttctggttatatcccatgagccaggcacagatctggttttacgggacaatgccaaaacaaacattgtcagggttctgttagggtcacaagaagatttactctatttcttgttctgtctgcctgcttgaaacaatagcagccattaaaagttgttatgtggaagtcttgtattatatactagaaatgggccttgtaagaatgacttgtatcatattgtccacatcctcattgagaatattaagaagacaatgttgagaagactgacgcccagagaaatgtcatttgcccaaggcaaaatcaaatattttggtggcagagactgcttaggaaacaaccggtccttatctcaagtctaactcccttaacatttgggggcatttcataatttgatcttgaggtaatagatattagatgtattaacttctttttccagccttacataacaaagtcttcagaaacagaaaccgtatttgcgtggtttgctgtaagtaatgcctagtatggagtcatgtaatgattcttttaaatttaaatttaaattattgatttttgtggatacatagtaggtatattatggggtacatgagatgttttgatacagacatgcaacgtgaagcaagcacatcatggagaatggggtatccatccctgagtcctgtaatgatcttaatgcagtccttcctgctttctctgcagggacttttaggaagatgtaggaaggaatgatttgtccactgtggctgcagttacctccattaactctagatggcactcatgcattgattgggaaaccagtcactgataatattaactgcctggtagaaactgacaaattcttcagtcagggtggtgaaaagttaaatataggtggctcccaggcatggctgggtgaatagattggtcaaaggagaagtggtgaaaactggggactggctgtaaacacatttcatgagtacatacaaacccccttgccttctgttcattctccctcacagcagccaaagtgggcaaaccagaaaatggactggccagccttaccagtgtgcctgtctgaccagcgggcgacctggtcactgccccagagggtcaagggaaacctattctccttggccacattccttgagatggtgatcacagaggacactcagttgccacatcaggactttgatattcagatggaaaaggcttatatgttgatttgagttagtaattagggcttttaaactgctcttgtcgacataaacacatacactattattcagtacttctggtttaaaactcttgttccactgaacacattatttg

SEQ ID NO: 62142 - DNA, 413 bp, Homo sapiens
gactcacatttaataacttcaattatcaaaggtcattcaactagtacatggcagaagctgggtatacctcaagtgggtttatctgatttccaaggctgtgttctgttcattctcaatctcccctccctttctgttctcctctatgctggtattttccaattctgccaacatgagctgtttactgcctacatgccagggctaggtaatgccaaggtcatttggagaagcatttcgacatagcaaggctgagttgatggaataatccagtgtcctctgacttaattaactaaaccttgtatcttttgaacagctaatgtttgaaggcagatttgaatttaaaaatgcaaataactcttcccacttttggataaaatattgtgttccttttcatctgtgatccatcatgacctctc

SEQ ID NO: 62143 - DNA, 1638 bp, Homo sapiens
cttaacacactgttgttcttcagagcatgtatgaactgaagactggtaatgtgaagacaggggaaaaaaagaatagaggatgtaatgtaggttattaatgcaataagtaacacatatatgaattcatacaaattagttaacaaatacaagccactgcaggactttctaaacagcactgtatagttcatcactgtggaaggggtcatttcactaggagtaaagtcaaatttctcttagctcagccctgtccctgattcctcagcatctcttcaggttttgttcagacctgaaggtcagaggtaacagacttccagggccagggtcacctcttgatttaacttgggctgtggccagattagccacattgatctgctctcttggaagcctgaagaagccagtaatctcacttgggcacacatggagggagagagtataagaaaaaaaacaacaggccgggcgcagtggctcacgcctataatcccagcactttgggaggccgaggcgggcagatcacgaggtcaggaaattgagaccatcctggctaacatggtgaaaccccgtctctactaaaaatacaaaaaattagccgggcatggtggcaggcgcctatagtcccagctactcgggaggctgaggcaggagaatggcgtgaacccaggaggcagagcttgcagtgagcggagatcatgccactgcactccagcctgggcgacagagcaagactccgtctcaaaaaaaaaaaaaaaagaaaaaaagaaaaagaaacaacaaccagaactaccatgtattgagggcttcctatatcccaggcactgaaagaaagtgaacttgctcgggcatgcttggggcccagtaagcaagccaaattaaatacaggcggcctggcatggaatccgagactgtcatcgacaataaagaggtgaaaactgtttgcagagagatttaaataaactgtttcaaagtacatccagtcatgcacagtccttcgctaacttcaagaagagcacattggtgttaagtaaggggaaagcatcagattgataagtaactgataatgatcagcactgatgtttcagaggaaatatgtgttgcagagaggcagagaaccatggtggcattttgcccagtgagatgtgtcatgcccactacaggcccctcctttagagagggcaccttctgccatcttcatctctccccttggtttttattcattgttccttccagtgcaagaggatgtcacatttcatagatatatgtgaaccacagagacccaccttcatccagggaactgcaattcttaggaaggcactggggcatactcaaggcaatgagaattttttcacaacagaactcctgtggcaacaggatggaacttaacaaaggggactgccctttcagaaacagtctgtcctgcaacagcatggagatgacaacagggacaggttctacttagtggtgacagggatacaggcatcctggctccagaaatttataacactgtctgtgctcatgtgtaaacatgggtgacttatgtacctgtatatacttatatacatacatacatatttactgcaatagacacatatatttaatagactctccttccccatgctgtataaagtgcccatctttatagct

SEQ ID NO: 62144 - DNA, 1400 bp, Homo sapiens
atttggaagcatctacctgagccttggttttggctgcacaggactcgacatttacaaacaatattgaagtgatttgattgtgtctgactttcaatttagaccagggattggcaatttttttctgtaaagggccagatctaaatattttaggctttgtcgactttcctgtttgtgttgcaactacttaatctgctgttgcagcacaaaagcagccatagacaataactaaacaaatgggagtgtttgtgttctaataaatctttatttataaaaacaggttgtgagccagatttggcctactagctacagtttgctgacccctgatttagactgtaaataggaaccttgtttgttttaccttcatgtctccgctgcctaccactgaattggcacgtagttgaagttggctcaggaaacatttactgaactatatcgaaggtcagttttacaggcataagtgttagaagattttaatgagaataacaactggaaaaagatccacccagaatagattaactgtttccttatgttgaacatttaggatgtttccaattttttattaacaatactgtgatgagcccttcatacagaaactgttggcctgatttcttatttcctggcataaattcctagaagaagaatttactggatcaaacggtctatattgctaaattgctttccaggaaggtggtattgatctacatgcctaacagtaataacaggaagatatttatcatatacaaaggatttctttcaacagaatgtcatgaataaacgttttggcatccatatgcatttccacgaattagctcaccgtaaatataagtaaattggtgtcagctactaatcattttaatattctcccatactgttctaccagcatgattattaaggcacgctgttttacctgtgggggtcatctagccaaacagttgaggttaccctatctcatgtgtttactgagcacacacagacacatctgcttcccattagggaatcaggacctccactatctgaatgcctggcaccagcctaccctgctgtgaaggacagaggcctcctccctgtgaaattcacctccaaatatgtcatccagattgctcatttccctcaggaaatttcattcaggttaattttggcacacaattgggggtaattcttgagcaatttctcctgtgatggcttgcgatgtgtaaaattttcctacaacgtgttgcagaaatcactggaaaaaatacaaaggacatctgatggttatccactggtctttgtaacagcaagaaatatctattctgaacagcagtacacgatgagcaagaaacataaaataaaggtagatcagagagtagatgttctttctggcctttttcgacaggtaccgtttgagcagtgagaatgta

SEQ ID NO: 62145 - DNA, 1657 bp, Homo sapiens
atattatcgttagggaaagctgggtgaaagaccaccgaaactctctgcgctcattttaaacttcttatgagtcttacactatttcaaaataaaacattataacaataagaaagtaatgcaacaggaagatgggctagaatatgtattcacacactgtgtataaagtataatgttaaaagagccagtgtaagagagatacataatggggttggtccctcttaatcctgcaagaggagaaagccagagtcacttctaggccaggccctctccaggcttcatggtaactatgctttgaacttgttcctctgcacctaggtcactgtcacgatctactccttcaacaaagctagaaccctcaacacgacctccgatcctttgacctccgacttttacctaatggttaaaaacatggactttgatttggggccttgctttaaatccaagctctatctattattagcattttagccttgggcaaattaacctgtcttctaagtcttagtttcctataaatttcagcaatctcacagatggctttttaggattaaatggaaaaacatatatgtttccgaggacctagaagatagtaaagactgtaaatgttagacatgataatgttgaggaagatggcaaggaggaggatgaggacagtcagaaaggcctgttcattttgcatcctaagcatctctcaaatcccttcacgccatccccagtcccctcattcaggctgggatattgcaacatcctccagactttatgtacccaattgttaattatcgactttctaaaggagatttgatcctgtccagcacgacatagagcatgcaagcgttcctcatggcctgatagcttgtgattctctatgtgtatgtctgattgctcctgttagactcagattcccaaagtcaggacctgtgtctgattcagcttgggattttccaggcagccttttcagtgtagtcactcaacaatatcagtgatgaaatgcatctttacgtgtttcgatcttgtcatggcaggtccttcatgtcattcagatcctagtccagaggtcattccccagccatgccctcctagacatctagtccaattcttccctcattacatcatctgatcttcacaacagccctgtgcaggagaagggacagttgtcatgtgtgtaatttgcccttggcctcagctaaatattaaggtcttgaatatgtgttgtctgcctagttctcattctggagttgtccctcttgctttgtgaagtaaaggagagatatttggtaactccatgggaactcagtctcttagaggcctgggtagccactagaacactgaagagtgctcctagtatgttctaaggaagctattgatcatggctcccggtagacaggctgtcacctttagttcttggcatccttgtgcagccgcatgcttcactgaaaccaacctccaggctacttcgacatctaccaggaaaaactcttgcagcctttccttcccatgtctagattgatccagagcaaccatgctctgcaggaaatctggtgggggtgtgtccatcaaactgtgcagagcattttcatataatgtctgattcacaagatcaaataacattttgtctgtgtctgtggttatctgaagctatccatgctagtgtaatttcctt

SEQ ID NO: 62146 - DNA, 2842 bp, Homo sapiens
gagaaatacatagcaaacatggcatttggaaaggctaattggatgtggatgagcatattgagatgatgttctattactgtcagagataatgttttacagagatgctatttgtgaagagagaccagtcattattgatgggtcaatgtgcgcttgggaatatggaagcaataatgcccaagggcagtgcctgcagaaaggtttcaatcaggcatgcaactagaggggaaggaatgggcaccttttgatttgactctgcccacaggatttgacctataggacctacctgaagagacccagggttgcataacaaaatcaaaagtggactttgactggtttgctgctcactttgtcctagagatgtggtctgattattgcacttagaattcaagaaagaggacaagcctgtgatttggagaatatgtgtctcaagaattagaataccattctgatttcaagtatctttccatatcctcatgacccagtgaataatcctgtactcacaatatttcattgtccaaaccataatctacccacttccatctgctcatggaaaagtgacagaattctttgttcagaacatgagtcccaattttagattcaggaaacatgatcctgagccctgtgaggtcaggagtggaaagcttcagaagtagaaaaagattttgtgaagatcattccattttgttccaaagtttaatttttggtttttttaaaatagggcctgctctgttgcccaggctggagtacaatgatgcaatcactgtagcctcatactcctgacctcaagtgatcctcccaccttagcctccctgagtagctgggactacaggtgtgtgccctcgcacctggttaattttttactttttgtaaagactggatcacactgagttgcccaggctggtctcaaagtcctaagctcaagcagtcctcctgcctcagcctcctaaagtgctgagactacagacatgagccaccatgtctggcccaaagtttaatttgtgtgtgcgacataaaatggtcccaacggaaacatgaatgaggagggagagataaagcaaaaagatcttagaatgagtaatgggaagattccttttgtcgggggagggaattcaggaaagtcagaattcctttatacactgatgagaccagctctacagacagcactctgtggtttagcaggttatgatctcgtttgttgatgattctggctcttgcttaccttcatccttctgctctgggaaaagtgctctggggtaaccaaggaaaagtcctgcttctgaggcctctagagccacagttaccagttagaggttcagctcccaaaccatttaatttcctaagaaactggtccagggaacactacttttggaggtactttgctaagagtagcatctataagaagacatgagggcaaacttcagtttcagatgtggcacttgtcatgattccagagagattctttatataaaaatcccagcacagaccatcctctccccttccagagtccaacggggattttcagaacaacttcactgtacaacctgtttaagtaaatttctagcaccctacatcttccctagtctttttcccagtgttatttttctcctgatcatttaccaccaccaaacaaactctgttttatttacttgtctggtttaccgtctgtggctcccaccccactcctagaatatacatttcgtaaatagctagaaaagaaatttcttgcccagggatcttctcccttccttcctctgcatgctcctgatacatactatgagtcttttgttttctgtctttttgcagagcattggctgtgatgactacttaggctccgacaaagtcgtggacaaatgtggggtgtgtggaggagacaacacgggctgtcaggttgtgtcgggcgtgtttaagcatgccctcaccagcctgggctaccaccgcgtcgtggagattcccgagggagccacgaaaatcaacatcacggagatgtacaagagcaacaactatttgggtaagcttggtctttttccagagaaaaccgtctgtccctgccagatgatgtattccttcagaactgtgagatagacacagcagtgtccgagagtcccggggcatgcaggcagtgcccctggggaatgtcaaagtaccacctggcctgcgccttgaaatgagaagcttgagtggagaacgttaaaaaaaaagtccttcttgcagataaatacttaatatctatacatttaaaccagcctttgcttttcccaagagaaacatggttataaagtggataacagcccaaattattgctctgagatgggagaagctctttgcaaagcgcggagaccagccagtgtttgttctgttgggatttgaggtggccagggacaattgatcctatctataccttcactccctggaggtctaaagcgaagccatttttctcttctttctgcctcatctgcctggggcagcagacctatacatagtagtgtgcatgtcttctgaaaagctgtggaatcctccagcaatcattttgggcaacatcatcaatactgagaggccaattttaacccatttttctacaaaagatctttgttgatacttccttctggactttggagctatttgcattccatctgataaaaaccacaagccaatcgaacacattatttatttatttattttttttttttgagacagaatcttgccctgtcacccaggttcgagtgcagtggtgcgatttttgctcactgcagcctccgcctcccaggttcaaatgattctcctgcctcagcctcccgagtagctgggaccacaggcgtgcaccaacacacccagttaatttttg

SEQ ID NO: 62147 - DNA, 1622 bp, Homo sapiens
acacagtatctgtccttttgtgtctggcttatttcacttagcataatgttttcaagattcatccctgtggtaatatgcaccagaatttcatttcttttttatgtatatgccacattttgtttatccattcatctgttgatgggcacctgggctgtttctctcttttggttattgtgaataatgcgctatgaacattggcatacaactacctgtttgagtcactacttccaattcttttgggtatatacctaggagtggaattgatgagtcatatggtaactctatatttaactttttgagaaactgccaaactgctgtctacagcaactgccccattttatcttccaaccagagtttcaatgtctccacattctcgccaacacttcaagtgtgtttttgaaagagtatttaagcatgtgatataataggcaccaatggtcagctctgaggcatcaggacaagatgctgcgctgggctttgttacctgctgcaggtcatggcagcccctggagacgattaagtcacaaacaactcaaagtgatatcctgactcttggctgaatgttcctcgtcaatgctggtagatgaggaaagtgatcattgagtatttgttttttatttggactcagttcttgccttttcttcaccaaaagcttttatgactcttgtccagaaccaaatattcacaaaacaaagattccatgccaaagagactgtgccctcttgctgtgatttggaaagatgctgttgtttgttttagcactcctggacttacttttggattacatactttccacatggtgtctgacagcgcacctccctttgatttaggacagctctgatgtccttgcatctgtttacagggactttcttttcactttcagagtcctttgccttgaaaagctttcagatatgctggaacgaaaggaaatcaactctgccccacccccttctgctgattgtttcacattttctgctttgtattgatagttagcacctagctaccctggaaatgtgagactgagttttcctgtttgtacatggatttgtctttcattttctggggaaatagttaagctgtggtttgtttttgcttttaattgtatcgtctgtctcagaaatatgcaaaatgcccacacctgttttcctacacttaatgtgatactttcctcaaatgcaggaaacagttgctgagctggctgagtcttgaatttttatggaagtgatttgacaccgctatccttgcatgaggaataacattgtctcctagcccactctaggcagcagcgcctaaggacagcatcttcagcagggctgttaatcgctcccaggtctcctatctggattaggataatagctgagaatccattatctgcaagtccaatgtggttaacactgtccctagatccgcctattccctaacccacttggaagtgcatttaaatcttccctgtttgaatcaaagtcttgcttttttgtgatatgttagatcactgagctaccacattagggaactaatacaagctaagccccaagaagagatatctaaggtttaaacaacgtttaataaatatagttgacttaatgaaagagaagtgactcctgagaaaaacagtaatcttg

SEQ ID NO: 62148 - DNA, 634 bp, Homo sapiens
acagaatgtactcctggttgattacctggcatgcagtcagctctcaacacatggtctcttttagtaatgatgagttgaactgtgccttttcttccctcccctgggaagtgtttctctttttttagggtgtgagagagattgacattctctcccttgtctagcacaggactgccttgccctggggatccctagtgaaccattgctgggaggctcagatggactccaggcagctggacatggcgaatacatgagagattggcatagcgtatccccaggggaatgagaatgaaactagaatcaagattcccgaagatcaagccgtccaggtggaaacctcaagtagccaaacacagcagtgtggttgggctggaatgtttaacctctctgggagggataacaacattccagctgggacgttcaccaaaagtaacaagtaatcacatgggtgtgttctctatccaaatgaccagagcctccatctggctagcttcccatgtaattagtttaagagtaacaaaataccaggacattaatatatacaaaggagtgttccagaacatctaggcacagactgataaaggagacgtgggtgtatgtgcacgtgtacgttaaagatgagttaatttcaatgttt

SEQ ID NO: 62149 - DNA, 613 bp, Homo sapiens
tccaaatattttaattaaaccaacatgtgaatatcagagatatcaaaagaacaagaacattattaatttgggaaccaaggcaactaaccactttattcttttaagtcatttcctcatttagctccaatctcggtaacaaacatttcgatatctctacgataattttcctggatttaaaaccacagttttgatttttaccccttggggatttatttcttatctcttgggcccttttgaacaaggcagttatcagattaacttttagctcactggcctggggttgaataggtcatttccctcctgaatcataggctcctaagaattcaagccaaaattccaggctggctttaagtaatgaatactgtaattaacttctaaccaagcaagctaacattttgcttggagaaagcatccttttcccaaacaaatgcctttcaaataaaaacaatttcatgccctctttttccagcctgatactttccagggcttgggaataaccactgtgttgtgcaagagtatattcttggagcctcttaaaatccagtttgctctggtttttggttctgccatagaagctgcaccatcttttaggactatattgtttttaagagag

SEQ ID NO: 62150 - DNA, 702 bp, Homo sapiens
atggtaattatagctcacacacattgagtccttgctgtgtgcaagggcttagaaactgctgtgctgagctctttgcgtagattagttctttgaattctcatgacagagggaggtacttggagggaagtactattattagccttattttaagagtaaggaaatggaagcttaggaagagtaagttaataattgtcctgatctcacacctgggcagtgacctgaggagggcctgtgtgaccatactttgtgcttgttatatcactgagaggttacttggtccaatccctaccctaggaggaaataaaggcacaagtgccaaacccgccccatccattcttctctgaactttggacgggataaccaggttatctgattgctacagactggggaggacaacagctgggtgcatccccagaacatggggtgggtgtgttgtccaaactccaagtcagcaaactcagcacaacagagaatttttatgtcatgtccagaagcaatccacagtttgagaaaccaagtttgggtaagatttctggggtccattgctggtttacagggataatcagacagactatttgaaatctatcaggatgatgatgatttctgtcaggcctgatggggctcagctcatgaatagcatgggggttctgggatcagctccctgggacagggcaggcctggaggggtcacctgtaaaaagtt

SEQ ID NO: 62151 - DNA, 2997 bp, Homo sapiens
ttgcccaggctggtctcgaactcctgggctcaagccatcctcccacctcagcttcccaaagtgctgggattacaggcgtgcgccactgtgcccagcctaggctgactttcaagcaatgctctagtaagaaactctacccatagtgattctgatgattctgtgtacgctgctgcgggctcacgctgacttcctgttgactgaaggttgtctctcactctcgctctctcattcctgaaccagctgggacatcggggagtggtctgagtgcagcaagacctgtggcctgggcatgcagcaccgccaggttctgtgccgccaggtgtacgccaaccgcagcctgacggtgcagccctaccgctgccagcacctggagaaacctgagaccaccagcacctgccaactcaagatctgcagcgagtggcagatccggaccgactggacctcggtacgcaggcagggcagcccgctctgcagctccctctccagctcccaccacactttccagcctcccccaccaagacctgagatgggtaaccctgagttccacaggagggaacccgtcccgtgggggtctggacggctgtttttgcaaaccacaggatgtaccaatagttcaatagagttcagggtagtgtgtgccacccacagccaactttatgagtgagcccagggggagccctctgatactggcctcatctgctttgtgagtcatggtgaagtgaaggttggcaactgctggtagagccaactccttccaattttccctacccattttatagctgaaaagactgaggcctggaagaatagagtagtgtcagtcaaaattaaggctgttaaggcagaaataatttgataaaagatttattggaagccaatgtaaggatcagcccaagaagacacacgaacaacgttggacatgttccaaagtctgttacaagttgaaaggcttttagaagaaagtttaggagaggagacggggaccccttgaatcggagttgtctttttcattggagggtacagcacagaggttgcaatcactggctacagatgacgacatacaggctaaaatgttttaagtgcaagacagtcaataaaacttcatgagtcagaaataaatcagcaaaactttatgactcagaaacaaaccaaacaaaccagtgtcctcttcaatgtccacaggttacgtattaatcagtatgtcaacagtttgaagaattcacaataagatttgaggaactgacaataatattctttactctaaacaggatgtaagccatgaatcctaagaccttcttcccaggcaacttagaacatagtttattcttcaagggcagaggtgcatgacttaaccccttgcctgccatggcgttgggtcctgtttataatttggtatcttattgccacagagagtccattctgtcagtcttatgatttctcccttaacatcagtgctggtcggttgtgtctagactgcaaaacggaggtggtatgacagggtgtgtccaaccttccatcctgtcatggccaggaaatccatttttaaggtttctctgggggtctccttggccaagaggaggcccattcagtcagctgggaggcttaggattttatttttagtttacagtaggcgaggcatctaagaaggtcttgtagaaaagggttgtggagttttctagggctcagatccctgccccagctggtgacatgcatgacagagcctcagtctcatggggctgatcacaaaggctgcgggctccatactggcaattctctcccagagctgaagctgctggttcccctgacgtcagtgtgctgtgtttcagtgctcggtgccctgcggcgtgggacagaggacccgtgatgtgaagtgtgtgagcaacattggggatgtggttgacgatgaggaatgcaacatgaagctccggccgaatgacattgagaactgcgacatgggaccctgtgccaagagctggttcctcaccgagtggagcgaaagggtgagtgtgatggcgggcagagcgccggggaccgaggtctgccaggtgcctccaaaaccacacaaagatgagtcactagctcagaatcccaagactgatttctggctctggggggaaaaaaaaggcccagagaggaattatcgtaggctttctatccttatgtgaggactgagggtctccaaaggtgaggagggtgtatgcaaaacttgattgaattctccttagcactccatgtggtcactccataatactaggtgaagtgaatcattacatcccatcgttcatatgtcttgtaagtgcctggtgtctcatagacactcagcaatggcaggcccctctactgctttttgccaactcaaaacatcccacaccccgttccctccccagtagcctggcctcccatgggaagtctcaggtgtcaaagaataactcaaaggcatatatagtcaaccattagcccaccagttacctggatataagggaaaacagtcatatattaaattcatccatcaaaggcaaaaggaggatttatatgaaaaggggtttctgcagatggagtgatgttggttacacaacagcatgaatgcacctaatgccctggaggtgtgggcttaaaagtggttacgatggtcaatttcatgctatgtgtattctaccacaatcaaaaatgaagtttgagaaaagacactaaacaaattgtagaacataccttgggacagggagaagaaaagaggaaggagataaggaattgtgcttcctttcctggtgggatcggcgcattggcgggcatgggatggccagtcagagggtttgcccagggcagctgcacagctgtgagaggcaccaagtccagattctggattctctaggagatctagggagtttacctgggatgaggacatgattggctatctctgaccttggttagcggcctacctctcggatacactagttctgccccacttcccttgctagaatcccgtgcgtacacgttacctgt

SEQ ID NO: 62152 - DNA, 2570 bp, Homo sapiens
ggactgcagtggcacaatcatggctcactgaagccttgacctcctgggctctagtgatcctccctcctcagcctcctgagtagctgggattacagttataagcctccatacacgggtgatgttttactgtttaaaacagaatattttaaaagacttcagtaagtgttcttgtgcataaatctttatatgcacctcttcttatctctgtaaaatagtgggggcgtggaatcatgttaaattatgggaaaatattatgaatgctttttgaactcttaatacattttagctaattgttctccagaaagattatttcggtgtagtcttccaagcagcaactgagagcgcttttacagtcattttgttgccatgattctttagtttgtaaattccatgtctctacatttgccactctctgaaaaggcagggggcacagagcacaatacgtacagagaaaaaacaactctgtggggaaaatagctgcagtggttcattcctctgtgtgtctcccacatttatttagaacagtaaaaagctacatgtaaattttccaaagatttccactctacctatttcctctccaataatgacttgcagatttccccttaaagtaattttgctttgcatttcaacataagttcttgccgaatctagcttggcttaaaattataaatagagcaaagaatgagcactttattctattcagggaactctttcgttcgttttggaaaagatgttctaaatcatgcaagttgggtgctatggtgtaagtaaataatttttgccttatctaccctcagaatagatcatgaattctaaatgttcatgcttattttagagtagatgagtgggaagggagtactattgggtttaagaaacgcacattggctttggtatcatctccatgaccatcacttatttcgtatttgaccctgagccagctactgattcaccgagcttcagttttttcaactgtaacattgctgagtaaccgctgcagtaatatatttgaagctatgacctagatgaggttggcacagtgggaaggatttcctgtgggctgcttcattcttcttcagctgcgtgttaccaggggcctttgggccaccagttggtcttagaaaaggttcagcccctggaatgaccagcggatggcagtcttccacttttgaatagttgctttgtgtagaaaatggcctcgttaagctttagtctgaactatgaaattttttattactgggaataaacacgtgttgagcacctgttacatgccagtcatgaacgagacacagcttccgactcaataagctcaagagggagagaccaaagaaaattaaagttcgcaaacacttaagagtacagagtgtgtcttattgcccaatttaaaattaattaatctttacctaagtgaattgaggttgtaaccccagtctgaatcttctgttaaacttctagggacacaaagtttcttctggcttaatgactcaccttaaaaacatcttttcagctgcttgtacttgagagtgggccttatcagaagtaagcatcgttgacttttcagttctacaaatcaatgataggtttaagcccatgtgcaatttttaatcacaacaggaaaaaaacacttttagaaagtccaccagccttagtttggtaacacctaatttctaagaaagttttccaggaaaaaaatactgaatcatttaaattataagaaatgatgcataaagctgaagttcaagaatagtcattacagccttatagtcccttaggggccagttgggccaagtttaggatttaactgttgctggaatgagaaggcagtccccaccagagggttgcttaggaattccatgtgtttctgtgttttatcagcccagaagttcaattacgagtcatgtcctcttctgactagcaaagcagatttggtccttttaggaacatcctttaaggacagtgggtgggtgtggtttggagcctcacctggaaggttagtccccactccctggtagggacttctccttccccttgcttctgctgacaggcttcctggaccaggtcgtgagtggggagctcctttcatgtttacacttgttgggcttttcactgaaggtgttgtaataaaatgaaactcctctacaggcctcatccatgtgatgtcctcccattgggcactggcatggtccttcatattcttcttttaaattaggtatatggggatgtgaagacactttcccaaatgtatgtgcattacttggttttgaaagcagaaaattaagttagctagtcagatggaaattacttggaaacaagtagcctaagggttggaaacatgaagataactgaaattctgtttaccttttattcttttttttttttttttttttgagatggagtctcactctgtcacccaggctagagtacagtggcatgatttcggcttactgcatcactgcaacctccacctcccgggttcaagcgattcttctgtttcagcctcccaagtagctggaattacaggtgcacaccatcatgcccagttaatttttgtatttttagtagagatggggttt

SEQ ID NO: 62153 - DNA, 1992 bp, Homo sapiens
atttattgcaatagatatatttattctcatctcttcgcgaatcagtgatccacaaaagtgcaactgcaggaattctttaggtacagaaacatgcctaattgccatcacttctcactgaaagcatttatccctattaaatattactttttctcatgtgtgcttttctctgtggattacattttatctactatttgaattactccatcttgtttcttattgttgattttcacctgatgtatcttcatcaatttcttaattttcaaacgttctatgtatttttaaggtatgtctttcaggactatttttgtctttatttttacccaatctataaacctctgtattttaagagttaaattttaaccatttatatttattgtaatcacttatatgtttggacttttccctaccatcttattttgtgttttctattttcatgctttcttgcttctttcctctttcctttcaacatgcttgttattagtcaggttttcttaattccattttttcccctccaacattttggaagttataaatcttctagtggtatttcttctgtgataagattcaaatttttagcacagaattttaaacttttatgtctccattagtgtcaagttatcagtgaccacatcctctcctaaaagaaaatagaagccttccccttttatttacctccactctctcaatctacaatatctccaaaaagatgttgatattatctggatctagctccagattaatgttaattttatagaaaatatagatttaaattttaaaatagttttctgctttccccccaaagatttttttattgaaatataattcacgtaccataaaatttaccctttaaaaatatagaattcattggtttttagtaaattcacaaagttgtacaaccatattcagcattatccaattccagcacatttttatcattccaaaaagacacctggcatccattagtaataacggcttttattggtgtctttgccagctccttcttttatgtcctgtgtcttcttcctggttcttttttattttgctaaagactataacccaggaagtctttcaaataggatttgtaagtggtaaggtttctgagcccttgaatacctgaaaatgacttcattttgcactttgacacgaatgcttctggcagatgactcactgcttcctcttccttggcacagtcaggccagcccggctgctcttggccagtaactcagctgatcactcattgtcctgaggcctccatcctgatctccatgtccaccaccaatatagcctgaagcacatgagttttgctagagctcctcctctgtgtgcatttggactatagtttccttcttcaatttgatctcatctgtctttcattgttcaaagattccccataatttctggtccatcaaggctgattgccctttcttgtcttcaaatgctgtctcatgcgcgtgtgcaaacacacacacacacacacacacacacacagagatagagatacacacacatgaacacattcattcactttccagacgcacatattctgccatttctgagcatttacagtaagagaaggctgagacgggctcattctccctgaagtacacaatctcttcaaggacttgccaaaaatagcagaagataactacaagttttgatcaaagtttgcagtcttctgttctgccacacacttagtacagatgtaggatctcatagcattgaggggtctttcagattatgttttcaaacccctcactttctcttttcagataagaccacagcgacctgggaaagtgcaacgtcttagccaaagacacagaactatttagcgacactgtctagactctagtttccatgtctcctgacttcagtctagtgttccacccctgccgcccacccctgccccatcctcattcctcctgcaggagaggccagacctttgcctgctgcagcttgtggctcttctcctgccttcagttcttccattgcctg

SEQ ID NO: 62154 - DNA, 366 bp, Homo sapiens
ttttaaattttgtgtttttaacaataaccttttaaaataatggtgaacatatattccactgtctggttgattacttatatctcaataccacatttcattccagcagcagagttaagtagtattgctttaattgcaacaagctgagctaatgtgggaagaatgcagtagagtggcacagaagaatggtgagttcattgttattaccctcctagcccgtgagaacgcccaccatcccatgagttcctacatctatgccatgaggagcagttgggtttcagcacagcattctctatctttgcaaagttgttgattttaaccctgtgttttgaagttgtgctttgatttaattagcaatttcattttgat

SEQ ID NO: 62155 - DNA, 591 bp, Homo sapiens
cctgtaatcccagctacttgggaggctgaggcaggagaatcacttgaacccggaagccggaggttgcagtgagccgaaattgcaccactgcactccagcctgggagacagagcaagactccatctcaaaaaaaaaaaaaaaaaaaaaaagaaaattccagagattactcagcccactatcatctgatcaataaaaataaacagatttcaaacaaatacttacacactacaaacagcaatagtactaaaatctgtcaattatttaaggaatgtttgtcattgacaaacagaacacattttgttatgataactcacactgaatcaaatacattctaaaatccattaatcttatatgctaagacatcaagagaagcatttctttgcagtattttttcaaaaatattttttaaatgccccaatgccacaagaaatattttaactgaaaaaaatcacacttgaaagacaactagtagacagactgccctaatatctgcttcttttagcaacaaactttgattagccatttattctaaaagccacacagtgaaattcttaaaattcttgatttcggccgggcatggtggctcacgcc

SEQ ID NO: 62156 - DNA, 1916 bp, Homo sapiens
catgacagcggctatctgaaagccgtgatggctagggttagtgctagtcggcttggtgatgagcgagctgggaggggttctactaagaagagtagggcgaggggcacatgggggacgcaatgggttagggggcggtcgagactttgcctgagaactgtaatcacgtcagcccaagggaggatgtaacgtagtctagaagctccattaagagtcctaagggactctgaggggtactaatggggtctgctgggttggggggaccgtgacagaatctccggggaggctggagggccggaatggtgcccggccaatggaagatacagggggtggggtctactggggatccggggccgtgatctggtgtttgggaggctcggcgcagacccgctcgcggggcgtctccgctgggacggggcggggcggcccgaccggagccaaatagcgaggctgagacgtgggccaggacgggctgcagggccgctgggcgcttgggcgggtcttacctcgggctccgccgcggtggccaccgcagccccctcctcttcgacggaagctgccttccaccctccgccccagggtaggaccggagatggcagaagaggccgaggccaccgagggtcggacggttccgggagggtgggcccagcagcctcagggtccgggcgagcggccgcggcgcatcccccgccctgtcagagagactccgcccggcctgagcaggcacatcccccgccgcaccccgcccagagagcacgcgttggaccgccgcctcaaccgctgccagcggccgcctctgccggtgcaactactgcctccgccgccgcctctcgcagtccgggctgtcctgtactctctcaacagacacagccaaccgccgccgcgtcccttatccgcttcggtcgcgcgcccccgaccccgcgcacgcggccccgccccgcgcgactccccggctgcaggcgagcaggcgcgcgcgcacttacctcccacgccccctactgccagcacgggtcggccccgccctgtcccgcccccgcacgtgacgccactggagagtacagcgtgcgcttgcgcagacacgccccctttcctacgccccaggcggccccgcccaaattttttcttcttcaccttacggcagagcagggaactcagctttagattctccctgtactggaaagggatgtcgcaaggttggggacgaaacctctgagtttgcgaccgtagctgtcgctttccggccaacacagaggtgcctgaaggctggttggggtggtgaggcccgaggcaggtaagaagcctcctccccacttcggtttgtctcggcagtggatcgctctcccacccactcagattctggcgtatccgtgctccctcccgattctggacctggattctcagcgccgccggtcatagcccccgccccttttcaaacacgcacgctctctccacccactgccccctccattgtccccgccccgacctccgtttccattcatttctcagacttttcactgagtggtttccatgccttgggttccagaatgtcagaggcgaattaagtggtgtcagctttttgaagtgcttttgtataggagaccgtgagagaatccgcagtggtagtacaataaagtgacaatagagaaaaatgcacgggatgctgtctgcgcacagaagaggggtcccaggttgtgtaggaggataacgtgaggaagccctttccagggtgacttttgggtcacttttagaggactgtgttaaaagactagtaatccagtacctggtcaaagaaatacgaaaggaggtaaaagcagaataacgggcgcaagagcatgtgacagtggtggtctgaaagagaaaaaagaagtaaaataaacctgatggaaaccgtactagtgtagacttccctttaaagaagc

SEQ ID NO: 62157 - DNA, 560 bp, Homo sapiens
ctctacctgcttaatccaacctcctcagcctccacccacttctactacagcactaattcacccaaagggcaaatctttgaaatgtaggtggcaaatttcagaatattgccaccaaaacccattaaggtatgggtgcaaacatgtctcatcataaaagcagctgtgtccccagggctgttcttttttccctaagactcatcaaataccctcagcatataaagctcataaacagggcaaaaagcctaggacttgtgtttggataaggctggtctggcaatcaatgtcacattctgatatatgtggtaatgctgagagcttttcctctattgattccaactacaacgcaaacttgaagttattgacttaagctaacagtggcccaagctaaataactcattgctaaggtcacacagacctgattttctcaatcgctttgttttttttttttttgagacagagtcttgctctgtcgcccaggctggagtgcagtggcactatctaggctcactgcaagctccacctcccaggttcacgccattctcctgcctctcagcctcccg

SEQ ID NO: 62158 - DNA, 1084 bp, Homo sapiens
taccccactcccagcattacaggagatacattttaagattgtgagctcggtgggctatgactcgtctagtcatcctggtctctaactctgacccccaaacagcccttgacccacaccgtttgcgttcagtgaacgcgacagatttcctgccccctccgtaaccagatccccaccccaccccgcggcctccgcgttccacaatcaggacgcatttgttaaaaaatgtgccggataattaaaaaaaaaaaaaagaaagaaaaaagaaaggaaaagaaagaaacgtgccggagaggcgcggaacgggcgagggccaggaggccccagcaaagcctgcagaggtttatcccgcccgttacgaggcccaaggccatcgcccggtgaagcggggtgggccctgggcgcggccgctacgtgcagcccggccgcggcgagatggagcgtggtccctggcggccacccggcaagggccggtcgagctctcgggccccgagccattcccaggccctcgcaggccgcccatctaatcccggccacaggggacggcaccgcgccgcaggggcaaccgccctgcctcccggcagcggggcaggccaacgttacgtaagtctccagctgcccccgggccgccgcatcccgcccgccgcgcggggcacccagcccagccctccgcccgcccgccccggacacggggcctcagcaccgcccgagcctgctgggagctgggaggcggtgatggaaaaggggggtgggaccgcgctcggagaccggagcaagtgggcgggcgcgaccagagcagagagggagggagggagcggacacgccaggcgaggaaggggatgcgggggagcggacgtgaccagcaagcagggggaggggcggcgagagggaactggggcgcgggaagggcggtcgcgcatgaatggagaatggacgcgggaggggaaccagaacgcagtttcaatgagttacacagaaagcattagaatcaggggacacgcacagcttgaagaggagggggtggaaggaccagacttaaggaggaagaggggaaaacgagcacggaacaggcggcgcggagaaaggg

SEQ ID NO: 62159 - DNA, 1370 bp, Homo sapiens
aggcgcattgaggattggggcaggaggaagaggatgggaccagaatgagggggtagggctggggcgggaaaggagccggcggacccgcctgatctggaaggaacggcgctggggacttctgaagagcaggccccaggcgtgaggagccgttctcctctctctgagctccactgcatcccagacgccctggatcctgcgccgccctgcctgcgtgcccggggccggccggcgcgccgggattccgcactagccgggcgactggcccttggtggggactgatggcgtagcctcctgcaccgctcacctccggcgctgaccgactcgggctacgctgcaaagacgaagagatccggagccacggcgcgtgcagctgctgtgcaaggagccactgcctcagcctcaaggttatcccgctgcgggccgccgcaatccctccgccgccccgccctctgcccaatcccggctccgggcgacccgggccccgccccctgcgtccccgcgggcgcagtcaccttcaggaggaagcgcggcggcggcggcggaacgcgcgggcaggttgccctttcggtgggactaaattctgcggcggaaggacacagattcagagtcacattttaagaaacctgatgaccaatggggacgcggcggggcaacggggcccgcccccggagcgactttcctcccagacccccgggcgccgggccacctgttgccgccaagttgggctgccagatggggtgtcttttcttggctctcggcccaggccaccccagctgtcccggcctacctgggcagggcccagatttatgggttccggggcagcattctcccggccccgccctgccactccccactcctccgggtgtctgctctggcgcaccctcggagactgagctgaacggaaagttggggagagctgcagacttgtgcgtggttggaggtcctggccgccttcggaggggctctggcactggagcggcagtagggagaactagggactgcgaagtgggcctggagcgggagcgcgaggccgttttcctcttaggaccattcattgtgttaggaccgcggaacaaggaaggaccggttggggccatgtgaataatttagtagggtctggaatcctgcagagcgaatgcctcagagtagaaagtaaatagacggtgttgatattagcgcagagctgggcatctggaaatatcaagtcagaacattagggccgataacctatgcaggagtcagcatttctgttttcacctttgtcgtgtttaagtcagtattgttggaacttttcttacatttttctacaagacattttctgatttcccagttgttagccagcaactaatgatgcgagcagttatcaatta

SEQ ID NO: 62160 - DNA, 1232 bp, Homo sapiens
ccatgggcgcttctctaggtgtgacaacttcacgtctagtcaaagcagcttcagagctcaatgtttaaattgtgggttgggctcccggctttgtggtcctggaggaggttactccactccatcccgtgtgctcccttctcaggagtaggccactaaacaaagactactaggaagaatcactgaggggcgactcccgcaggttagcgctatctcgggcaccccgcagggagagaggacacggctgccccgcgaaaacactctctggcacccgtgcttccaggacaggccctgaggcctctcccggggaagcagttacacctgttctccggggctcccctgaagaccccaaaaacacccaacacctgcctccccaggaaagacgctctgggcccgatctatgccgcccggccgccgggcctgagtgaagcctgtccagcctaggaggggccctcagaacctcccggtccaagcctctcacttcgtccacccctgcggagacggggcgagccccgcacccttcccgtggcccggccgcaccgccctgtgcccgtggtggcggccacacaggccagcctggcgagtactcacggcgaccccgggccgcgcgcggccgcagccgacgggacgagcggcccgggacgccccgcgggggcggagcggcaggccaaggggcgggggccgggcctggcgggcgaggtcgcgcaccccacgcctcgtcgttccgtcacgggcgcgctcagccactctgcgcacgctcgcgcggtgacacgatggcacgtggcccgctcctgaccaacagcctgacggcctgctcctgggcgcgcctcagcagccgacgccagccttgagacgcctgcgcggcggtcgctagtcgggaaagggtgcggagtggggggtggcgcctgcgccgtgggtaggggaggcagtggagaaggaagagggactctgggggagtgcggggagccttccaaaggagaatacttgcatttagcgccccgagtggttgggaggaacaagcaggaagggcaacccaggttgcctgtaggccgggagggagtcccctcgccggaggttggggccggcaggtagagactgagggaagtcctgaggccttgctgactgcaggattctctggttcgacaatggaagtcgaacacctcgggcttttaaaaattctggcatttaactcatttgttccccggtagctgcagcgtgatggagagcaccctggc

SEQ ID NO: 62161 - DNA, 1977 bp, Homo sapiens
gagtgcagtggcgcgatctcagctcaccacaacctccacctcatgggttcaaccgattctcctgcctcagcatcccgagtagctgggactacaggcgcgcgccgccacgcctggctaattttttgtgtttttggtagagacggggtttcactatgttggccgggctggtctcgaactcctgacctcgtgatccgcccgccaaacattctatgtgccagaaacttgtatgtaactttgcatagttcttgtattatgtctccccaattttgagtgttttctctggtctctactcagcccttgctcacagtctcactaggaccctggctagcttgaacacggtcagaaggatcaccttagatttctgctggcacagtattttccataaattaatctcctgattgaaccgtagtcctatagtagttatctttggatgaaaacctaatgcagctcgaggaggaagtggagtgcctgtgatcagagggctggacaaaagcccatagggcgtctctggagccctgggggaactgtccccaggcaggcactctcagggcccaggaacagggcgggacaagtccgactcacctgtgaggtaaggacggggccaagacccggaaccgaaaagcaggtcacgatagcgctggaaggcctcgtcgaggactgagcagccgggctgcgcggccgagctgacatcgtactggaattgaaagttgttcgggtaaaggacgtagcgctggtcggaggtttggaagttctgaggccagggccagagggccgtcgcccgtcctgcgaacgctgccgccagcagcagcgaaaaccaaagcctggagcttgtcatggcccgctggtctcccctctcggagggggctggccacgtgagaccctggtcaggtgagcggcgcccccgtgacttatcggcgaatcacgtgaccagaggcggctctgcgcctgcgaccccaggaggacccacaccctgccctttcacttccggcctggacctgaggctcctgctacgtgcagcggattgtgccgggcgtcggcaactgctcggctcgccagactgttcacgggcccagtagagcagtaaataaccggccacccctgcggccgtgccggccgtgatggaactagacagctcacccgactcgagaagaacggggtggggaggcgaggacgcagggcgacctggagaagaaagtttcccagatggctctagggtgaatcttgaatgttgtgatgcagctcgccaggcctacggggaggtaaaggacttgccaggctgaagtaacttcagaagcagaaaaacggaggattaaaaccacaagtcgttgtgatgtgaaatttcgtggggcaagaaagggccggaagtaggtagtctgcacggctctgctagagagaggatcacaagatcacacaaatgtgatctacttatgactggaaaaaatgtgtactttcagagccagcttgaggcattccattgcctccaatatgagctcttcccttcaagattgactataaatctcttagttacaactcacatcccctttccccagacaaaaccccacatagcccggtgtgtatttactgaaagcagtaagatattgctggggctttgggtgcaagatggagagtgctcagagataatgacaggggcctggtcctgcagggccttacgtagaaagtcaaggaatttattctctgagcaattgaaaatcatcccgaaagatctgcattttagaaataccatgttgagtagttgcataagaaaccagttaggaggcccctttttattggaggtagagaataatgagagactgaactacagaagtggggaaggaagacagctgtagatccaagaaatagtatccggaagagaggcttgagaagtgatcaaggagaattccacagttatcagagaccctgtcttccttgttcaccactatattaccagaacataatacaaataatgctattgttatt

SEQ ID NO: 62162 - DNA, 954 bp, Homo sapiens
gttacgttcaactgcattcagtatatgtatatttaattgaattaatatggagtacatcttcccctacttgcactcatcctattagctctataaaatctaaatgtaatgaccaaaattagtctagtaaagcacaacctatcacaatctccctcacaaaaatcctagtaaaataatgacaaattttattcaaagaatggaaaatcttcaaagtagcataagagaaggagtacagactagagacagagagatgaatcagggctttgatttccacctcttatcatttgcaagccgaggagccttgagccaagttatgtaaagagaaagtgaaagaggataaaaaagaataaaaaagggacctttctaggggaagggtacaagaagggacaatggcatttctagcaggtttttgttttgttttgagacagggtctcgctctgtctccaggctggagtgcagtggtgcgatcttggctcactgcaacctctgcctcccgggttcaagcgattcttgtgcctcagccctccccccgagtagctgtgattacaggcaagtgccactaggtttggctaattttttgtattttcagtagagacagggtttcgccatgttggccgggctggtctcaaactcctagcctcatgtgattcgcctgcctcggctcccaaagtgctgggattacaagcatgagccgccgtgcctggccctaacagtcttatatacacccaaaatttcaggcatgctgaatttctggcagttccccaaataatgcatggctcaaatatgccgtatttcacacttacatattttatatatacattcacattcctcttcccagaacatcatttatttgtcctccaatactcagctcaggtcacactttttttttttttggatggagtcttgctctgttgcccaggctagagtgcagtggcacgatcctggctcactgcaaac

SEQ ID NO: 62163 - DNA, 2799 bp, Homo sapiens
aatcaatttccaaagggaacctataggttgaacagtaagatttatcaacaaatcaggggttttgattttaaaaggttttcaatctggccaattcttcagattatctcaagagggagccttcttatgcctcttcttccttcataacacttctctggctcgcatgtcctgtttgcaaagatttaagcccactcttaggcataaaatgctcttaactgacatgacccctgactaacttgcctaatattttgccatgtaccctccatgcactttaagctccccaaactattacttacttgacaccttctgcgcttttgcttgttctctgcggctagaccatcttccctaccttctctgttgaactcctagccattcatcaacactcagctcacatagcacactttcagatgagattcaagcattatctctctggctacatttggcccttgtagatatttctattattgcctgtattttgttgaagcattcatgtcttttatgtactacatagtacataatatatctacattacaaagcatttttatgattcatgttttggggcatccagcggttaaaatagggcaagggttatgtggtcttggccaggtcccttttcctttctgagcttcaggttcctcaggtataaaatgggtactatggctccgtgaagatgagacagaatatatgtaaagcccttacacagtgctcaattcatgaaaatcatcgctgtttacattgtttagggccctcaagaggcgctcttgtcagcggggtggaggaaatgcctctttaaaatgacgtcattataggagacttaaaaaccactgcacgtctgtacaagtggacagaatcacacagctacctaaagtgggttcacctgtcatacagtttagaggttccacttacaacaggtttccatcagtagccaaagcaacagaaattttagcttaacggctgagggcttccgggattaccgcagggcgggcgggaagcgcctttccgctccggagggaaggccgcgtccccaagggactgcctaagtgggctggatccctatggcctgcggcagacaccaccacgtaggcggtccaggggtccctctctcggtgactggtgaccaggaggccgcaatctcttcacataaaaggtctacgggtttccgctcggccctcacagcggcagcggatcgaaccaggaaagcaattcccgctcggctcccctcgggtcccaggcccaggaaggccgggccgtggggtctccccgggctccacgcaggggcggtggggcggggcgcagtgacgcaaagaggagtgacgcgacgacgcagcgcgacgcggtgacgcacgcccctttgttggctcagtagcgatagcagcggccgtggaggtggcgttggggactgttttctctcggaggccggagcggagccgcgtctgactgaggcgggcagcaagcggccccctcgctccctccctccctcctccgcgccctccccgccgccaccagccgtcaaacgccaaccgccgctcctggggaggagccgcggctcgcggggccggagccaggcctgcgtccggacatcagccggagccggagcgagagccggggcctcggcgtccccgccctctccccgcctcggccagcgtccgccgggcccccgcgcgtcgcgccatggactcggacgagggctacaactacgagttcgacgaggacgaggagtgcagtgaggaggacagcggcgccgaggaggaggaggacgaagacgacgacgagccggacgatgataccctggatctgggcgaggtggagctggtggagcccgggctgggcgtcggcggggagcgggacggactgctgtgcggggagacgggcggtggcggcggcagcgctctggggcccggcggtggcggcggcggcggcggcggcggtggtggtggcgggccggggcatgagcaggaggaggattaccgctacgaggtgctcacggccgagcagattctacaacacatggtggaatgtatccgggaggtcaacgaggtcatccaggtgagggtggccgccgcgccagctggaccgggcccgacgggggagcggattcaggcggcacgcgcggtcccgagggacaggcctgggcctggtgcgcagcctagcccggtgcctcccggccttgtcttctccgctgcctctgctggggatagagggtgtcgaaagcagaggttcgccgattagccgggtgtggggaggtgcgctgggggcggtgcttcccaagtcctgctatggcggaggccttcggtcgcctaagccttctcttgcgggcaatttctgccagtccctgggccgggtgtcctttctctggccgggcgatcgcctactggggcggggcggaggaggtggggtggagaagaggagtcaggaagaattgggccctgacgggacttaccccggccgtagcctcatttgagcacttttggaagggattagagtaggcctaagagcagcttggtgtacagttgccccaagtgggcaccagttaataaagaaatggatcttggcagtctcaagtgcctacttaaaggtgggggaagggaagtatttctcggaagaggtgctgatgggccttcttttcagatggtgaggcttctgcttacatcttttttatgtctttgctgtttgggacctaattgctactttttctagtcgtagcagatgacttgcttgaagctgttggaatagttactgcatattgcatacccttccttgtagctaaaacaacaacaaaacgcagtgttgtctaatattgga

SEQ ID NO: 62164 - DNA, 695 bp, Homo sapiens
ctagtgacacctggtggatttcattgggactgccatggcgcctatggggcacagtccagccctgacagccaacaggctcagaagcctgatctagcggtggccgggaagacagatactagcacccaagggcactgacttccattcaccccaggagtcttccattccgtccccctccctccttctcctgtctgcactgggtggcctgttctgtctgtccctccagtgcacctggtgacctgttctgtctgtccctccagagtgccagctgccctgcaggctcctcgaggctgagttcatggccctgcccctagtggccagagccggcttcacaggataacagccagctaagctccaggggctttccaggaaaagtgtcccttgaaaagggtgtggctttttcactgctcccaacagcaccctagaaatggcttggccttttccctcccctgagttccaaaaagaacacagccagcagaggacacattccctgacatacgagggactggaagactggtagagatgtcaggtcacaggctgccagcacagcacccccatgattggccacgggagtgctggaggaatggtgggggttggctgtccactggctgggcatgacagggagactcactggaggtggtgcactttggaggggcgatgtcagggatgtatttgggtctcagtaaagagatctgttc

SEQ ID NO: 62165 - DNA, 2047 bp, Homo sapiens
cagattttatgtctaaattacaagggcgagacttaaaagtatgaattggggctaatgtcagtgctcaggtgcagggatcctccgttttgttcatcacacagctcccggcactttaataaatgaggctcaaagaaacgacgggcttaggtcatgcagtagtcaaattcagaactcatgtttgattccaaagcccacacgttttcctagtttagaaacactaaacatttaattcaccgcaccgggggccagacaggtaatggagaacgccttaagtatgttaggaagggaagttatctacagtcgcagccgctattcagatctatttcactgccttgcagaaaacgccgactgtcgtctctttatcccatggccgatttcttgtgaaatctcctaacttttaaatatttccaatcaaaagactgccgttcaaatgcagcccaccaggagcatgtttgcaaactctggagtaaacaagagtgggaagctgataaggtgagtacctcagttcgatagtgacagccaagaaacggggagttttgtacctaaggcgagaaagaaattctccgccgaaatctcccggaagaaggactgaattaaatgcagattagagtcagggcagggtaaggtggcgggagaactaggctgccatcccaggtggctggcctaccagccagcgcggccggaggtacagaccatgtacagaccacggcgaggggtgttaggggcttctcgggataaaggcagcgagtggctgcgcattccctccccgactctttcagaggtaagccttctgtggagcagaccctaatcctccccctgattccttaggtcactcggcgatttacttccttcccccgcttcctcacagtcctccacagccctacgacttccgcttgcctcgtcgtctgggaaaccgccgacttccggccgcgcagcggtgggctgagctaaaatggctgaggagagagtcgcgacggtgagcgccgagattctctttagttgcccggccgcagggcaaggcaagctggcgggtggcttttgtcccatgcagcggttcctggagagaggcggagctgggtgccgagcgtctcagggtgggcggggcgacacggtcccctttttactgtcccgggaactggtcgcctggggcaagtctggatacttagcagcacaggtcctgttctaggactgtagtccctcttggggtgcgctggacggagaagggagacttttcaccagtaatggctcttaccgtagtgccatctttttctgtctcgggggtttggaaggtaatgactagcacttgtgtagacagttcctgttaatcccgtgaattgggaatttaacatgcctggaagcttgcagcgtcactgccttctgccagtggagcgggactgtgttttttctgtggtgattaagtttaggaaagtacggttttggaattcatctgaaggctgagttgggcgttcactccacagaactgctaatatagaggaacccgatgaattcaggatgacctagtcgctattttttgaggcatatatctataattggatctaatttcggtaaagtgccaagtgtgaagctttgtttaccttgctttagtgttgggtttgaaagcctgttctgtccatttgttagaatgattttaggtattcggaatttattgtctttcgaaaaacgccctggaaaacagtacaaatagcagcctttggctgttttacaacttagttttggctaagcagcaaggttagtgttattgttagagggccttttgtttgttttctactctcatttgcagagtagtcatattattctagtctaattagaaaactctgaagacagaaacttttttttttgagacggagtgtcgctgttgtcggcccgggctggagtgcaatggcgcgatctcggctcactgcaacctccgcctcccaggttccagcaattctcctgcctcagcctccggattagctgagaatacaggcgcctgccaccacgcccggccgaaacatttttattaagctaagaaatttaaaatagctag

SEQ ID NO: 62166 - DNA, 2625 bp, Homo sapiens
agtgagcagtgattgcaccactgcactccagcctaggcgacagagagagagaccctgtgtccaaaaaaaaaaaaaaaaaaaaaccccaaaattatagctaatatcgaatgctttttaaagcaggcactatgctagagagattacatgaatgatgtcatttaatcttcaggccaagtttgctctactttacccctcccggccccaacactccacagaaagtagtgagctacatggtagagggcctgcttttatgtggtggttatacataactctgagattacggcaagaaagtcaaatcgaactgagacagggactaaagttagtgtttacagtatcaatactataaagaaaataattacattcccaaggaaaagtacaaagaaaggaggtagtgtcatttggaagaaccttaaatatgcagtgtcactgaagtcaggggaagaaaagaatttcacggagaagggcgtgttcaatgcgtggaaggctgcagagtagataatgaagattcaaaaaggcaaatctgagaggagttgcagtacagtcgtgtggtttctagactacacggcgtttcgaaagtgggtaaaggcagacatcacgcgtcttcaagaagttcagaagaaagaggaagagtgttgtcatagtgggtaaggtcaagtatctttgattgcaaaacaacagtcgccagaagagaaggggctaaaagttggaacgaggaagaaggctcggagaaaggtgtcagacaaagcgggattagcaagaagctgttagggctggtcctaccgggatgagagaaaggcgcagaggccagccgagtggaaagagcagcggtgacgaaccgggttccactcagacgtccgacacttctcgccaaggggccagcgcggacagcagcgcctcccggggacctctgagaagccctgtttctgcgcggctccgcccgacctccaaggccgacctcggaggctcagagacccaggccccgttggcactcaccccactgccacgcggcgccagcgccggactggccgcacgataagcgcgtcccaggctgccgccaaccggccctcgggggagacgggtcccgggggcgcaggcgcgggccccagacacagcgagctccagagagagcgcagcgccgagcctggcagctctggctccagcaggaagacgcagcccacggccagcgccaggaagcccgcgtacgcggagccgcgccacagcgccatggggacccaggcgccgcacctgcgcgaaccaactcctttcctagcccgcgcctcttccgggctcggcgcgcgccgatgtcgacacaagcgctacgtcacaagggtgcgccacggggccccccaaggggcggggcgacgggcggcgccaggacggagcgaggggggaccccacgcctcagtcccaggcctggcactgcggtgttgccgccccggaggaggtgggacaacggcggttgtgccagtccgggcgctgcacccccttcccggaactctaatcgtatccccaaatagagggatgggaacacatttgctttcgcagtaaaacgaaacggacagattgtgaagaagcggacaaacctcgcgttaatattcgaaccagtgggtgtccccattggcacggatcacacccccatcttttaatccctccctccgcccgtgtcccctcatttgctagacttgtcctcttccaggcctagtgctcggcgcttctgagaggaataggctcacagaatagcggcgctgccgagacccctggggtacgcgaggcagggggattccgcccctttggaaggtggccgagaccctcagccactaaaggacttcgtcgagacaggagagcccgcagagatcgttctcttctggataaccagattattccacaatcaaactttaacccttttgggggcgctgttccctttaacaaactctggaaaatgtacacaatcttgtgcacaacacgagagttatggacctgggttgagaaacgctgctttcttttgttcccccttggtgacatcacttaaacccagccctctcttcgctgatacttttctgtgcatgaggctaggttgagagacagtgaagctaggctgggtaccagctcattctcatcagccacaatgcccggcctagtcttgttccctggtttgtttccacttttccaattctctcggctcctgaccttggctttgtgtccagttttccactgtgaccctgacctttggacttggcagcgaaactttatttccctaactttgatcttgggcattagtcttcattctcctcagccccacctcatcagaacttccccatcctggtcatctaccttcccgcagttcatcctacccagcctacctgaccatgccatccctttcgacaaagatattcacacaggaacagatttgggctaccttggaaaagaagccaaagagccagtcagatctttatgaagccatgaaagccatcttccctagagttgcctgtcacttctctctccttagggagacatgtcagtcagttcctagagaaactgcttcttctcacaaccctcagctgtcaggtttccctggcacccagaggggactgagccagcagctgacctgaaaacagcgagtctgct

SEQ ID NO: 62167 - DNA, 844 bp, Homo sapiens
acctcggtttccccatctgcagaatggggatgggatctcctggtgatggggatctgtggacgcggcgccctcgggggtgcacagaactaaggccggcctgcagcagcgacctcgggggctggtggggacggaagaccggacctcctggcccgaaggctgggcgcagcccccgcccgcccgcctcttcccgccggcgcctccccggggtggcagtgtggggagagtggcttggcgcccgcagggggcgccgcgagcccaccgcgagagcggccgcggcgcggggtgggtgccgaacgggctgcgcgccgcgctgctcccgacccgcgggtcaagtctggcgcctgggaggtccttgaattccgcgggatttgtttttccgcaaaaccaaaaacgccatccacttaacagatccgtgctaggaggccctggctcagtccttccaccaaacacctcggcccagccgcggctgtacggctcccaggctcccagtgtttcctccacgctttcaaacctcagcgctgaggtgaccgcctccgggcagccttcccggactaccccaggacttgggggcgtggctccacagcgggcctagttccgcccgtgtgctggcctcttccacgaccggcagtctttgaggatggggcttggcctccatccccttgaacccctcagcgtcgcaccccagagccactctgacccctggccaatgattataagtgagggagccacctcttctccctgcgtggcacaggccagggtccgcaggaaggggccttgctcatccccaatcttaagctccgctgagatgaaggaaccaagagcaggcttggcactgggagggcgg

SEQ ID NO: 62168 - DNA, 551 bp, Homo sapiens
gtgcacctattaaaatattatacaaatgggatcatgctgttctgttatcccttttttgcactcaattatacatgtcataggcaaattttcatgtcatcaaatctacatcatcatttatatattgtctatatggaagtgccttaatttctttatattttttaaaccaatgatttaaccttattgataaccatccacttttcactgttataaacaaggctgagatggaaagacttgtctttagatctccatttgttttggcaatgattgtccgggggtaaattacaagaagtgagatcactgggtcaaaggtacactcatttgaaatgttcattcctgccagcccagtggactgcagaaaggctgggccaatttatgtcaccaccagcagagcataaaagggccgggctccagcccctcaccagtccgagattttgtcattcttctgtttcctagagtaaaacttcagaaggattctcttcatccatcttttgtctactatgttcttttttgtagatgcttttttgcataggtttcatgctgagtttttttct

SEQ ID NO: 62169 - DNA, 2594 bp, Homo sapiens
ggttttatgaagattctgagctcttccctcccgacgttaatccatgtcttacattgttcattttggcgctttagaataaaatatctttggaaagtaactatgagaaagcacagagggatatgttagtgaaatagccattttcttgtgggaagcaagacatttcggttatcgactacacagaagagtgaataaaacccaacgcctatcaaccaccaaacgtgactctgcttgcataatcatacaaataaattttctttaaaaatttttcatgggtgcagtatataaaatgatcaatagtctcatcagcagtggaactacaaactgctttctcctaactttgtgtagcctgggtgctgcctcacgattactaagtggtttaaaatcatatcccacttgctccttggtttatcagcgaaagacgtgattcccaggtaggaaaacgccaagtgtcccgcaaaggtacaggtaaaacgtagcagttactgcgagaagactggccccggggagtcccagggctcggtcggggcccccgcacgagctgaggaagtggacagcgggcacctttgtctgtgcctagttccctggacccgggccgagcgatgcgggtgggggcgcggttcgggcgggtcccggcgctgcccgggggaagcgcgcggcgacggcggcccggcttgggagccggaggtcagcggctgcgcggccggccccctcccacgggagccgcgccagggcccagcaagagtcgggcgggatcgctattgtttttggcgagcacataaatccccgggccgacccactgcgcacccaggtttcctcccggaggcctttcggtttcctctgaggccctatatagaggctccaggcccggactgtgcagaggtgcgcgcccacgccggcctcccggaccagcctgagctcggagcgcctctcgccctcaggtctctgcagccagaggcatctggggaggtgaggggggaatttgtccccgaggcgaggaggaggaggcgggggcgcgcggagccgaggggctgcggcgagcgggcgggaggagcaggaggatccgcttctccggggtttccctgacgccagcagcagcgcccggcgcgcgcgccccgcacccgtcagcggctccggggagaagggggaggggagcgggcccgccacggcccgagaggcggcagccgggattggagcgggggcgggccgcgcgcggagccgagggggtgcgggcgaggcgcgcgcgtgcgcgtgtgcgcgcccgggactcccgccccccgcccccgcccccgcccccgccgtccgcggtctccgcccccctcgcgctggtgtgtggagccggagtcggcggcgggtggcggcgcctggaacctggagaccgacccaccgcccccccccccccgccccggaatgtactgactccccttcttcgctctcctcccctccccgcccccttgcaggagggaggcgccctggagtctcccctccagcgagaggggctgcgcgggccgggccgggccgggctgggctggagcagcggcggccgcgggagccgagcttgcagcgagggaccggctgaggcgcgcgggagggaaggaggcaagggctccgcggcgctgtcgccgccgctgccgctcactctcggggaagagatggcggcggagcggggagcccggcgactcctcagcaccccctccttctggctctactgcctgctgctgctcgggcgccgggcgccgggcgccgcggccgccaggagcggctccgcgccgcagtccccaggtaagcggcgggcgcgggcccgggggttcgcgggggcgcggcaccggctcaggcggccgcggctgcggtgtttttgtttaggatccaggaggaaacgtgcaggaacttctctgcctcggctccggttgccgaagagaaaggggatcgcgcgtggtggggaggagaagggcgagagggggcgccaccggggaaggggcggctgccggggggcaggtcgggggcgcaggggtctagttcccagctttgtacctggaggcaggttcacccctcgcctctctcccctcccccaggctcatcccacttgtaagagtgggacattcttgtgctcacactagcaccagtagaggccactacacacctcattaaataaacaatcagacggccaattcattaattttcaggaaaggaaaggggagggggcttgagctcctggttccctggccagggatttcccagcttccgaagtctcgaggaagagctggctagtctcgagggactcctcgcgcggggattggagcccgagtctgcggaagagcgggggtgtcagaggggcacaattgcccgctcacaacccctggtgttgatttaacgatgaggacgccttggagagcggctcggagtgatcgtatctgttagtgtttccgttatgaaatgcctcttctttcctggggattacaactatatttacagcctattaaccactcttaaccaagggaattgtctaagcatcagattttaggtacttgtacaatgttttcagatggcattgtataaacattgaacctcaaaagccattttcagttcttttttggaat

SEQ ID NO: 62170 - DNA, 1630 bp, Homo sapiens
gttcacacaccaaaaatatgaatagtatttctctctaaggagggtactggtgttgacaggtagtttgaagcttgataaagaggaggcttttatgttttctgtgttctgtacaccttttatactgagtacttttcaccttcttaactttgaaaatgataaaaaggaaagtagagagatggagaaaataaagcaaacaatactgtcagttaacagaaaaatccaactgtagaacagtagggagaatcagagagcaggtgaattcaaaccatccagtagtcaattttcttaaatagtcaacaagcatggtaaaaaatcaaatggtacaaaaacatatgtggtactgttacagtcctgccaatgcaccacagtgtagcaatctcttgtgagatatcacctggagttcagagttctttgtctcagtgatgaagagaattaaggggcgtggacacaaagggtgaggttggaacaaaagtttaataagtgaaagaagacagctctccacagcagagagaggacccagaagaggattgccgtttttacagttgaatgcaaaggctttttaaaagaaaccagtgagggctgaacatctcatttacgtaaggtgagaatttctgatagctctacccagtcctcctaatgtgcatgcaggcggttagcttgagttattccatatcgctttgttccccttactgcacatgtgtcaggagacgggattttccattgtgggcatgtctgggcaagtcacctgtgtagcctttcttatctgtgtggctgtggacatgtcttaggcaaacctccctgtgcaagttcccttatctgtgcctgcagcttgatttttcaggttgttctgtttgaaataattccactgaggacccaccctaactgcctaccttaccggtttcttcctttctcctctctcagtactgtgataccacccccatacctgctatagtggcttctctctaaaaacagaaaatagcaagtgttggtaaggatatggagaaattggaacccttttgcacttttggtacagcgaaaagtatagttgctggtaaaaagtatggtggcgccttaaaaaatgaaaaactagaattaccatttgaactaacagttcctcttctgggcatgttaccaaactgaacttcggtctgcccacccagtgcagcaaagctaaacactgacatttggattgctgcaaagagaaatggagatgtttattgcagggcaccaaacaaggagaatcggatagctcatgcttaagacctgaactctccaatggcttgcaagcaagggtttataaaggcagggggaaatttcaggaaggtagaagttataggcaaaatcataaggcaatacatggaggttatacattggtttggcctaaaagggcgggagatcttgaagtggggtttacaggttgtaggtagattttctgatttgcagttcattaaggaagagaagttttgttttaaaatctggggatcagcagaaaagaatattagttctggctcatgggtgtgacttctcccaagtccctcaggaagaactttaggacaaagatattcagtcctcagttcccccttacctgatgtgtacatgccaacagatccatttggtggggtccaggttt

SEQ ID NO: 62171 - DNA, 924 bp, Homo sapiens
atccatgtccctttcagacagggccaattccacaggtgagagatgaggatcaagcccagatggaaaccattccaaaagagtcggcaagcagaaatggggaaggacttgccctacttagaagagggatttggaatttttctgttttatttaacttagcataacatttctgtgactgactcaaatttgtttctgtaaaattcaccccatatttctacttaagttttaaacattcagtgcaaggttttcttttagtaaaaacagtatctctaatcacataagcatcccttgttccataaacttgcactttaactcagtcttttttccaatttctttcttttaatcctctagtttgaaaggaaaactcatcctgggtgatttcagacactagtggttgcctttgcctggcagtcactgtaacattgggtaggtccaaaggttaactgttacatacaggttacttccaccgtggaccaaagtgcaaacaacatccaaggagcagtggggccaccagccacgaggagttgtgtgtattgtaaaccacagggtgcctgatgtaaacctcaggattattaaaattaggaagcgatgcacaggaatagatcctctctgaagaaacagaaaattacctctgaagtgtatttaaagaaatacgttgctagacaaacatgtccccagtttggaaatcttaggaaaccgcattatcaaacagttttaaggaggaaagaaatagtgaaggtgtgaggacagtaagcggcataaatattcttcattaattgaaaattaattttcatcctcagttttaaacggcaagcctagtaacttcccatatattcaacatattatttttccaccatttgaaacttgcctattaatagttattatgttactgatagaactgagttttgctggtctggggaataaggg

SEQ ID NO: 62172 - DNA, 1235 bp, Homo sapiens
taaatctgcatttgacataagagaaagtaaacatgtgaaaggagggagcagaggaaatgaggctctgacagggttgtgaaatcactgctgcctgtttgggaacaaaaggaaagcagttcttgtgtgactcagttccccagcttaacttcccctttggcatacagagtttggggtcttgagatctattttctttcacaagggtttaggaaggctgaaataagcaaggggttctcagaaggaatggactacggtggctacagctgtgattccggttatgtgcctgtcaaggtcaccgcgctgcacaaaactgtggtttttccaccctctggtgggaagaggggcaaggacactgccagccagtagggaaaggcgcaaatcagaccagaacccagcatctagagggaaggccttacagctctagccagagtccttgatgagtcctagacagcatccacccagggggcacggtcagctcgctcatcctggccggggctagtggcccatcctgagtgtcactgagaggggcccatgatacctcccacctatatttggtggatgtgtgcaagggggtcgctgaggggtgtggacaggtctccactggagggtgcggaaggggctgagcactagccctttcggctctttccagatccctgaatcagatatcaccacctgccccatgggaagcctgttagccagccggatctctctgcttagcacacagggctgtctctctcccaggagcaaggcctttgccaaacagcaggaggggtgagatggggcaggtgaagagggaggggcctcccctggcccacccccatgcctacgtgaagattctctaagtgaagcgccatccctggtacctaccactctcttgaagattcccacaatgatggtgaaggaaacgcagtttatctctgactcataacaggcattccataaatatttgttgaatgaacaagtaagtgagtgaagtaattaattgattttgtgggcacatggctagataaggagacagactctttttagacgagggacatatagataaaaatacccatggtgcctggccatgagtaaaagaaaggctaagttgccaaggtttgttgactatgagtcaaaatttttatgtattaatcatgatactttaaaaagtcttacattgaggccgggtgtggtggctcacgcctgcaatcccagcattttgggaggcagaggtgggctgatcacctgaggtcagg

SEQ ID NO: 62173 - DNA, 489 bp, Homo sapiens
agagacgtgccagataagttaataaatcagtataatggaacccttgatttgggggaatataaaatattttggcaaatcctagaggcatagaaaggcattttatatcaaatatgactatggacacttaactatctttagtattgtattgattttcaacataaaaagattaagaaaaaaaagttgtcttacgttcctcatgcaggaaaagcaccaggacattgaggacttagtataagggtcatccttggcaactggttttattgagtcattgctactatgtttgagttacacaataaacaaatatacaactttctaacaggaagtagctgcagccatagctattcttcatatttttgtttctgttgctaatttttgcctaattttgtttcaggaagggttttcactcattggtagcaaggactggttgaagattgtaagacgcgtggattgtctgttgtttggaacaacgataaaggcaagatttaagct

SEQ ID NO: 62174 - DNA, 2116 bp, Homo sapiens
cttcaaagcagccttagacttaagcctgtttatcaatctgttgacaatgctaatgtaaaaaagatgcctgaaagtatcctttcaccaagaatccatccaattccactgtaaccccaagtcctaataacacacaagtcacaggtagctgagaaacagtctgactatgattcccactgcacacaactgggcgagtcactcagccagatcatgccaccctgggcaagacttcctgctaagagtaaggaatgctgatctgagtcagttcaattttctacctgtatcaaggaaaatgggaccaagacaaaaatgttctttgcattagtaaattataggatgtatatttaaatgaacttttaaaacacaagataaaaaaccctttaaaatgccaacaatggtctttgaaggccattattgttattaccattattagacatatagagtaacagtgacattttctaagtatgcattatatgtttaggcaatgtgctaagcactttattcattatcatattcaaaattcatttattcattatgataagtgccattataatttttcttaaagatgtggaaactaacgtccaaaaaagttaaatattttgcccacggtcacaagctaataacaaagagtctggcctggaatccaaagtgaaagcatggtctcttaacacttaccacaactgtggtcaatgtgtctcactggcctgaaaaggtttttgtagttacttaagttaaagatatgctttgtcaccacttagtttaattaataaattaattaataataattcctggccacaaaaagccaggaacctttgaccaattgtgcaacatactatgatcactaactccataaaattataatcttactagagaatggagatagagaagcactgggtcaaagagttcttaaagcaactggggggagggtgaacagtgtgaaaagataagatgattctgaggcaagactgcctctagttctgatgattccaatgccctgctctggagaaggctggcttcagagaaggaaggaatttacaagacactggaaaaatttctctgatgctgtagtcaggagccaaattaataaagggcagcacctgaaagttttataaaactccgcagtttgcaaagagcttccacatacatcacatctcatttcattcgcacagttccacaaggttcatacatagggcaggtgcggagacaggtttatgacttgcccaaaatcacttaggcagttaatcctgagtggggctgggactagaatgcaggtcttagcttagtctagggttctttccaataaactgtgctgcctctaaacaaactaaggaattccttgatagctgaacactcatcaaaaaccatgaaaagagatctattccccctccaaacagcatggaaaagaaagaaaagaaaaagaaaaagagaaaagagaaaagaaccctctttacaaagtactgtgaaatcacaattagcaagggaaagttattagcaaccatccaccttattatccatccaaaattagcttcaattcaggaaaagaactggctctcagcagcagcagcaggaggttcagagcctgactcactgccctgcctttcattactaagggctttcaaacaaatatgtaccttcaacaagaaagcacacactgcctaaagttgggaggccaacagaagcatctgtttgctctctaggtcaagggtcatccaatattttggaaaaaccctaaattttgtaagacaacctcctaccccaccctcttccccaccatcgtctccacccactatcttaagtgactgggcccagatctgcaagagttttgggaaagtattaatatcagtgcattcagagcaacagtgataaagagggaaactgaacagtggttactggctttgagggaggaagagactagaagctgatgctggagggggtagcaggcagagcattaaaaatggaggcagcaaacccaagagaagcgtaatgtaaaattgcataactggggatgggggatgggaggcaaagatgacagctgggactagcagccggagaaaaggaggagcttgctggcaggaaaaactggatgtgtggatatgtagcagagggtgagaagaaaaag

SEQ ID NO: 62175 - DNA, 1856 bp, Homo sapiens
aaatctttttttaatttaaataattatttttatttaaactttattttaaagttaaaataaagataatataatgttgctttttattaatgtctaaaggcatattccacaaaagaaactgtttcacatcaaatctgtattaatgagaaaaaacaatgggattcccttaaaacagtctaatttctcataaggatctgtattaatcaagcgaagtcagacctgtaatgaattccaacctcacatctaaggggttttatttccttttgtggttttaaatcttggtatattcacaagttaagctctactgcgtctggcaacacaaaaacccatctgtatctctttctaatttggatccagtaaccttgtaaaacaaacccagggaatgggtcctgatgtagtaacatggcctatcctcccagaccgaaccaatttctcatgcctgggtgctgcattatatcagtagtgacattttagccagtagcctgagagactgaaagcctgtgatctccttaggaagggctttatgtcaaggcaaactatttcttctggtcaaatcttatttggattatttcaaaattttttgcttgacattcggcatgtcatttgtgccacagctgccatagataagatgtgtcttctgttgctcatttcagttcaaagaggaaacacgcaatcaattagcaaatacacctctaaaaatgtactcagtgagagaaaattgctaaaccactgaagcaaacagcccttgacagaaaagaaaaagatccatgaatcatctaatgcaaatactggcattattacaaagcacaatgttcacaactatctagtatcacccaaacaaaatggtttctaaaatttaggtcgttaaaaataagattcattagattccttattttcctccattgaacagtgttaattttgtgatgtcatattttccatatgaatatattacgtttttacacaccactccacattcattaattcagctaacatctataacactcccactgtgtgccgggtaccacactctatttctcttattcacaacaataatactctatgagaaagtgatacctggcccacttgaaagatttggttcacagaaaaaaaagaaaaaaaaaagccataaagtctctcccagaaactcaaataaaaatattaacttcctcaccagaattggcaattgcagacacagtgcagctggtcacttttctgagaaagttacataagcaaaagcacaaatctctatgtggggccttcaaatggcctatttaccatgacagcagcattaacaatcaagttttcaatatacacatgaagaaaaataaataaaaaataatgctcctttttaaaggatagtagtaatagctaacatgtactgagactcaggctgaaatctaagcggtcattatctcatttaatcctcacatcatccctagggaatggacatgattgtaatctccactttacagatgatgaactgatgaaactgaagtttgcattactcaagatcactcagctactgacagctggaactcaaacctgagtctgtcaccgtccaaagcctgcactcttgatcatcacattatactgctttgtttacactcactcaattgcagtctaatgcttttgaatgtcttataaggttactttttagaacaagttcctctttaaactaccattttgatgatacatatagaagtcaacaaataaggattttacttggaattggtcttacaagtttaaattcttggatgagaaacaaaatccatctgaatgaaagccctgaatgtccacaacaatgggtcagaaactcactggagcttcaagagaccttgagagtcatacaggccaaattc

SEQ ID NO: 62176 - DNA, 2797 bp, Homo sapiens
ttcccccacctcagttccaaccctttccctccatcctctgctcattttcctctccttatttagaaactcctttttgctctcccaaccactaccctagaatgcccagcactccaccctctttagcaaacccagccctcttcccccagctcatttggagacactgctgcttctctctccaggtcccctactgcagtcaacccactccctcatcttcccacccaccttccctctatccctagatccaaggttccctgattctttaccccctcctttggtctctagtactcagctcaccattagtgttcctcaggactctcttccccccaatttcccccttatttttaaggatgtcaccagtcctacggggcctcagtagaatcctggacgaccccagctcccggggggcctgacggacaccaccatccccgtcgcccggaacacaaacgccggtcttgtgccaccctccctaagagctgcgccccctcctcatccgcccccgctactccagctccccacgtcggcttcctccgtgtcccctcgccgacccggcacgacgagccccacgacgtggagcctccgagtgggcaacacctcgggctcaccccggacgcccccgccgctcggataggagcctccggtcctcacacccgcgcctcctcaaacccgcagccggtacctcctctcggacccgcagcccctcagacgcccactcggcccccttccccgagctccagcgtctcctcaggccagagccgggccccctccggccccggcgcccctcaacccccgcccggcccgcccccggcgccccgcttaccgttctgagcggcgcctggccctgggaggagggagccagagaccagcaacagcgagagggccagggcgctgggcagcgacgaacccgacatcctccctagcagaagacccaacagcgaatgggccggggccagagccggggccggggaagggaggggagggagggagggggcgggcgagtgcgcgagggagtgagcgagggaggcagccgcggctcggctccgtccttccccgtcctcctcctgccgccgcagcgcccaggcctcgcgagaccttcgctccgggtcgtgggcggctgaggagcgaccgccgcaaggatcgcgagaagaggcggctccgacggagactcccgccccgcggactcggtggccccgcccctgcagaggctgattggcctagcgcgaggtaggtcacgtgccgagggcgcctctggccatgtgacggggcgaggcgggactccgctagctctctgggcagtggggagctgggaagtccttcagtttactcctctgtggcccgggagcacccataaataagaggaagctttggaacacagtacatttcctccacccatcctgcctttcatttgttagcgctcttggctacagagtttcatacaccgtgcctcctttcctccttcctctctttgtccccgtcctgctgtttcttccttctggactttgaacatagacctctactggtaactggctccaacctccttctctcatctgctgttttttccttccaggaaaagtggtgcgccccctgtgcccccgttaccttgtgctttcctgcctggacatctgctccctttgcctgaaatgtcctcctttgccgcctctgcctactccccctcccaccccacatctgggccttattttagcttcatagactctcagggcctgaagttcagctagcctaattgcatgttcattgacacaattctacaaggaagtcgtgtatgaacttacatgaagactcctaagaagcgtcttaatgcggaaaacatttattgagaacgtgctgtgtgccaggcacatagtgaaacccacatgaaaaggtagtccccgtcctcatggagtgcactgcctaggctagcagaggagtgaggaagggtcaaatggccccataggaaaggatctagcaaagcactctggagggtgattggcagtgtggttactactgtttgcatagaagtttgggaaatgctctttttaggggtattttttgtactaccctcagggcttgtggttggcaaaggaatttctatggcttagctcatccctgactcacagcagacgtcctgggagtgtctgtggaaactctgaggggccaagtaaacagtcctggtggcctgacttgatttaaagagagggtttggaggacctggaagaaggagaccctcgcaatctctatcaagctaaagtggtctggaactttcaacaggaactgaacagctggtggttccagaccaaaatttctagcaaaggccaggaccactatggcatgttgttgattgaagtgaaaactatgtccttcaaaacctcaggtgtgtgagtgacaaaaagattggcatgtaccttcatctggacaaaggccattctgcagacagcccagtaaggagggctacagggctgcctgtggtgggatcaagattttcagctgatggaagctttggttggatgcaaccattctgcctcattatagctgtaacaaatgtggctctttgatccttacaacaagagattcttacaaaatgatcatggtctttttgtggatagggaagctgaagccaaaggaggacacgaacggctccagctctcagaatgtttgtattaatcattaatgccaacaatctggtttgcttgttaatagactcatggtagaagtgcattttcttgtccccttgaagtcgggagtggcattggatgtgcttgggtcagtgaaatgtgtaaagtaacatgcattgcttcaagcagaa

SEQ ID NO: 62177 - DNA, 724 bp, Homo sapiens
cgcgcccggcctaagtcagtaacttctttaaaagaatttaggaatttgtatttttttgttgttcaagatttacatacactgtaaaaaaaaaaaatctctgcaagtgtgtgtggctgtgccagaggatggctgagctctttgcaataccttagaagagccctaggggtcctcagagctcaagctgagacacacttacctggcctcgagggactgcttgtagttaggctctccgttgctgatcgcgccccctggtggaaaggtctggaatacagcattcccaactgaaaggcttcgcgtggtttggtttgaacgtgattcactcaaggatgttagtcaaaaggcttgtactgttcctagagttgaccttgaacttcctaatggtttcctccctcttgtaaatatctctgcccctttaaagctcttgctattcagatgaccaccccactcatcttgattgttgtcatcctccgacctcccagtcaatgtaatcttttccctgccccttccgatgcctgctggcaccatccttgaacttcatccttgggtgagttcaacatccatgttcgtgacctattcagtatcctgatctcttaatccttttaccttctcacgtccaacaactttctcctcaattaaaccaacacttctgagctcacactgtcaacactttaatcacccaaaaagtacttcatctttgaaatatgaaaatgtaataccccactgt

SEQ ID NO: 62178 - DNA, 3627 bp, Homo sapiens
cactggtggtgagcctggcagcagtacaaggttggagtcccttcatccctttgagccttggttttctcatctgtgaaatgggaataataatatctagccggcggggctgtttggaggaactaaagaggcccagcatggaaagctcctaacctaactctggcccacaaaagtctccctacgttttagctgtcactgtccctgtgaggaagaacagatccaagaacaggtgcagggatgggctgcaccacagcaaaatctggacaggcccgacccccatctcctcccaggctggagcggggccctgtaaggacagagcccaaggccactaggtgtcaggcctgttggagccaagtccggccagcagtctggggtggggctgggggcagggctggtcggatggccgtgggtggaaggaaaagaggaaaaccagctcagtggaaattgtcctgcggttggctcaggcgcccacgacactgtatttatagagagctccttgcagctcttaattcctcgcagtcgagttaaccctttctgggctgtggtgccagcatggtgtggaggaagaacccaagactggggttggacagcaggattccagccctgttctgccgccagtcgatgaccagtcagtcacctatcccctctcgcagaaaggaagattcggctcttggaagtgtgggaacggggtgggggatgggcagcgccctgctccgggagccgagggttttccccgccagggtcaggcctgggggcggggcggggcgggggcgggggccaggccgtgtgctctgcccagcgggctggctcaggcctcggtcagcagccgccaccgcggggccaatccggcctcagggacgcaccggagccgcctttccgggcctcaggcggattctccggcgcggcccgccccgcccctcggactccccgggccgcccccggcccccattcgggccgggcctcgctgcggcggcgactgagccaggctgggccgcgtccctgagtcccagagtcggcgcggcgcggtgagtgctggcgtggcgcgggcggcgcggggtggggcggcctttgtctgctgcgggccgggcctggatcccgcggaggtccgcacgttcccgctcagggctgcaggagctgagcagggcgccttccctccgggctcctgctcccctgccctcccccaggtccgggcggcccccctcgcacaggagtcccgggaaccgcgggcgcccctcctgccctgggctgtggggcccgcggagagctgggggctcccggatcctaccccgcccccctttcctcgggttgagaggggcccgggcgccgtcggacctgcagaccccggaagctgcggaccgggccgggtgggtgaatgcgcttttgcaggccccgggtctggagcgggcatgggggcagatctgtcccgtgttgaagcttaacgaagccaccggccggcgctgggaggttagcggggtctcgggtcctgcagaggaaaacgcccagctccgggaggggagcggcggggagggaaggcgagtggttaggcgtgtccactctgcagggcccagcagggcgaaggtgtgggcgactggtgcacttccacaggcagccgtgggcagcatgaggggtcagattccgggaaggacaggtagagacggctggcaggggccacggggtgaataggtgttgggggtggggagggaattgggatgggcagtttgggcttgggaagcctcagggaggtggggggtgaggtgggatggagaggagatgcgggcgacggtggagggaggtggggaccccgagtgggggcacactagaagggaggggattgaattccagcgcccagggccctccctgcgaccgtttagctagcgaattggcaggtttggcagcctaaggcaggggatttatttctaagccaaacctgctctaatgagaaaagcgtgatagatgactcagatatgggatctatcactgagggaaaacattaagcaaatagtaaagcaaaaaagatttgtgtgtgtgtgtgtgtgtgtgtgtgtgtgtgtgtgtgtgtggcgggtgggggggtgttagttgtcttaatttagaaaaacgatttaccttcaaattggatgtggataattgtaaatgagtctgatctcttcattaaagcccggggtccttttcttataagcatgtcttcagcagttagtttctatattagaaagtaatgaagctgctttgtctttaagagagttctttatttagtgcggcctcctctagttccctctggcctcccagaagtccctaggaaatctgatgctgtgcagccttccttgtagtgtgggggactgcaaataggtgggacagtttgaggctgaggggaactgaagtctaaacttgaagtctaaacctgtccgatgggttgagctgatctgagtgcagggcaggatggagggctatggggctgtagggtatgaagtggctcatttcaagggagtattttgggtgagtacattttcctgatatctggagttcttgagattaagcactaacacttagggtaactgttgaccgtggaaatttacatacgtcaccgtcagcttactggagtatcctgatgtgaatgaaattttccttcatgactttgggtcagccctgtggacctcagtttttgttctgaggggttgtatggcaaggggacgctggcgggagagagcttcgttcctgcattaagtggcctcagtgatgcagtcagggtcccatgactgacctttggagttcttccatgtccttatggcattactggtggtttctcctgcctgcagtaagctttccagcttactctagactcctgtgctgtgagacatgagcttgtcagaggtaaggagcctgtgttaatgcaagtctcaggtgagaaggggtgttggaatctgaggaccctgttttccttcctgtcccctcttcagctctgtccaggcaccacccgatggagggttggctgaatgtctcatgttcatatacctgacagctggcttcggtgctttaatatttatggaaaggacagttatagaagtgtggtcccttcaaagtagtcctctggggtgtctgtgtccttattaggttgacttctgaaacttcctgtgagaattccatcattaaactttggctttctctggaggggtaaatctttgttctttggagtaggatttgagtttgacaaggagctggacaatgctgtttggagtcagagatgcagtgtgataagagagctgtgagttggaattccacagcacctaaagagactcctagaaaatgttgtagaacaagtggctggatggtacttggttgcacatacggggtttggggtctgtgcagaaaaatgaccaaatccaagcagcctctgagattatgaccacatgggggctgttaagctgtggatctgagtcatagggtcagggaaagaggaaaaatggcaaggaggatgacgttactgcccatgagcttatcctctgagtgggtggcgacttctcattgtccttttcccacatccccagggcaggagtgttagggaagtccaccagcaaaagggggagggcacacccagggcctaggggagggggagaggggtgaggactggtccac

SEQ ID NO: 62179 - DNA, 690 bp, Homo sapiens
tcttccagctgtgcccttgcagggacttctcctctgctgaatgattttccccatctcttcttattgtccacctacttggtagctgggatgtggaggacatcacctcctcaggaaagccttctctgattgacacacaccctcctcctccctcttcacaccgaccctttaggtggcccttgtccttcctcccctgtggactgcagggtctgctcagtcctctgtagtcctggagtgctggccaaggatcgagctcccctccacagggtggggattcatggcaggggcaggccttactctccacctacacagacatccagaaaagtttcggtttcccctaaacgttatgttgatcttcccatgctcacaaagaagagtttgggtttcccctaagttgtgatctcatttttcctgtcttccctaccctccagccctaccccagccaaggggccgtgccagctttcatggtgaagatgcctggggtttcctgggcagcccttcatatactgtgtaatagcaatggaaggaatccacaggtgaatgctgatgcaggaagctcccagtccagcagggagggcagccatatatgcaaggagcagaaacacacaatgtggaatgggtgcagagagccaggcaagggcacagaggacaagtctcactgggcctcaaagggtggccacagtgtggctgcgg

SEQ ID NO: 62180 - DNA, 2572 bp, Homo sapiens
gagggcggtgtgctggacctcctgaggttctgtctcaaccacaggcacagctctcactctaccaggtgctcactcagtctgggaaatgggacttaaaggactctcacatcctggtgtggaactgacctccccaaactgcctgtctcacatcaaaacaatgtgcaacaagactgagatcagttttctcttcctaaaggtgaattaacacggggcatggttttatgaataaaagttgttatccacttgctatctgagttgtgttagatcaagcactggattgaggggcgatggtgggatggaggcaggtggtctagctatggctcagctctgcccttgaccatagctctcagaggcaagtcaaattatttcttagccttagcttcctccctccaaaataaaacagtagtaccgacttgcagcaaaaaatgtcaagctcagaaatgctgggccagacaaaaggactttgtaaaccataaactgctaagcacgtaagagctactgttaggatctcaaatagtatttcctcaggaatttcccctcgctgcttccagtgggacctccaggactggcatttatcccattcccccgactgtcctctaaccttgattccccagggcaaagcagagccaagaggaatggggagaaatgtcacctacattcccctgtcaggacacaagaggaagcacaagttgagtgtggctgcaggggacacaactctgcatgtgtatttatttctaccccatcttgtagcagaagagatttagggcaaactccaatatacacatggagaagaggcaggaaaaagatccaaatgtcctcatgttcctttgttctgttccaaacaaggaaacaaaaatcacaagcatgcacacgctgcatggtgagcctggaattccccagcaggtgactgggctgggagggtccctgctccatcacccatctgcctgccccatgagtcaggcccggaatgagagctgtagaagccagtgtcatcatggcagagcagtgaggggtaaaaactaaggggcagaccccaagaatgtctgccggggccacttcctcttctcagggacaagtttgcccaggatcgttatggtctacgcccacctgccattcctcaactcatggccccacccaggcactggctcttcaaaggtggttacactattgggacatatggtaaactgaggcccagagtggtctgactcttttctcaaagtgacctggcaggtggagccaggccggtgccacccctcaagctccgtcttgtgaggggctgcctaccagaagctggtcgctgatcttgagcttctccatctggatctcccgcagcggcctcttgagcagggccttggtcatggcgttctgggctgtcatgcgtgtggctgtgttcaggtctttcacagtcatcaccgacagcaccgggtcccagatgcgaaactggacatcggctcccacggacagcacagccccgtccttagaggccagctgttgggggaggccatgagagagagacactcaaggggctgggggtgcagggaggtcaggcccactggggccacccagcttgaaccacctgcttggcagctagctcctcaagggcaaatggtgtcaccaagtatgtagggttaggtgtatgaagcaaggatgtcctcctagcttccatcaattttctggtctcttcttcccccttcccccctcagatggtgactcacaggctgaggtcctggcaccacagtacattctggacaggcccccagttcctctgtcaaggcagctgagaagcccctcaccttgcagggagggacgttgaaggctcgtgtcctcagatccaccctctgaaaggagtcaatgaagggcaagagcagaaccatgccaggtccctggggggtgcggatccggcccaggcggaacacaatcatccgctcgtaggtgggcacaatctgtccacaatggcaagggaaagagttgaaagtggtcagcctaggctggccaatgctgtctgcctaggtcccttcctcacttctctcctcctcacctgggtcacagttaggtatccctagcactgtttccagatgagaaaaccaaggctcagggaagctaagtgactgctcaaaaattgcatagccctaagtgaaatagtgaagatttgaatgcagttctgaataactccaaaggccatgtgtcttaactactgcactgtattgacttgatccttagagaaacttttcatctctgtggtctgaagttagacatgactcataccaggaaactgtctgtccttggattagttaggagaaaaggctcggctgccctaacagcacccccggggaaagggctttgtcaactttaggtccctggacctcctagagaagtagtgatgtccaaattgagaaatgaaggcccagagaggcaaagaaacctgttcaaggtcacatggcatttgtttctgtggcagttttagaactaggatataaggccatttaaggacccccttgcagaccacaccaaacccagaggttttctagagagggactgttgcctagggctacacaaagggcaaggcctcctt

SEQ ID NO: 62181 - DNA, 1447 bp, Homo sapiens
aaaaaacaacaaacaacaaaaaacaaaaacaaaaaaaaaccctgcctatttcaattcaagaaaattgttaggggtcggggtcaggggcagggctagaaagatgaggcttatccaagccaaatgtcctggcccctggagattcaggagcccaagttgggagcaaagccgagacagctccagaatctgggatgaggttatttgccgctttcctcccaaccctggacaggaagcagtcgggagccctgctccattcttccaggaagccctgccctctgggctaagccccagagcactgaggctccactttgtgcctggctctgatccaccaggcctctcaagagacttctggatagggagagctttcaggacaggaaggccagggagggatcaaatccaaggttaggcggttaggctgaacagcgtgggatctggcctgtaggccaaaggagccacagaagactttgagggcaagacagaagcagggcagatccaacaggcagctgaggacctgtcattttggcctgcacatccaggagatgcctagttcccgggcttctagaggtgccccctagggcgaaaattcttccatttccctgcagcaggtgcctttagggtgctggtggcctcctctgcctagacctcggtttcttctatgcgaaatagaaacctgaaacgtcttcccaggcctaaagggctgataagagccgaggacaaatgtggtgaggtgaggttttggaagataggagcaacgctggctggctctggggccaaagccccatgaccctagggagggcggatcggcgctagcaccaggcgccgggtccagccccctctccacatcgtatccctttctcagtcccccctcgtagggtgcgacggcaccgggccggccgactcctcggaggcagagattcgggcctgggggttgccggccggtcccccccggctccgccgtgccaggcggccactcaccggcccctgtccccacgccgccccgctccggggacaagcagcccttctgcgagcccagaaagccgaagctcgactgctggaagcggtcaaaatcacccaggggcagcgcccggtacccagacctgccgagcatggcttttgacaggagacacgccccgcgcctccgcgcggcgccctccctggccagtgggccctacgcggccccgccctcctggctgctgcttccggcttcacccgcgcggccacccgcggcggcgcgggcgcaggaagaggaggccggccggggcccgcttccgccgtcgcatggctccccctgcgctgggaggaccgaactgcagcccagggctactgggtgtgatcggcgttcctcggaccccgctggggtcatcgcctcctcccctcttctcctactcagccctagaaaagctggaggggaagctgggcacggtggctcactcctataatccatcaattt

SEQ ID NO: 62182 - DNA, 1485 bp, Homo sapiens
tgcttttgcaggtcccagctgtgggctctcctttccagaatgtctccgtttgcaggcttgctcttccattacatctacggctcttagaaagcaggggctgcgtgtggctcatctttgtacgcccagctcccggcaggacgtggcacgaagcagtgccagtgtgaacggatgaatggatcaaagccgggagcagggctgcccccctgcagctctgccctacctctcccgctttaccgtaagtcagcggtaggtctgcagctctccgcctctacctcctccccgctctgggcgtgtctttaaaacccacagtcggcctctctgccccctagaaccgcccccagcttctgtctcacttcctctccagaggcgggccctgagccggcacctcccctttcggacagctcaagggactcagccaactggctcacgcctccccttcagcttctcttcacgcactccaagatctaaaccgagaatcgaaactaagctggggtccatggagcctgcacccgcccgatctccgaggccccagcaggaccccgcccggccccaggagcccaccatgcctccccccgagaccccctctgaaggccgccagcccagccccagccccagccctacagaggtactattgggttaggggatgatggggttaagctttgttggtttgctgtggtggggagaggcgggaagagagggtctaacggaggatttggtcaagtaccctagagagtgacacaaagcgggaagtccagacaccagggtcctgaccgtctcgggtggggcagggaagggagggtaggatagagtagaaaagaggacacggaggagttggggcggcctcgctgggctgcggtttctccactgagcagttgggcaaggtgagaagggtcagtggcctccgggcctgggcccttccgcccaccctcgagccctgcctcaactttgcctcagatgcaggacttcagattagggaggatggaggtagtacccctgttgcgctggcctggagccaggggcatgtcccaggcacggcaaaactaaaaccaacttcccagatccgaggtgagaaactggctcagactgaagaggtatctttgccaaggcctcccagctcatgtggtttctgcttaaggaagcctccccaacgaacccttctcttgccacacctttcctgcccacctcccacctcccccgacaaaggaactacttgggtttcttgctctgctgcctttcaggcccttttactccccttcatgaaagtacagaggacaccgtattacagtaacttttataaacattattacaactaagaataacattacttaacaatactaggtaacatttatgagcacttcaaatgtgccaggtactgtattaagcactttggtttttttttgttgttgtttgtttgttttgctttgttttttgtttgtttgtttatctgtttgtttttgagacggagtctcacactgtcgcccaggc

SEQ ID NO: 62183 - DNA, 1884 bp, Homo sapiens
gtgcccagcctttagaacaatttttaacaagacttgaaattaacaagcttttggcatagtggtgcacgcctgtagtcccagctactagggagactgaggtgggaggatcacttgagcctcagaggttgaggctgcagtaagccataatcatgccattgcactccagcctgggcaacagagcgaggccttgtctctaaaaaaaaaaaaaaaaaaagaaattaacaagcttttctcattgattgctaactgataaaattaaaaactattaatagaaccaccgccagccagccagacagccattgagcaatcacttattgagcatttatttcatgactggtgttatgatagctattgccagatgaaaaagaatgcctgccttcgaagcttgaatttgtggagagtttcagcctatggataagttgcatgtgtgtgcagacttgtactctatggcaagaacccagaggtcccagaagatacgttcagatcaagtgctgtggcagttttcagaagggaaaacttgtatttatgtgggagggtcagggaaaccctgatattttagcatttgggctacaccttgaagggtttatttgtctctataagttgcatctaaaacaaactgtataaattagtgagtttttttagttagtagcttaagcaaaagctggattgatggctgatgtaagtgcataggggtcaagctggcctctgacctgaccaattagatattcagattgtgtcaccaggaggtactttctctgtatttcttgtgacctggctttcttccaagactggtccattcacagaagggtttactcctcatgggtgccagatgattgcaacagctccagaggttacaccctcagccccaaattcaaggggaaaagagtgtgaatctctcccagcattccaagctaaatctcagtgtgtctttgattgggtcaggttcctctccctgcaagggtggctcaggctaggggggttctcagattagcgtaagcctgagtcatatgctcccccaaagctcatggactgagaacaggaatgtgtggctacctaaaggcaaagtccagtttcatattggtacaagaagaaagaagaatgtgcctttaatacatcttagaaaaaatgtccaatagccaccgtaaatgaaagcaaagaagaaaaaaacactccaggtatatggaaggcagtggaacagaaactgaagtgcaggggacaggtttgaagccagcctcaagtgaaacaccctgaccccttggtgcctgggtaaactcttttcaatagaaagccatccttttccaaccaggttagggaatgggctgttcaggctgcatgcaacctttcctgttgacaaagtggagaactatcctgccatttgagatgtttttcctgtgctattctcctaactcccacaccctcctgtaagattatcaggaagagagaactgttccctttgtacaaacaaggcgagaggccagagagttaacaggagcttcccaaaagggagagcttgccagagccggggccagaacaggatgcagggtttcctgattgcagaatgggtgcccctttcctactcctgctggactctacattcaggcagcccacagctaatgactgcactgagttgcaaaaagaattctaaaagttgtttcttaagaatttagagtgtatcttaagtaagcatgcaatttaagcaatgttgaacttaattttcccttttacagaagataaagaaactaaagtgaaattagacttgctgaacttcaaagaaataattcttcatcttaaaatattttcctaaaaggtccctctaagattaagagaaaaaaaccccaagacattaagaggttggagccattttgttttttgaaacagagtctc

SEQ ID NO: 62184 - DNA, 1272 bp, Homo sapiens
aaaaaataaataaataaaagttggttagcatctctttaggcaaagaaggggagaggcagctccaggtggagggaagtgcatgaggaagcagagaggcaggcgacaggcagcgtggctggggctgggcaggccttccagtttgattgcagcccagaggtcaggtgagatgaggttacagcaagcatgggaggccccaggaagccactgagggtgtttgagccattgaatgttctggattttaggacatttctgtggctgactccactgccatcagtgttcatccaccccaactccagcctgagagtgctggggcactgggcactccggagttcttcaaagctctgatgcaacatgtccccagggtgtctgactcacacagacagaggtgaacccaagttcatttccttgggattcccctgagctcccaattttctgctcccactttgagggcagggggatggcaggcagctcaattggtttggctaagtaagtagattcaaacaaatctctttattcttatggatgtcatgccctgcagtgggagaaagaagctgaatcttctagatgtcacccacatgagggactggactccccatcacccagtgcctgacatacacacaactttattctgagacaacagctatagaccacagctacatttacaggcacctggcccccagccagtgcccaggccctgaggctcccaaggacacagcttcagattagagccttcacctaggtcagaaaccatcctcatgggttcctgggcctgtcctcattctggtctctcgcaggccacacatacacagcaggatatgtggagcccacaggctctcggtcagtcaggcaagatgagtggggagcacgcccttgctgactgcaggctattttccaggtggtcagaaccctgagtcctccaaacaacagctccttccccgaggcctgggtggagcctctgtccctgctggatgacccaagcccagccaggccgcagccccagcccctggggaggcacgcaaggatttttccttctcaagtttcaggttttgatggagaacagatgtgcacacatctggctcggcaacccccagcctcacctttctacttctccaaaccgtcagacagagcagggagataagggatggggccaggcctgggaacaacaggggagaactggctctgggtcctacacaggcaagacatcctggcaggaggtgggggacacagaaggggcccagctcctccaccagggtgcccagactaaaccccggt

SEQ ID NO: 62185 - DNA, 527 bp, Homo sapiens
attggttctgatgcaggacatctctgagggaagcctgcagattcccatccagacatgggaataaaaaagggatagcaggaggttagcagccctggcccaccatcccccttctggccttacccttggccccaagcctccctggccctgggcccagcctgcccagcgggcacatgcctgcaagcctcaccaggaggcgccagcctggcagttggcctcatgcccagaactgaaacacaatagttctcgccaaacttcctgcaagctttattcccagaagggaaggctgtccccgaggggaggtgcaggggagatagaggaggagccggtgtgactcctggccaggtctgcagatgcctagttgggctctggggctgccagggagccaatgagagcccctggacaatggtcttactcctgggccctccctttcatggccctagggagctcatgagaggccctgtgccctcacagcaaggtgaatccatctaggaacatgaatcacccctcccagcctcactgcaggaact

SEQ ID NO: 62186 - DNA, 1142 bp, Homo sapiens
agacaaaaaaaaaaaaaaaaggcctttcctcctagcaggaagcaagcccgattcttgggaaagggaagggacagactcagagcctcagggccaaggggtgagatccagcaccccagcaggacaggaatctagctgggtgacctctctgagcctcagtctcctcctctgaccatggggacaacaaacttcgcttgcaaggtgtgcggagggtaacggatgtagggaggcatttagtagggcttgttctctaaccacctctctccgagagtttcaaagggagtgggatctggggaaggttgaggcctcaggcctgggaactaggaatactttcccttttacccaccaccatcccaggcctggaagaagatcagaagttggacaggagaggtccggccgcgcggacgtcaccttagcgcgccactgtcggctccggtgggctcgggtgagctcgggtgaacgcagcgagcgagggcagaggccagcagaggcgaggagtggatgctgcagggccgcaggccgggcagagaaacgcataccgggtcgctccctgcttcgccgccgcctcctggcagggccagcgaagccagtgctccagcgcccccgtaacacctcaaagcgcacggagtccgtgttggggaacttggcggcagagtgactgggacctaggacctgcggtggggccgccgccgcctccgcggggccgagcgcctggacctcgccctgaggtaaacgcgggtcgacccggggggcggatgggctcgggctgtgtcgaggggaggcggaggtgagcgacccgcgaagagcgcaggagcaggccgggggccacgctagggcggacccaatttcggaatagcgcggcccgggcggcggcgtgcgctgggaggaatgctgggtctgtcgctagcgccaaacttgaccacgctgcgaccttttcactctgtgctctgaccttcaaatctccctcccccgattttttttttttttttttttttgagacagagtttcgcttttgttgcccagggcgggagtgcagtgacatgatctcggctcactgcaacctccacctcctgggttcgggcgagtgtcctgcctcagcctcccgagtagctgggattatagacccccgccaccatgcccggcta

SEQ ID NO: 62187 - DNA, 3392 bp, Homo sapiens
gggattacaggcgtgagccaccgcacccagtctcacattctttttagagctgtcttgaattccatcatggggacataccattgggatatatcagtcccaagctgatggctattaatgtttttgatcttctgccatcacaagtatgcagcttggtgtgtgtgcatctgtcatattcgttcgggtgtctctgtaagacagactcctggaagtgggattactgggtcaaaggtagctagtaaagcacgacgggccttgccagcccagtgtgctccccaccagacccaggatctagccccaagtctgagtgatgcagaattcacgccctcacctctgtgccatcctgcctccttcagcagtagggctggagcgcatggtgaggggccagttctactttctgcctcagtcaggatcggtccacttgagcgtgatatgtgggggccgagccgggaggcgttggagctagccgaggagatgaggccagcccccaaacacttccagaacactctgagccttcatgaaggctgcaggagggagcatggcctcttgcccacattctccccacctgggatcttctctctggcggctgcctctgcctccccatcagcgccagagcaggactggcagtggcaccccaggcaccagtgagcaggctacagggtccgtccccacctagggctgcatggtcagaccccttgaagagggaatggcagaacctcaagaccttgggtgggagggcagcccaggagagccagccccaggccatgccatggctccgtggctcatgtgggcagccccccactggccctcacagaggcagagctgagtcagcagccagggtcggggtgcctctgaggcccaggcctacttcactgggaggtgtccctgcacagaagtgagagggctcaggaggggcctggctctctgcctctgctgcttcaggaaaagtcctgctccttggctgagccctcagggtccttctccagccccctgcccaccgcctgccctccggtctcctacaccccctcacactccagtcagtcatgtggaaatgcttgcagttctccacatgggttattccactgcctgcctccacgcctctgaccacgcagctccttcttttccagctaactcccacttgtccgcaaagacaattcaagagtcccttggagcagcctgttcgcacctatgcactcacacagcaccttgtttgtttagacccgcccagtgcctcacagcaaccccatctgggttcactgtcagagctctgagcccacggggctactcgtcccaaaggcatacagcatgtcccaacatctgacttcgaagctgggacaggcctggctccgggagggacagaggcttctacctggggtagctgagctgtccaaagaagtttcagccatgtcgagcccctggcgttgccgaaatcccccaccccacggtgccacagcaccagggcagcccctaggaaaagccagcccctcagaggccctgtgctaaagaccagaaattgcccctgggtctccgcaggagttctgcaatggggaagtgagccctcctgaggcctggctggcaggaggctcttcaaggccagcatcatgtggacttcccccaaccactcgcgtttctgcacagcagccacggagacctgggggctgctgaaaaacgagatcagaaggcaacgtcagcctgagtgggctgaaacctgagatgaggaaatgagaagacgtcagggggctggaggacatgggtttgaggacagccagcacccagcactgcagctgaggcctcctgagggagccagagggaaagcaagtcccctccctgcggcctgagtctctgccagtgcccagcactcccaaaggatccaccccaacctgagagaccccaaagacattggagcagccccagacacctcctcccagggccacaaaggcccctgacaagcccacagcagtccaaggcctccaactggagtcatctttggtaaatctggggcccatcagcacccactgcccttcctggtgccctaagcatgctggcagggggactggaaactgcatcccagtttgcagtgggtgtatgtctcatacacccacaatacctgatgtgggcgtgactcaccttggggacctgtgagtcaataagggtgtatgagtaaggggcagagcatttcaacttagtcccatagcacatgagctcactaagcaaacattacctatgtctagatttggggccagtcactacccactggaggctgtgggctccaaggtatggcagcaggggaggccagccaggctctgcccagcttgcccctccttgtgaggacggacccagccaggcctcccgcatccgcccttagactgggggaccctgggtgggggtagaaagggggactgaaagtggtgtctggagttaagcccatctcctcatcccccaccatggggatcaagatgggggctaagagtcaccccaccaccaccccaacccactctgaacgcaaaacagaaggggacaagcaaaacagaactgaaactgggcaaaggagaaacaggtctgggcccgccccagggacctctgtatctcaccccttacccatacacatcctgaccagggcctctcccccagcctgggaaaacctttcaagcttggccctctctcacctgggctctctcagcctcctgccctcccccatcttccctgctcccagcctcatgctgccccaggcctcaccccatcagagctaaaaggaccccaggctgggcatctgtagatcagggatctggtctccctctgccactaccttttgggatgacctttgggaagtcattcccttctctgagccacagtttcctcatctggcctgggctgtgggcatagaatctgcaggtgagggctctaatgggtgagtttcaggccaggctgagacttttcacattataacactgaggcacccagcaccttgactaccactcatcctggggacttgggaagggacagaggctgggattggacagtaacagccaagaccttcccagggcacaaacgctgcctccctgaagcctgccctgactgtccatgcaggtcactcccatcacttcacctcctccttccctccactcagcaccagccaccactgggtcacatctatgtccctttggctctgcaagagcagcctggacccctgcatcccctaccccagcacaggcctgacaccaagcaggggctcaacaaaatatgtgttgaaggccaggcacagtgactcatgtctgaaatctcagcactttgggaggccaaggccaacagatctcttgagttcaggagttcgagaccagcctcggtaatgtggtgaaacctcatctccacaaaagatacacaaaattatctgggtg

SEQ ID NO: 62188 - DNA, 1208 bp, Homo sapiens
acccctttgtggagccgatattcacctgggggaaggggagaagcattagttcaatctgccaggggtgaggtacccctgaaatgctttccacacagcctcaggataagccccaaaggaagcaaccattattctcatctgacagatgagcaactggggctctgagagggtgagtgatctacctgaggtcaaacagggtctcatatccagagctgaggcccagagggttcagaagaccaggcatgggctctggggcccagcttccagcctgggctttccgcagcagcgctgcccagctggccaggcccattagctcctgtttttctccacaccgccccagctccccactccaatctggactacctttagggagcctcccccaggagccatttataggatacggaggtgggggcagtttaggaagagaagccagctccctcggattccctgaggacccttggcagggccagaggggagataagagggtagggggggtgttgggggaagagagaggctcaccgtgcgcacagatgcgttcttgccctcggggaagtcaaagaggtagaccttgccacgtcctcccacccacacagaggagctgcctggctcgtggaaaagcaccgtgtgcggctcagtctggccaaagtccacccggtcctgccctacatggcctgaggaggagacaattagtagaaacattgaagccaggtcccgagagagaagactctgggtcccctccacatggcacactggaaccagtgcttggtgctcagggtcctggcagggcgtcagacaagctctgggctggggtggtacccagactcagagagtcaaggacaggagaagtaagagatcctccggtgggctccagcaaccagctgtcctcacccacagcacggcccctcccctagtgtggcagcctctccttccttcacagtatgtgtgatctcagagtggggaaggatttagggacctcttgggggaacagaccccctcctctggcacacacttttgagggctgggctaaggcaggaggaccagggctccttggccatgctctgggaggttctctgctgccctaagccaaagcaagcagcgccccccaaccccgggcctttcagcaggcagcagggccttcaagcaccccccttggagtccaggttcccaggaatcacaatgctcagaaccccttctcctccttcaggaatccc

SEQ ID NO: 62189 - DNA, 1024 bp, Homo sapiens
ttattatctaccctggcctaaaggctgcacccccgccctagatccaccgcctgggggtcccaacggccgtgccccacccaacgggcactgccccccaacgctggagccgatttctggtgacaactgccacgtgcgggcaaggggggagcggccggtcccggcattgctgaggcagcgccctggtaccccaagccgccgcaccgcaccatgtcccgccgctcgctgcaggatgcccacccccttgcctggcccgagctccgggccggggcgggggcgggggcaggcggcggggtctttgttcccgctgccgaagcgcggcggcggcggcaaggggtccgcgccccccttgccggcccagcctgcgccccgcgcgccagcagagcccgcagctcaaaaggagggtacccgggttggggtcccaggcggggaaaggtcctccgccgaagcccccgagccagaggacccagagtggctcggggccgagagaggggcccgccccctcccctggcgcccgggcgttgcggctcctggctgccagggacttggtgcgacttagccggggctccggcccccgccgctcgctcgccgcagcgttacagccggctctggtgtgccagcgtgtacactcacacacactcacccaaacccacacgctccacgcggggacagcgcggggacagcccgggacccgcagagctgcgcgcacgcactccctccgggtgcagcacactccgcacccgccccgcgcagcgtctgatcccgcgcctgaccggccgcgcggcgccgcctacctttccagacggcgaagatgcggggtccgctccttaggtggccctgggcggaggcggcggccgcccagagcagcagcagcagccgcagccgcagcggaagccccaaccgagccggcgggccagggacgcgggcgcgcggtgcgctgggggcggcacgtccgggcggaggaggcgtcatcccgtggccccgggagcgacagcggcaatcagccgagactgagccagcgcccggc

SEQ ID NO: 62190 - DNA, 1062 bp, Homo sapiens
gggcaccagctctggagtaagacagacctgagtttctgggaccacttgtccacttcctgcccatgagactgtgggcagatgatttcaacccttggaaccttggtgtccccatctgttcagtggagacaacagtatactcgcctttcccaaagatctggtatcaattctaactcctaaagcctctctacctcctcctctccttccccactgccacgccgtcaggtcagcctaccagcagctctaagtggatcactgccacagcctcctccccggcttcctcatgcctgccctccctcagtcttctactcccactatactcaccacacagcagccagaatgacctttctaaaacacacattggactctctcccgattgccattctgtgactcccattgtccagggtaagtctaaattccttacatagcttcaaatgatctagcctctgcccacccacttgccttgcaagccaccctgacaaacagggctacaaaagccaggtttgctccccactcccagccccctcagtacatataccttcgtgcccaattctcccttacccttcaggtctcagcgtagtgccactttctccatgaagctttccctcaccctcacacccccacccctagcccacgttagccccctctcctgtgagcgccacagcccctagacttgcctcgcccagttctcattaggctttaatgcaatcatctgtttgtccatcttaccaacaacacagcattgtcagagcaaagataccgtcatgtttatctggcagagagtggaggctcagtcaatgtttgttgaaaggatgaaaggaggcccggcgcggtggctcatgcctgtaatctcaacactttaggggaccaagacaggtggatcatttgaggtcaggagtttgaaaccagcctggccaacacggcgaaacctcatctctactaaaaatacataaattagctggctatggtggcacatgcctgtagtcgcagctacttgggaagctgaggcaggagcccaggaggtggaggttgcagtgagctgaaatcgtgccactgcaccccagc

SEQ ID NO: 62191 - DNA, 717 bp, Homo sapiens
ctggtctttgctctcaaccacaagtaggcagctgggctccaggcagaccactgaggcacacagaggcctggcattgagaagcccagttctgagtcttttctgtcaatgcacatagagagacttctcaaattttctggaagaggcaaagaataacatcctgttcgggccatatctggacgttaagagtatcactgatacactggaggtcatccagaaaaacgaacaggatatgctgggaaccaaaaccatgacaggtcaaaggggcaagtcaatgacccaccatggcattccgtaaataactaaagccctgctaaggtagaagaggaagcaggcttgttccgagtggttccttagggcagagaggggaccaaggggtaatgccctggcaaatagttaaaggacagaataggttgtaagtggtaaatcttttgttcctggaggagacaagcagaaaccaaatgaccatgactgggaatggtggagatgaaacgcctgccaaggcagagggcaggagcacatctctgagcccctttccacccatgttattcccaaatgaaccaaaacaccatctgaggggaagaagtgttctcccaacgaagtattcaaagcatttaaaacccactttctcaacttggacatgtctgcgatgccgcagggaacatcacagggaacgccatgccaaggggaacatgagtgagcacaggcagatggagcaac

SEQ ID NO: 62192 - DNA, 1434 bp, Homo sapiens
ctaaaccatctatataaattaagtctaaacttcatcgcctggcttacaaaactccctgccagcctcattccccaacagagccctacccctgcaaaggacctccacaacatgtaagtacacactcataacaaagctctcccctattttacacctctgctcatctaactctgcatgtaatttctcttccctttttggccttttagcaaactcctaccgaaaccaacacagattcaataacctcagtcccctctctttcctctgttgttcccacatcccctcagaacaaaagggctacaaatatctgcttgccccctcctccaccccaattcttgaatgcccttgaaaacaaaagactaaagttttcttcatccttgtccccatacctggcatacatggaaccccagaaaataaatcagaaactctgacggcggaagaatcttgcaaagcaagataagttcttgttatagtcatcattattgcttccaaagagacctctgatagagaagaggaaagaaaaggctgtgaagctgcctagcagaccttcaagcatcctcaaggtatcttccacctcaagtttatgccagaaggaggtcgttttatataccatgtctcacttaatcctcacaacggttccctaaggcaggcattagccacattttaaagatgagggaagcaagactcagtaaaatcactggcccaaggtcacagatcgctagtaatggggcaggaacactatccggtggcgacctcaccgctccagtgggaccagctacttggctgacacacatcgagcccgcgctgcccagggccccagcgccctcacccgtcccgcggaaggaacccggccgcactgccgccggtgtaaacactcactctggccctctcgccggaaaccggaaattccgcgctgcattctgggagttgcagttcccgctgtggccccccgcccccttataaacagccagtctacaagaggcgctagttgcaaagcttccggttctgggggaaggcgtggcttccgcgctctttgaaatgtccggcgccggaatgtctgggtgctttggttggagagggtcccatttccagtcattcttcagcctggtgattcccgcgctcccctgaggagcatatgaagtacgtcggttctgccaggttggaacgcgctgctggacactcggccgtaaggcggatcccggatcccctcccactccgacccttccctccagaagggccggttcccaaacggcccctttagacacatccaagcggttgccgacggccctcacgatgaaaactgctgtccgttggtgaaggcagcctcttctgtgctcctcgccgctgacttcctgaggcggacctacctgtggaggcataccaggaaccagacgatgaccccctccaaaagttgggtctttgaggagagctactaacttg

SEQ ID NO: 62193 - DNA, 1412 bp, Homo sapiens
tgcactccagcctgggcgatggcatgagaccctctctttaaaaaaaaaaaaaaaaaaaaaaaaatatatatatatatacatatatatatatatatatatatatatatgtatatatatatatgtatatatatatgtatatatatacatatatatatatatgatggcataagaccctctctttaaaaaaaaaaaaaaaatatatatatatatatattttttttttggcacaagatactgttgtggcacaagatactgtttgctttgaggcaaatcgatccaaaaagtttctgagtgaactgtattgccaaaaaattccccagcctggtccgaataaataagtaaaaccataaagtaacacttggaaatccaaagttgcaccatcaggaaggaggctttcaaggctgtgtagttcccaaggaggacaggcaccccacttcacacaaagccaggaagaacaatggctgaggaagaacttgccagagggcagaacaagggtggaaggagaacaatgccaggataatttttcctaaagagcaaaatctggtctaatctaggaaattcatccactgccaggaaaggatgtcttcataatgcatatctagcagaactccataattgctttggacaggaaggttgggtttttcccattctcccttttccaaataggatttgctattgcccttttcctgtctctgcttcatcattgtagatgggcaggtgggtttattggggtggggagaaagtggcaaccacttggcttttagttcatagattgctagaccatgaggaaattcactcaggccaattacagaagaccacaatccagattctgatatgaatcctataaatgaatggaagtttttgtcatagctcttgggagaagggtgaatatgagatttgctggtcagagaggctgactgtagcagcgaccccttgctatctaccaaaagtcattattctctttaggcacacaacaagactgtttcccatactcccattcaatttgagtgtggtcatgtgacggttttctccaatgtaatgtgagtggaaccaatgtgtgtcactacctgatccaggggataatagatggacagcttctgggccccttaatgaaaaaagtggaggagagtggccccattgacctgaatatccgcccgggactgttaggtgagcaagaaattaagtattttactgagtcatattttggatctatttgtcacagtagtttaacctattattaactgatacacaccccatgagtcatgcttgttcaacatgactatatatgcatatccttttaaacaataattattaatggtaacatactaaacaccctgtagtgaaccttgtttttttgttttctgtttttttttttttttttcattaaatttcctgctaagtgttctgtatca

SEQ ID NO: 62194 - DNA, 1878 bp, Homo sapiens
ttgcccaggctgctctccaactactgggcccaagagattcgcctgcctcagccttccaaagtgctgaaattacaggcgtgagctactgcatcaggcctataattcaaaagtagtcaagctgagagaatagcaggctgtggttgaaaagagggttgttcaaattactgagtcgtgacgcgatagcgtttggagggacaaggtccaggttttaactgggattgggaggctgatataagggtcgctaaagacgaggcccgatgttgaatgggttggccacataggctctgaaattatcaaagatggtcagacgggagacagacaaggagctggatacacagatcggcagattatctccaaacggggtgaagtaggtgacagagtctaaggggaagggctgaagaagcaagtgtttttacaagaggtgacagcacctggcacataatcccgacctctgcaaactgagacctgagaatactaattcatgtgagaaagtttcaagggacgcaacattctcgggacagccaggtctctgtcccaggaaggagcggagaagtttagagacaagctgatctaaacacgagaacctctgaggaagaccggcttgaaggcaggagattgaggaggggaccgaagcgacggcaaaccctacactcctctgctctttagttactttcctcccagccaaccgcccaagccacaccaacctccgcaatagaaaacgctcggagaacacgatctcccgcccagctcttttcaactccccgcggaagtgctcacaccggaacccctctgtgtccgcactttgccattggccgaggcttccgcccgcttccattcgcttcctcccacaactcagtcgggctgcgcggtccgtaggagtcacttccgcctcgtcccaccccgccccccggtccctttctagcagcttccggcttcggtcccgccccgccccctgtggccccgccccgcccccgcccccgcccctggctggcggtccagccccgcggcgccgcttccggtgcgggccccgccccggctgtggcccccggctgcggaggagtccgagacgcagctgccgcgccggggcctgagctgccgcctcctccgccgcccgaaaacccggagtgccccgcacaggtaagtggcccgggtccgggctccctcaggcatggcgggagaggaggctgcgacaggtggaggggccgaggccaggagccgaggcaggtgtagagagagaggggaatgcgcgagtcgggggcgcggggaccgcgaaggaaagtgagagcgccgcgggagccccgagcgccctgtgcccattagggcatttgagataaagcgtttgagataaagcgatgagaagggtgaggggccctggagctgagtgggcgcgcagataggtggggcgggggccatcggaagagccagcggattggctgggagggttggtagaggtaaaaatgatagggctgaatggggggaggtgaataaagaatggggggaggcgtgcaggggtgaccgggaaggtgggctgtggggcttacaggggcccggggccaaaagaatccggcagcaaaagcaggggaatggtcagcaggccgggttcaaagctgcaggtagtccgttgtacccggcttggtggtccgggaactttaggggaaatgggggaggggcccgtgtgaagggatgaagaggtttagatttgagacataagttctccaaatgtaggcaggtggcattgtttggatcgctggctgcttagggactgcgggaaaatgggctctttgggggagggtgtgtgtattgagttgtagaactgagtcatctcagtcttactataagaggctgtgggagggacacctccccctctgctggggacag

SEQ ID NO: 62195 - DNA, 727 bp, Homo sapiens
tgccactgcctcccatggatgttgtaaggattaaccgagctagcacatgtgaaagcttgtccagtgccaggcacatggtaggtaatagtgcccgggggagctcttttatgtaaacagtgccatcctctcctgcatcacatagacatgcctctgaagtgggagatgtactgagatacacagaggttttcactcatcacccagggagatagtggcagagctaggactagaatcagagaatcccaacttccacgacagcagcaccctggccgccagcccagacccgcctcccactgattgctttggtttagcaaaacatctgtgagttgccggctgcccccgcactgctgtgtggttggcagagttccataccggccgctgagtcagctcatagcaggatcctgccctgacagcgctgggaaagttcaggcccgaggcggctgggctgcccccgccttggcagctggccagcgtctgcgtgtgtgcggtcgttcctagaaagtgcagccgcatgcgaggaacaagtggagctccagagcctgtctgtcttcaggaagtgtagcaggtgttgaggtcaagccattagaggtttaaaaaaagactcttcagaactggcgtgtgcatgtgcacacgtgtgcaccgtggcagggcacccagcatcatgttatctagatggtggcagccctatgactacgtagctcagtattcagggggctggctgttggcattt

SEQ ID NO: 62196 - DNA, 1181 bp, Homo sapiens
cttacatgttctcgaatgtttatatttcaataaacctctacctcttcacacaagcaggtctctctcagttgctttgagtggcctttccactggacagtactggggagaggtgagctccttcagagtgaaaggggactgagtgaactactcctgaccccttgatttctcctgaaccttctccccttcacccacgccttcttcaaagggaaagctcactgagctcactctcagctaaccttgtgtgttagcaggtttctctggcgttaccccagaagctcctagaaaagcctgcccggcagcaagccacaggccccgccacgccattggccaggattgagtcacgtgccctccccagagccaatgggagcgagggggcagggtgaccgggaatgaccttagactgcccgccctgcgcggagggagatccactacaggctgcgcctctgcccctgcgaggggcacccctgggtctctgggaaacggaatggagggtcttatggaagagaaggtttggaaccaccgctggagggaaggggagaagaaagcaagcaggagtggcgcgaacaggaagggactagggatagaagccgggcttggacacagtgaggcacgaaccccgacagacacagagacagacaaggggtgctgatctcctcactgggcggggtgggcaggaaaaggaacaggagctggagctagagcgagggctgcgagcggcgagtggatacccggcctcagggaggagcttccaggagggcaggggtctcctttggagcagcaccggggacgtttgctcggcaagggctttttgtgcgaagtaaccgaagccagtcaggctaatggcggcagagagaaggatttattcttgcacccagggtgtgcggaggagcccaagggcatttggacctgtgttgacgtccggaagggcccggaacccaggaagctctgcccgcagagggtattcctctccctctgaagaccacctcaaagctcaactttatcacctccacgcatgagaccgccggcggctgaactaaaatctcaccatcccaattccagtttctgggaattgtcacctccattcgctctcattagaaatccagcttttttcacgaggtgaataacagggcagttgacagttcccaagttttctgtgtccaatcttcagccctggagggact

SEQ ID NO: 62197 - DNA, 2250 bp, Homo sapiens
aaggacttgatgcgcagccgcagctcggaagcggggggctcccctgcgacacctccccgcttcaggggcgggcccagacccgcggggaggggcatgggcggggccgcggctggctggcggccgccggggcggtgctggggaaacccttggcgcccccgcggagcggtcccaaggagggggcggtgcctggagggatggtccgccccgactgcgggtttctagccctcgcgtggcgtggggacaattaggcgccacgccctgtcgcttcactgcgcgacgctcgcgaggccggggacgccactcccagaccgggcgggacgcgcacgctcacagtgaggtctcaaaagatccccacctcagttttctcatctggaaagtggggcctcgtaatcctgtccgacccggcgcgggacagtaggtgtcagggattttggtgaccccacgctcgaggcctctgcaaaagggggctgtccagtggcccagagacgcagccggcggggcttttgtctagcgggggagtcttaactgagaggccacgcaggccggcaggaagccgctccacaggagggggctcaaggagaggggatctcctccctccagactccggccccgccagagtagctctagggtatcttcccagaaactgccccgcacgcactggcgagctgggagcgccaccacggctttcaaaaaacccgcacacaccaagataataatgtgtcgttcgctcgtttcgcgcaagcggagtcgcgtccgccttcccgagctccggcacacagacctcaggccgctctcgcgctctccggggccccgagaacaatgcccgtcctctccgcgcgcaggagggagttggcggaccacgcggggtcggggcgacggagcgggcccagccccacggccaggtcggggccccacctctcggctctgagagcccagccggcccgggccgcgcacctgtcaggtcgggggacctacgtgcgccgcgacacggcgggaggcgggccgggccaggctcgtcccctcggccctcccggaactagtctcctaggccgcggcgcccgccggagcggagagggctggtgccccggagccttcgagtcgggggctagagcggccaggcctccgagccgggtcgagccgaggctggcgacggctgcgtcacgcgagggggcggggctgccacgggcggaggtcgcagccggaagcggaagaggcgctcggagcggggagtggggcctagctgcagccggagcctgggagacggtaagtgtgggctggggtccgcggcggcgacagcggcggcggcggccgggggtgagtcggcggggcaggcgcgctggtgccattcggtctcggcctactccctttctttctcctcttcggcccatatcgggccgcgacctctcacccctgacccgctgcttctgccccggagggcggtcactgcagaccctgacctcgaccccacggtgttgaaggcggagcctgaacggcctctggggccgctcaagggtccagtttgggctctgtgcctgcccgcggaatggggtcggggtccgacgtagaagagccagagaagcccttcagacccctcccctacccctggcttcaggcttagtccgcagatgactcctcccttggcggcctggagtttgattctggcccagtccggctttccctctgtccccgggtctcccctcggcgccactggtggcggttacaggggatgggactctgagaccccctgggacctggggcggcaggaagggacgcgaacgagggcgcaggctcccctgtgtgttttgttgtggtggtagagccactccagcccggaggatgggctaggccaagctgacagttcaaatcccctggctgctcctccgtcccgcccgggagtctctagctttagttccgggtgtgggtgccctgatgtggagctggggtggaaattgcctgaaccaggcccccatcagaggcggagttggcggccttccagcttcccttcttgatgcccttgaaaaggaggagcgtttcaccgttggtggtggaggcttgcgaggtggcaggtttgaggttgcagtggtagggcagtccagccaaaaataaccatgggtgctggggtggctggaatccgggagggcagccgctgacctggctggctgcacttctagtcagcccagttctctggccaggaacagcaaatgagaagccgacaaggcctgtgctcaaagttgacatccttggcttggt

SEQ ID NO: 62198 - DNA, 573 bp, Homo sapiens
ttttatatttaaacttaacacatgcacgtagaatcagtcttcaaagaatttcaaattacaagtctggatccagaaagaccctggccaatccagagtgtgatcactggacaccattatttagcagggcaggcccaagctagagaaatgtctgatgatccgtgactgcgggagacagaagccctgccaaagaacctgaaaggaatttccagagagaaaaaattggggttaaacaaagagctaaatttagttgcttcctgaatgtgttttcccaatcaatagacctaaaacaacactgttccccatcacaacacacacagctggcaaagagtactgccaagaggagtatgagcaattagtgaataatagcttatgtactgttggttgacaccacttagcatgaagtcaatatatagggcaccagcagcaagctgtcagaatcctaaatcccaagccatcaccaaatgggtaataaatatgttgttcttttgctaccatggggattagtacaaaagtacttggtattctaggacatgaatgccacaaggccagactgcgggagctctccaagttact

SEQ ID NO: 62199 - DNA, 1252 bp, Homo sapiens
ccacttcatatcatgccacatgatgaggagctattgaaatgcaaagtagaaaagtaaagaaaacaaacatgactagctgtaaagttcgttcacagcatgttgacaaagtgccccactataaagactaacagggtccacagtgggagacgccttaattctgccttaatgatgctgggcactggtcatcattttctggctcaactgtaggactctacaaacataacttacaacaaaacccagagatgttgtatgaagaaggtttcaggtgttttcctgtactcctctaaatgcagagttgattcattcatttgagacatagacactaaggactagctatgttctaaacactgtcaggaaagcagagtgtgaaaaatatttcccaagaggaaatactgacatcacaggtcagtaagagaaagataagagaacataaaataaatgcaaggcaggctaatgtgctcagttgtctcttattcttccctttcctcatactttaatacaaatattaggaagtcctgagtgaacaagctgtctcagtacttggcttactcatcccaaagggcctggctctgcattaaactggcctttggccactgcgagagaaaagcacttcccttggaaaagacaaacagtcttcccagatttctttacctttcaattacaagggccatgcaagtactgcaggctggctgccttcctgtgccgtttttctgccaccctttggcacagaggccctttggccaggacaacttgtaacaaacccattgttgtgtaaccctcagtgccacttatttattggtttttgtcacacacacactgtaagtgggaactttgtcctgcacttatcacactaaagggtacctgaatgttaaactacaaatgttttactgccagattaaacaggcatcatgagaaggtgcctgagaatatatgggaccttcttctcaactctcaaattctaggccctgggttttcaagcctattagatatatgaagcacatccaaggaagtttaaaagtcaagaaaacctcagtagaaccatgaaaacctggcaaaattcacttcctgcctcaggtggtgggatgactgttaaaatgaacagaccgttaaagcccaaccatactgcaacaagataatatcgaccatctttccatttaaaaggttcaattccatccctcatttctctccacctccagtaacaaagagaaaaagggaaatcagcactaaacagaggcactgtcatgcctatagg

SEQ ID NO: 62200 - DNA, 1321 bp, Homo sapiens
agaagaaaaaccattctgggtcgcgagttcctcacctgtaaccacaggagaagactgttggcttggtcagttgattttcaactaatctcccaattgaagagttaggcgaagcaattgctattgggagattaactgaaaattaactgaccaagccaacaaggactatgcctcccacaaaccaaaacactttaaccactcagcaagtcaagtattgatacatacaatcaatatcacacaaagtgtactgaaaagaaccacagacttgcatcaaaggcagaaatgaatccagggataacttcctgggattcgaagatgtgacctggtaggtataaatttctcaggcatcctctttttctaccctccagttcatctccgtcctcaagctatcagtcatggatgtggcactggcgttcttctctgccaccgtatctcattatgcaaagggaaactgaggcacgaagaacagagtgagtgagccaaagaactgcagcagccaccaacaaggctggactaagggcccaagcagctaatgcctcactccccacacaatccccatactatttagaatcctgcagtcctcagccttccacctcaaaccaaactcctggggccgcccgtagtacgtggtcccctgctcatccgatgaagcccccagctcttgcctgcctgcctgcctctataaaggtctacgaggcctggaactctgaagcctaaagcaaccccggcagccccctcccacgaccgtccacaaaccagtagcctcccttcgctcccacctccgcgccgacgggcctggagctcctccgcacaccacaccaagccgaccactcaacaccagaggacccacagaagaattctctccacgcccacccccacagcatcggccttcaccaccgccgccgctgccggaagcgcccccacgtctccacgccaccaccgtgaggtcacttccggcgcgacaccttggaatccagggccgtcaattgaggggcgtggcacccgggaaatttaagaggttggaagaacgtcccttcggccttacagaattgcgcttgggtagtcattttgccctccacgcttacttatgtcctgtggcgtcttggctggaatcggggctctacccacgactccccagcctcgatgcctgggcccccctcttgcaggctcgatgaaaagcacccgcttcccctcctgttaccccagcgccaatcgcagagctggagcggaggactttcagggaggcctggtgacgtgacagcccctccgtgctaaactgcagctgtgggacttaataagtgcgacaaccccctgatggattaaa

SEQ ID NO: 62201 - DNA, 2313 bp, Homo sapiens
ctaggggatggagctggagcctgggtcctgaagtcctgaatgagatgccatctgtatctagaggtctggtaccagctgtgggaccatgggcaagtcctcctcttcccctggcctcagtttccccactagggggctagactgcctggtcactaaaaacactctgagcctccctttttggaggtgctagacaggtagctacctaagaagtcctggaggcaccaaaatgttccttttattgggagagaaagggcaagccagaagtcccccagcaactcacctgaggtactgagctgagctgggaagggtggactcttggagcctgggatcacaaggatcagggaaggttccaaggaactgtcaccttcagggtgagggtgaaggcactgccacctttataggcgggcttgtacgtgtggccacgcctccttccctggagcgagctgagatggagggagaagcagcctgaaccgggctggtctctctgggattggagagaaaggtggcggagggcggcgggggtggggggtcgggtgggcaagaacccactatgggacacatctcggtgcctgtacatagaggggtgagggctgggaacacctggaagtcccaattccaaggcgtcccaagggcagtgcagaacccagccgaggagggggcttgagggagaagtcccaggacagcccgaagagagggtacgggaagctccatcctggggcgcggggactcctcttcgtcatttttgcacccactggaacgctgggcgtgcagatgcctccccagcgctacagcctaccaggactcggcaggcgggggcggggctgccccgtggtgacctccttcccggggttactgagtcccggctcgcgtgagaagcgctgcgaccccagccctgaggtcacgggggccggaaggccagaggcgccgcggggctggacctgtcccccagagcccgggcgactagctgaggttcgcgcctcttgattgaaggatcggaatggatggcgaaggggcaggctcgctgagcgctcactagcggctcctcgcagcctctaggatcgccttagtgctgattgcaacgcgcggtccctccagccaggacccaccggcccttgagggtccctcttggctcccggggtggctagtgctttgattggcagagcacagaaatccggcggcggggggccacggaaagactcgggcccagggaccacggagggggcacctggcgcggagcccccaccctacccccggctagcttgcgtgcgccggcgacatccctctagggggcagaggtcaggcggcccgtccccgccccacctggcccggaggcgcggtgcccaggcgttgcgtgagaaggaccggaggcccgcgcagccacccagccgacccattccccggcccggcgcgggggctcgcagtcacgcgaggggggagggagtcggggcggggctcttaaagggccagcctcgcgcgcggcgtggggttggggtggagggagaggaactgtcgaagggtggcgggtgcgcgattgaataaggggatgcggtgcaaagggtctaggtctgcgtgtggcttctgcctgcgaggagaggcagcctgcatgtgtccgcattttcggtccacgcctgtggcacgacacgaagccccagtgccatttggcatggcctagctgcctgcctccgacgctgtcccgccctccggaaccttcctgttacagggtttccaggaaaaaaaaagttgtatttgcgtgcctagctcaacctggccccagctaacatcgttacgcgccatccccgacgtgctccccaacccggtggcaccaccatccgtcgctggtccaggccagaaaataatcccctcacctcccattccggtcatatgcggcctcgtgcattgcacaaatatttaccaagcaactactatgtgccaggagctgttcggaggcgctggcgattgacagagaagggaacacagctgacagcactcctaatctcgtggagtttacattctgatggaaggagacaagtaatatgccccaaatctagagaatgtgagagggtaaaaagtgcggttgaaaaaaattaaacagaaaaggcgtacggattatgtgagggcagattgcaattcaaaacaagggggtcagggaaggccttgcggagagaggcaggagtgtggagtcaagaatcaatgtgcatagatatctggataaaaagtgtacctgggcaggtgcggtggctcacgcctgtaatcccaggactttggaaggccgagtcgggaggatcgcctgaggtcaggagttcaagaccagcctgg

SEQ ID NO: 62202 - DNA, 1822 bp, Homo sapiens
tctgaggagcttcatggtacccaagagaggtctgtccttcaatcctagttggagctagagccacagagaacgagcctgtgtggaagccatggcaaggaagtggaaagcaaggcactcctagatcctccaacatgctctgcagcacaacctcttcttcagcttcccagggtccccaccaatgccccagcgctggagaatcatggcagcctggtcaccagggctggaagaccaactagtgctagggctcccaaccagggacccttctcttgatagaaagtgcgttgctttgcttgcattatctaagaggctcttgactcctcaaaaactcattagctaataaaaccaattcgtctctcacttcttaggtggagagatgggtgccagaaaagaaaaggcccaagtacgcatggcaaatcaaagcagagcctagaactccagcttcttgcttctaggccagggcccgtctcaccataacttatcatcccagactatgagtgaagccccagggggccaaaggtagacagactcagcccctgggccagggcccctcacctctccacacccctggactggtgcactggggttacaagagatgttgcacttctcatcaccaagccgtatcttggctaacagttcacaataacaggaagggggcccacactgagcactgggcagagaaggagggagtcaggcaggaggttagaggaccttggcctggagctgaacactcattcctgggtcaaagtttgcatgcctttgcgtgagaagctctttggctaggattccctagtgatcaataccaggagcaggggcagaagtgctggggaggggaaagggctctgggctggagagatcgagacagctgagaggccttagcccagcaaaatcatcagcctagggctttcagtgagccctgctgaaggctgtgggcaaaggggactggaagacaagcaagatccacagcaaacccctgccccatggtagagatgggagtcataccctagacaagtcctgtgatgagtctggagatgctgcaggagctgtgaggaggctggggcaggaggggtgttaaagggatgctccccggagagtggagaactagagaaggcccctggagtctaaggagcataggaagggcattcctagcatggggaagagacacaatgtgaacaacagatagtagtgggaggtcggggtgaggcagtttgggtggatgtggagaactgggacttgtctcccaatgtgtcctctccccacccagtcatccccttctcctactgagatctgagcctgagcatcttcccttcctctcctgcctgtgcccagagagccagatagattgagtttgcaggatacagggctcagatggggcagctcttggctccctggctcttggctgctatagttaggatgacagtattttcccaggacagtctaagcctgttgtcatggaagaattgttaaaagtgccctctttcactctcaaaagatcctggcttagatgataataagttatatagtcaccccagtgatggtgggcatgggtgggttttgggggcccagcatctgttctcccttcttttggcaataccacatcaattgtcctttcgggatcacctcacccctactctcagcccatagggttactgtagctgacccaccccaggccaagccaatgagaaccctatgggagtttcccaacaccccctgccttctgttgctcgccagagtgcagtggtgcgatcttggctcactgcaaactccacctcctgggttcaagcaattcttctgactcagcctcccaggtagctgggattacagg

SEQ ID NO: 62203 - DNA, 710 bp, Homo sapiens
aggaaatgaatgaatgaatgtctccatctcaaccctcagcctggtccctccttttttccctgcagttggtacagatggcattgtcccagtctgttcccttctcggccacagagcttctcctggcctctgccatcttctgcctggtattctgggtgctcaagggtttgaggcctcgggtccccaaaggcctgaaaagtccaccagagccatggggctggcccttgctcgggcatgtgctgaccctggggaagaacccgcacctggcactgtcaaggatgagccagcgctacggggacgtcctgcagatccgcattggctccacgcccgtgctggtgctgagccgcctggacaccatccggcaggccctggtgcggcagggcgacgatttcaagggccggcctgacctctacacctccaccctcatcactgatggccagagcttgaccttcagcacagactctggaccggtgtgggctgcccgccggcgcctggcccagaatgccctcaacaccttctccatcgcctctgacccagcttcctcatcctcctgctacctggaggagcatgtgagcaaggaggctaaggccctgatcagcaggttgcaggagctgatggcagggcctgggcacttcgacccttacaatcaggtggtggtgtcagtggccaacgtcattggtgccatgtgcttcggacagcacttccctgagagt

SEQ ID NO: 62204 - DNA, 639 bp, Homo sapiens
ccatccagtccaaacataatctaacccccagctctcaggagaaagttccacttgtgatctcagcgctcattcccctctgttcatattccctccctcccagtgccctctgtgccagtcaggtcggcctcaccctcacaagcatgaccctattggcctccaatcttgctaacgctgaaccttctgcctggaataccttctagcctcttctctgaccaccagaatcctacccttgctcaaagtcaatgccgacacgagcttcctctccccagaagccttttgactcatccagctggcacagcttcattcctgatgtcttataggacttacagccatcagcccttgatcatgccctggaattttaacaatgtcaagagagttagtgagcatttacttctacccaaacgttgttctagttattcctgcagtaagaggcctgaatccccagccaggctagaaattccccggggctgccccaggctgcctgctgcttttttttttttttttttttttttcatagaaaatagaaaaacatttatctgaaattgcctgcttcttggctccagagaacagccaagtgcgcagccaggcgcaaagagaagtttagtaaatacttgctgaagttaaagaacaggacgcaag

SEQ ID NO: 62205 - DNA, 679 bp, Homo sapiens
acgcccagctaattttttgtatttttagtagagacagggtttcaccatgttagccaggatggtctcgatctcctgaccttgtgatctgcctgcttcggcctcccaaagtgctgggattataggtgtgagccacggcgcccagcccaataattccaccagaggacaggtctgtgggagtggggccctttatcgatttgtttatggttttatccccagtgcctggagtacaggaagattaaaaaatttatttcactttgctgagaagaggtggagccaggattcaaatgctggtctatttgactccaaagttcacagctgggccacagcacacccaggggaaaaagtcaagtgcatttggggataaagaaaggttggtgacaaaactggaacagggattagagtattttccccaaatccccagtcttttctttcccattctgctagctgattcagccaggggaggggagatgtcaatttctccctcccagaaggctttgcagagctgctgaagtgctttcttgtaggctgagaggcggccccccatccggccccatattatcattccatcttgacctcagaggaaagaaagggaaaccagctctgctgagcaccctttccactccctcacccccaggccgttatcttgctgaatctgcactatctatcatgagagaagtat

SEQ ID NO: 62206 - DNA, 2356 bp, Homo sapiens
catgccccacttcctcccccccaaccccaagagtgcctcttccctctgtccacccaagcctgacccttgcttcagggtctagtccctagaaagtcccccacctttacctcctccctacgctggagtctctggtctcgccctcatcactgtatccccattctgttccccggtctcaccctcatcactgcatccccattctgttcccccgccaccctgcactctcccacccctgtcatgcctgagcacgctgtcctctcctgtggctcagagcaggtcatctccctgcttttcgttaacagtgatgtaacagcccttgcttaacggagggctcctcacgtgccagctactgcatactaagcactttaaacgtattaactcatttcctcccctccccacaaaaacttaagaagtcggtgccattatatatcacctattttaccaaatggggaaactaaagcacagagaggttaagtaacttgcccaaggtcacagagctgctgacaacttctttattgcctccaggctgaacataaactccaagaaagtcccatgaggctctttggatctcttttgcccctgttgtttgcaggaacccatctcccaccactctcccccacccacactgcaagcggcagccgcctgagctatatttagatcccagaagccaccaagctccctccgcactccccgcccttgtgcatgctgttccctctgcctggtcccggctctgtgaggtgtgaggtctccccgttagccctagttttctttctgcctcctgggaaccgtgtccaccacctctccactttgatcaattatttccttgccgttgtctgtcggcctgtcagcctacccccacccgaccgagaacgccttgacggtagtgaaatggtcttgccaatagactccagagcaggctccgccacgatgtcagcgccaggaaatgttggtgaatgaatgaatgaaggctttctgctgcgaatcaggcccactctccacaaacagacctgaggagaggggcccaggcccggcccccagcgcttctgcagcgggaaagctgcgtccagagaaggctgggaggttgctcccaggccggctgaggagagaccctcggagccttcaacgcagccaggcggcaagtgggggcagggcgtgggcgcggacacaccccccgcagtgcccccggcgcccggcagggggcgccgccccgccggcccacgccccgccgcgcgccgggcaggccccctcgcgcaggcgcgctgccgcgggcggaggatccgggccgcgcttcctctcgccaggcctgcgagcttcctcccagcggagccctgggcgagccgaggttggccgccgccgccgccgagcccgctgccgccctcccgctcctgccccacccgcgccttgcccgggggcttctgccggggtggggtccgagccgggcgaccgcccggctgcgccgccgtcggggccgtaacccggcccgccgtccctcccgccccagccagcctctggccgccggagcccgcggggcgtggagcgcgaggagccccgcggccccgatcgagcgtccggggcggcccccggcagccagcgcgacgttccaaaatcgaacctcagtggcggcgctcggaagcggaactctgccggggccgcgccggctacattgtttcctccccccgactccctcccgcccccttcccccgcctttcttccctccgcgacccgggccgtgcgtccgtccccctgcctctgcctggcggtccctcctcccctctccttgcacccatacctctttgtaccgcaccccctggggacccctgcgcccctcccctcccccctgaccgcatggaccgtcccgcaggccgctgatgccgcccgcggcgaggtggcccggaccgcagtgccccaagagaggtgagtgcctggccgtcccggagtgtcccctggagggaagagggtggaggtcgcgcgtctagtctctgttgctgccactgtcgcgtccactcccattcccctcttctcccacttctcccttctctcctttactcccttgcacgggttcgaattctcccaggagccactgtcagaacccaaattggaagggagtgcatgagggaggtactgccctgcagctccacggactcgtcttctcgggtcatcccgagtccccccctctgtggagctcagagtaggaggtggctggagtctggaggaagaggatccgtatgggccaggtccctagagagagtgctggactcccctgcccttccctgtacagggcctccccgcaggtgccctggcttgcttggttctgacccctccctcattaccccaccatgaccctgcgggctgcaagcaa

SEQ ID NO: 62207 - DNA, 1278 bp, Homo sapiens
ctggtggaggtgagctggggggtacagagccttgctcccaccctcacacaccctaaacccatctggggccctggcttctagctccagccccactgcttctgcgtggtgaccagccatgtggggcaacttctgtgagcccttgtttcctcacaccttggtggagcagctgctgcgtgccaggactcacctctgaccccacagtgccaccatgaggaggggagccttatcctcattttatagaccaggagttgaaggttcagagcagttaggggacccacctgaggtcccacagatataatttggtgccaggactagaatctgagtctgtctgatcccagagctaactttcctccagccactcacagacctgcatgctcagaagcgtgtgcagaaacatgagccatgcgccttgatcgccagggcccctgaggctctcgcacctgcacggacatgcccacaggtccctgcagcttcccaggccagctctgccagccctggccaggccacacctggcatccggtagccacaggaagcctcccgtgtccctctgtattcactcttatctccctcccctactggcctggcttggcctgtggcaggtgagggtggggtcctgggcactcctggctagaggctggtttcaggactgagccatgggttgccctctgcatcagatacccatggggcccagagtggtagcagcagctgagtgtccagcaaccgcatgtagggtggcatgggaaatgggccatacgtcataatctgggacttccctaacccctgccctaccagaaatggggagccctccccactcagtgactccaggctaggcggggctggcctctgccgccctctggtggtcaggcctggacggtgcatatggggcaccttgggctgtctctgagcaccctgccccccacaccctgcagcactacacctcagacgcagatggactctgtacgcgcctcattaaaccaaaggtcatggagggcacagtggcggcccaggatgagttctaccgcagtgagtgcaccccaccccagacctcttgcccacccacctcctcccacgcaggcttcctggcactgccccatccaggaacctccagagaaccccagtgcctgatagtccagtcagcctctgtcatcccagccatgtccctagtggcctccaggccctcactggcccctccccacaggcggctgggccctgaacatgaaggagctgaagctgctgcagaccatcgggaagggggagttcggaggtgagctgggccgg

SEQ ID NO: 62208 - DNA, 1141 bp, Homo sapiens
cggctcaggctgcttctcacctccctgcaggacagtcctgccatccgtgtgctggccagcgacgggcacatcccctctgagcagcctgggtaagggcctgtctggactgaccactcacctccatttttgcactgggaggggcccatcccccccatccgagcccctgccccagcctcctccagcagggggcccaccctgccgggccgccatacttgctggactctctcacttagccgacgtccgcccccctggggcttgattccttcgacccagcagccccaggtgaaatgacacaggctggggcctgtgatgagtatctttgctcccatgatctcatcccatctccaacaccctccataagtggggggttattcgtcccatttacaggtcaggacattgagcccagagaggggaagggatgtgccgtgcgcagtgctgaactttgagcccagacttacccctggagggtcctcgcccttccctgcatagctgtcccttccctttcccctgatgatttggcttctgtccctccccggccctactgcctcctcagtagctgggccggtttgtcagtgtctctcagcaaccttctctcggctcataacaattagagtaattgcctgcatttatggagtgagctgattgtatgccaggcacagcaccaagcccttctcatttactgtcttagttaaccctcataacattgttatgaggtcgttccaattaccatcctcgttttagagatgggaacactggggtttggagagatgagatggcttgcccaaggtcacatagctcggggcacaaacccaggtggctgctgtggtgctggcttctcccctgccctgtgctgcctccctcttggcggaaggcggcactgtcagacgctctgctgtgagtagcctgaggtgtccagagacactcagcgtttaacactcttctcctgactccccagagcctgccgagccgacctgtcagggaggcagcctggtcacattgtccttggctgccgggacatgtccaggtcatccgtcctgagtcagctgcattctgagccctggcagctgggagaggaaaaggaagccagaggcacagaggacttggagtttaaaagaaggaggagggagaggccaggcacagt

SEQ ID NO: 62209 - DNA, 1309 bp, Homo sapiens
gttttgagcctgttcttcagccactgaccctgcaggtgggtgcaggtgcgctctttaagacctaagcgtggcagtcggctccaacctccgccgagggtcagctggggcgaggccggcctcccgcccctaactattcccacactgtcgctaacctctcagagtctccccggccggcaccagccgagctagctcgggcgggcacggggccatcggccggcacccaccttggcgtaggccttgtacaccgtggcgtacgtgccgctgcccaggcgctcggtgaggatgaagccgtccaggcgcgggggaccccagccgggccccgccattccggccgcctgcgcccgcgcgggcgcttcctcgctgcgggcggcggttccggcgggttgcggggcgggccgagcactgggtggctccacgctgcccccagcgccgcccgccggaaatgcagcgcgcatcggggacgcggatccgcccggctcccggcgcccctcccctgtctctgggcctcgccgggtcacgcgccccgccagttcctgcagggcccacgtggggatacggaggccccgcgagcctagaagttaacaacggaggacggccggcgtggtctccggggactcctagcgggcgcagaggcgtctagagatcgcccacgtgagggcgcgggcggcggagcgggcgtgtgtgggggcgacggcgtccgggaggctcccagggcccctccccaggacccgcagctctgaaaggagagctactggcacgagaaggcgcctttggaagaggccgcgttggcttcccaggcctcccagctgcttttcacttttctgaggaagggccttgacctatttattgcatcttaactgtccccgctctccaatcttagcagcggcgcccagcccctaatcctgtgggctgccccgtcctcccaagtccaccagacatgtggacccgtgttgtctgaaaatgtttttatttttacttaagcacaaaaattgagacgtaacatatacatttgtacatagaggggaaaaaataccagaaaggagttcataaaaccccagccgctgccagtatcattcagtggctggggcctgcggctgtctcgggcccagagccggaggctagttttgtgggaaggcaccccagtccacacacccactcggcagcctcgagggacagggtgctggttttaagggtggactcctacgtgtcccatcacagtgacacaccccccagggtgtgaaccagactccactgggtattagggggccctccgagagatggcttatcagtccctgctgagggatgcggt

SEQ ID NO: 62210 - DNA, 1323 bp, Homo sapiens
cctccaccagaggcttcaccacctcctcatatgttgctgtcaccccctcttctaaagtgactcaagacaggtgtctatccaagaatgagggaatgcgatagccacatttcgcttctccctgacgctaggagacttccggaagggtccgaccgtacctgctccagtccccttccctagcacagcccagcctccgggtgctagaagaccccactgtctccaacacttcagcgccccgcctcctctgcagttccacctgctgctagtcgcgcccctcacgcgttacgataggccagacctcaaagcccgctctcccattgggcagatgacccgtccctcctacgccacgtctcccggctctagcgagaggcccgggcggcggccgtgggccctagggaaatctgagagctggatggcgggagaggggctctacctggaaggggtttacatccactgggtccgcgaaggggttggtgtcgaaagccgacatggtgatcgggggccagcgggcgaactccgcgaacgctgctgcctccgggcacccagacccagcggcgcttcgtgtagaccctccacttccgggagcgaggcagcggttctggcgcaggcgcgatgccctcccccgagggcgtggccctatgacggcaccggggtcgctccgccccccccccccccccccccgcccagcccacaatagtgcggtgggtgggcattcggcttccgtccacatcttcgctctgctggggattcaggggtcttggctgcgcggagcgtctacggagccagaggcgtggccggagtccttcccaactgcctatcaatctgacaccttccaattttatgtttctaaagcaaactctcaaaagtgggacaggaaacagccccttcacttctctgtagaccaagtttgggaagaagtccaaactgatccctgggcaaaggacaggggtgacaggtgaggccagaggccttgggagaactaggaaagcgcttcttctgcagaacgtgctcggggaaagagaagtgccaggaccatccagcagtcctccacccgagctgagcctgcttcttctagggctgctcgccctctgatgtcgtttcatcgttttagggacgagggttcctgggcccatcagctttgggacctgagttgggacttgaacctggacatcaaacatttatgaagtgactcacggaattcagcaacacagcctcaatcatgggggaggtggctgcttcactctccacagctccgctttcccccgcccccgccccccacagggtctcactgtcgcccaggctggagtgcagtggtgcaatcatggc

SEQ ID NO: 62211 - DNA, 1150 bp, Homo sapiens
gccttcaccagaatgtaagcgctctacaaaggcagagggaaggctatcttgctctctgatgtatcctccagcccttagaacagtccgtggtacttagcaggttttcagtacatctgtgcccggcgatggaaagaatgaatgaatagtgagaccgaagatcgcggccgtaagcctctgggcacgggtgccccggggcctggcggaacgctcagggaactacatttcccgtgaagctctgggcgcagagggccgcgggggctgccgggaaaggcatacgtgcttaatcctggtgcagggggcgagcatggccgctccgcgaggtgagccattggctggggtgtcggcgagtgtgttcgtggagcgcgtcctggggacgactcccggcattatcggccaggttgagtccgctcctggcattccgcggaaagatgggtgggtgccgggcagaggtgtggccacctgcgatggggattgacctccgaggggagggggcccttctagacgtcgtgccgtgggataggtaccttctgctccctccccgccaccctgcctcagatcagcacaaggtccttactgctgcccatctgacagttgggaacatcgaggcctgcagcggaggggggtctcatccaacagcctacaaaacccttatttgactctgtccccagtgagcacccccagctcttgcctggtttcccgggacactagggtggggcctgaggagtggagtggcagctgaccctgtctgtgcccctagtattcccactttcctgtgcggtgcagcagtatgcctgggggaagatgggttccaacagcgaagtggcgcggctgttggccagcagtgatccactggcccagatcgcagaggacaagccttatgcagaggtgagccccgggctgtatttcagcccactttacccgcaggtcaggagaaagggcctgaggcaagtcataagaatcagctgggaagggtgaggcagcaaggagggaggagacccacttggctcttcaggctaatggactagatagtgttatcaaaaagaagagaggttttgtcataataggctgggatttccagcactctccttcccccaaccactcttagcacttagtgaattttaattcagccctctttgacaattaagttttt

SEQ ID NO: 62212 - DNA, 967 bp, Homo sapiens
aggctttcgcctctgcttctgaaactggaagatgtatgttaacccctgaaagaatcatttaagagtcatagtttttctgctaccttgacagtgcagatgtcattctcctctttggacagacaaagaagatacatctaaagaagggaaataactagtccaagtcttcatagatggctagaggccgagtctggacaagggcctgggtctactgcctccctgtatgtccatgatggcatgaacatttgtatccagacctgggaggcctttcccaggactcagttgccctgtggggagcacagcataacggattgggacaggccaactcagggtggcaggtttcttcccccttcccctcccaagtttcctgtctttccagttgtggatggggactcacccccgaggggatgccaagatccttgacaaccgcatctcacagaagaccctaagccagtggattgctgagaaccaggacagcttgggctcaaaggtcaaggacacctttaatggcaacctgcccttcctcttcaaagtgctctcagttgaaacacccctgtccatccaggcacaccctaacaaggtaaaggacagagtgcggtgcagaggtcagggtacagaagggcttatgctaaggccctcccgtgacttttactgccacttttaccccacccatgccaggctcctgcccaaggccaaatccaggctgacaactcccaatttagctctgcaaagccagatggtagtgacacatgcagcaactaagtctaagcaaacagctcaccggcctgtgccaggggagtttctctaagctcattccaaggggcttgttcctggtcttccctcatccaacccatgtctattcatatctgccatttactcatctgctttcaggaagagttcaacttgcaaggcagggcaggtaccctcagccccacccccatggagtctccctacacaagccggagtccca

SEQ ID NO: 62213 - DNA, 1817 bp, Homo sapiens
tctccccacttatttaatcagaggacacaaaaactgcaagtctttgggtaaaaggttagggttaaccttcacttctccgagtttcaaccctcatctgtaaaaggaggcactgaataaggttctatgcagctccgagtttactattctgttaaaaacaaacaaacaaaaacaggtctagccattcccacactgctcttcgtcctcattgctggggactccagccaccattctcctccctaacagaggaggagaatgatagtgaatgagcctgtgcactcacagaactcccttattccgaagccctttatctgatcctatcacatccttaaaggaaaagagagattgttcctcttcccattttaaagatagtgaacctgacaggttgcatcaggggaatcgctagctcggccttaaaccagagcaccctgcctccgtcctggggattaaagccttctctaaagctgctggcacagaggaggtggcgcctgctgagaccttttccctgaagagtctgggcggttcggcgaggcccccagcatgccttttctccgcagaacggccttggccaggtcccggtgcttctctggaagttaaaggacccgggtcagccgggtcttccccactccgccgcgtctcccgaaggctgggaggccgctctttccgaacggattttgaggggcgagagcaggctgcagctaaccccttccctccggggccgaggcccagcggagctccggaacccgccctggggacgcggccgcccgcccagggagaaacctcccccgaccatcgggccacactcacgcagcttggcttgaatggagggtgcgcgcgtcaccatgtatggcccccgcttttccacggccgcgggggtgcgctcccccagacggagggctctattaccgatctgcccggagggtggccccgcagctcccggcgcgcggtcccgagccccgctgggccggggtcccggggtagacaaccgcaacgcgcgcccgctgggctccgcggtcgccatggccgggccccgccctgccggatggtgcaaccccgcccgtggcgaaagagtgaccggccgagggagaggcgggctcttttaacaagatggcggtgcgcaggcgcaggtagtcccctttcggagctctccggttcggtagtctgaggacttggccgaaatgttccgcccttcttttcggggggaccgggcagttccgttctcggttttggggtaggcggcttgagcctggtgatggttaggcttagttctgtctctagtggaaattaaatactgatactgtcgtggggctgcgcgtgtgcgtcggtcgggtgcccacggtttgagtcctggcgcgccgcactctgtgcttctcgcagtgtctccttgggggtctccccacatgtggggctgccagagagcagacttgggttgaagagtcatatgaggacaagcgttatcagcgaccttttctagcaaaagaaacaggccccagaagttaaagaaccttgtgaaggtgacacatctagaggcagtgcttgcgctgatccatctgacgccaaaccccaccttctttccaacaccaattggtgcctgtgacattggacaggacctgaccctctctaggcctcagtttccacatttaaaaatagagccaatgtcactactcattgtacagtgaggcaaataggcgttgaaaaggagggtgaaagtgcactctgagtctgtgtgtggtaggctatgtgtcagggctcttgacttctctagcccccaagggatgtgcttgtgactggctggaaagaaactccagatccttgtagaa

SEQ ID NO: 62214 - DNA, 1859 bp, Homo sapiens
accgcgcccggctgagttctttttttaatttttaacttcagcataccctgaaacgagtttctgagttcttatgtttaaatacgcatgcatagttgccagtgatgcaggttcaaaaataaaatataatatgcatgcatagaagctaaatttcacggaccaagatcgaagtgcaattactgtaattattctatggtggtggactcaaaacctcccagcacacatataaagggaaggaaaatagacaaaaatcagaagcacgtctcatactccagcaatcaggcttctattacaaaggggaaaaaacacgaagcgttcctatgcttgtaaaacccagtattcctgtgtctgtgacattcagttttcaaaagagtgatatttttatcataagccctatcaaaactctggctatcttccggagatcaggaaacaaccacacacttccatctattttaaacgtggaagaattagaacgtggcacagcagaccctaaaaatgatggaaaaggctgtgaaggtgacacactaatcgctaaccgagaaatgcctgattgaaaagtataatcgtgtgtcccatacggaagtatattgtgtcctcggaccccaagcggcgtgcccggaggctcaatgtcaccttcgccgaggcgctgcaggccggcggcggccactctcggtcaggtggccgcagggtcggcgctggggcagggtcatggcccgggaaccgaaggggagcgctgcgtcccctcctcggcgcccacagcaggtccacatctgacctgtccgcggtggcacagccaggaagttgcgcggggggaggccccgggggcgcgctttcaggtcctccactactcgaggcggcgggcagggcggcccgcggtcaccgggttcagtaaccagggtagggcaagggctaggccggggagagcccgccccggagtggcagcggggacccaggtcaccgcaaggacacgagggcgcgggcagtggcaagcaggggccttacccacggcggggccgggggtccgggcggagtgcaggaggcctcgagggtcggcccgggtggttgcggccacagcgcagcggcggagagcggcgcccagcatgacggcgatggcggcgcgcgggctgaggacagagagaagccggtgtaagctcgcgggttgctccggagcgggcgggggccggacaggctcacagcgggcggagcacgtaggcccgcccactgcgactctggcgcgtgggcgggaggagccaccgcgcggccggcggcggcgggggctacggcggcgcgctgaggacaaactgttagcctcgcgtcccgccttgtctctggtcaggtgacgtgcagctgccatcctgtaagtaggaatggaggcgagggaggagcaaccgaccgtgatcttgttcgagtcaggcccaggagggcacttaatcacctcaaaataggaatgacagcaataacaacaaactataataaaaaatacgtactttgcgcccgggcgctgtggctcatgcctgtaatcccagcacttttgggaggccgaggcgggcggatcacctgcggtcgggagttcaagaccagcctgggcaacatggaggaacccccgtctctactaaaaatacaaaattagccaggcgtggtggcgcaacgcatgcccgcaatcccagctactcgggaggctgaggcaggagaatcgcttgaacccaggaggaggaggttgcggtgagccgagatggtgccattgcactccagcctgggcaacaagagcgaaactccgtctcaaaaaaaccaaacaaaacaaaaacctactttgcttagccccgccttctcattgtggcataaaataaaacagcgaatggggg

SEQ ID NO: 62215 - DNA, 1311 bp, Homo sapiens
cttggaaagtaggatggcgaggccgggcacgttcttaagtacgctgagactagcggccggctcgccaggcgtctgaccctgcgtgggcccaggcgggaggctctgccacacctcgcgtacgctccggtagcgcagccgcgtgacctggtgcaggcccgccaggcggcgcttgaggatctcggcgcacgtgacggttttggtggtggcccggccgcagccgctgaagacgatggcgcgcgtggctggctgcgccatgctggcggtggcgaaggccatcaggttccggatcttgctgccttccttgacccgcatgtgcaccgcgcccggcgccaggtctgcgaaggggccggagcccgggccgcctccctcggccccgcaccccgctggcgcctcttcggagcgcaccttacggaagttctccatgcgccgtcgtcgccgggaccgccggctttgccatggggcggcctcagccccggggctgcatggccgccggtcgcgccttgcaagggccagcaggggtaagggcgccggagcagcgcagacgccggcgggcgggctgggacggcgcgatctcggccccacttctctcgagcgggcgccgctctactcagcgctctcggcgccgggtgctccgcgcctttagctgaggccccgcccctgccgccaggcccctcccctgacccggcccggccgggcccgcccgggccccagcctcactagcctttcctggcgagtctgggtcctcagctacgcgggcgtgggagcgggcgcgctgcggggcgcatgagcaggtgaaggtgaagttccactataatcgccatcagcgctctgagagccaaccctcacaaaccggcagtctaaataaaagctgcgcttgccgtgcaaacactgcttcaaatccggtatccgagcccttcccatttgcaactgaaggccgcccctcgtcccctcccagggagagatttccaagaggcttgctggggccttgcccctcctcccccgccccggggaacacccccaccttttttccgctcccaagtattcttgcctcaaggacagctagtgcgcggtcagcagagtgcgggaggagctggctgcggctccactccgcgcctccccgcgggcgattacgtcgcggcgtggtcctcgcggggcgcggaagacccagacttcagcctcgccacgcctgcccggagctcgaggctcccggacccccgtccacccctgggacgtgaggagtgaggctttgggccaggctgttccccgaggcgcgtggggaagcgggcgtgacctcttctgaaaaggcggtag

SEQ ID NO: 62216 - DNA, 614 bp, Homo sapiens
tgggggcatgacagtgccttggattgctgggcctcagttggagatggggctgccagatgctgttctccctcctcccgctgttctcgccctctgggcatctgcagcagctctcagtccctgctgttcaaaaccagggtttacttccttgtcacttcttgggagcggccctcggtccctgctgttcagaaccgggatttaccctcttaccacttcctgggagtggctgcggcgactggaccttggcaccgcaatgtgtgaatggctgaccccctccccgtctcctggtgggatcaggaaccctcggggtatgctccgaaccgggacttcggtctcggtccagtctccatgggccccacacagcggtgggggctggaggcacagcagccttgggaagaaacaaagactgtccgcagcgcgtagcggggcgtggagaaccgagggctgtgtaaggtcaggccctgagaaaaagcccccgaaaggctggaagttacgttggaacgggctggttgtggaaggagcgagctctccgtccccgggagtatgcaagtttgggctgcacgatcacttggaagggattgggcggagttctgtcatttggagaaagggtcctggga

SEQ ID NO: 62217 - DNA, 566 bp, Homo sapiens
gtgtgaattgctttattgtgtaattactatacatctgggtgaaaagtctcgagtgtcaagtgtcagtccagtagaagaaaggcagggaggagggacgttccaggaatcaggaggaagtcaataataaacagagactaagtgaggggttggagaccggtgttcttcaaggtggaaggacatgcatgggggtattgagagggctggaacaagaggaggctgtagtcaagaagcaagagaggaaactgtgattcagtgggtgaaacagtttttggtgatgacaaacctctgttgaggccaggggagcaggtgggtgactgaaggagagacaaaggtcaccagagttgaggaggaatcacaaaccccgggtattgggtgagtcatcctatgaactcagaagtctactagactggcagcaagattgggcttggagaggaaattgggggcaggtgtccaagcagtagtgtggtagaagcagcttgtatagggtcaggaaaaccaactgttaaattttcaattttgtgggcttgttgttacacattgtcattattaaaatgtaattataaagg

SEQ ID NO: 62218 - DNA, 1193 bp, Homo sapiens
tggcacgtcccagaggctcctggcataggtataggaggttattctccccagtttacagatatggaagctgaggctctggctgctggtgccaggctcccatctctgggtctcttccttccacctacacgccaggctcttgtccctgaggtgcccgtcaaccacctgatccggccggggcccgggaactagcacctcggacagctcctggaagatgccggggcggccgggtcgtccttctcgcgagctcaggaggagcagccttaggagcagagcggaagtctcgcgagagtgactgctgcaggcagtggcggcgcgggcgcgcgcagagacggcctcgggcgcgcgcgcgcgcgcgcgcgctccccgcccccagccccggagcggctcgcggccggctccgcgccgcatcgctcgggtgcagcgcagctcagcgcagcgctgcggcctttcggcagccgaacggccgcggcaggtgagtctgggcatgaaggctgggaggagagctttgaagggaagctgggcgcggggcgagaggtgtgggggtcgctggctgcagctttgttcctcctacacttcacctttggatgcaggaagaaggccgaactgctggagaggtgggagtggaggtgacctttactgtttggggctgggggagagcgctcagggcgcacccaggccccccgagccccccaagcccccccattcccatctgtggctcccgcagagggaactgggcctttgggtgacgtcagaccctggatctggagcctgagctttgggccctccatcccccccgccagccccacctggcgttccctggaaaccggccttctggagatggcgtgcgcagccggggatgggggcgactggaagggggtgcccgtggcttcctttgggcctttccttccaactagcgcctgcaggtggacccgggttgacttccctcacctccctcgggcggccgacctttggatggcggacctcagccgccccagggttgcgaggcgacgggcgcgctggcccaggccaccaggcgggctccatcagggctttgggtggtgagttgggggcgccggatttggctcatttcaacgctggccggaggtcacgaggatggaggtgaggtgtttgtgaaccgatccttgtcctccgcctcggggagctcctggtctgtgggttgggggaaccaagta

SEQ ID NO: 62219 - DNA, 1521 bp, Homo sapiens
cagtgagaggtatctgcatcaagttgcaggaggagaagagagaaaggagagataatcatgttcctgaggtctcagccctggatcaggaaatcattgaagtattaacatatcctgacattaaggaaatgctgatgtttttggactttggcagtctgtccaacctgcaggtcactcagccaacagtggggatgaatttcaaaacgccacgtggaagctgtttgaatctttttgagatactgtaatattttcaataaacctgggacaacagcaaaaaaaaaaaaaaaaaaaaaaaggccccaagcaacaagcagtgtgtgtggggctgataggagtgaggaaaggaggtcggacagttatgccagcccctatcgagagtcccagcaatacaaagaacagggccagggtttgctccaggatttccccagtggactacaactcccggaaggcagagaagtggactacagctcccagaaggctgcgcgacatacagccagcccggtgctctcgtgaggcgtgccagtcagattccgcgggagagcggcagagataccgcgatatttgggagcggccccgagacgcgcctggcgcgggtgagcagtggaagggggctgggaagctgggttctcgcggcggcgcgggaggggaggttcggggagctgtgtccgcgagcgtgggtccacggctgtctgtgtgtgtccttattttcccctgtgtgcccatgaagctctgtttgcgactgtgcgtgggtaggcggccgtccatctgtgcgacctcactttcccggctgtacgggtggggccgcctggagcaggagggacccccgagccctgagtggagggtttgcatctgtacccgtccagcccgactttgtgctgctctgcgattatttgtccagtgtcgtttaatctagtttaaatgatggccgtgtcagctcctcacactgaacgcttacccgggctgcccaaagtacaaagtgtatttaaaaagttggtaaaattaaaaaaggaaagccatgggatgttggaagtagccctaggcctgccaaaaagtgctgagtgctatttaaaaattaggccaaatcttgtcagaaaagaacttcctgctgtccttgaagtatttggaagcaggtgctagatggtgagcaggagaggttgccaagttggggaagtggtggttgtcctggagcaggggtttccacatctctcacagtggctgggaagtagcaattcgcagtcactgcctttctagtagcccacgtgtgtgagtgtgtgtgttagatacatttatccctcagtatccgcaggggattgctgtatactttttttttttgagacaaggtctcattctgtgacccaggctggagtgcagtggcaggaacatggctcactgcagcctcgacctcctgggctcaagggatcctcctgcctcagcctcctgtgtagctggaaccacaggcataaacaaccatacccggctaatttttattttatttcatttttgtagagacagggtctcaccatg

SEQ ID NO: 62220 - DNA, 1154 bp, Homo sapiens
atcccccttggtctttgcgtggctgggccctgctaggctggctgccctctctgctcctctctcgccttttcacattctgtgcaaagccttccctgtctgccccagcccagcccctgtggttttggccccttcttttaaacttatttgacatagaactataggttgccttagacactgctggtgttactggcccctagtttttggtggggtcttgtgaagttgctgggccccaggcctggcttttccctcttgttatcagctgagcacccaaggtgcagtggccgtatctggcatgtccagcagggggcggtgcttactcacagatgaccacgtggtcacatcagctggggctgggctgggaagtgtttcacttttttactttccaccaacttccacccagaaagtcaccccatcaccccacccccagggctgggataagccatgaagctgccagccagggatgacagccaggccagagtgggggagggaggagagtctcgtggcactctgacactgggtgctgcacttttagggcagtgctgcttaggcccagccacccgctgtgtacccagaagcattggtaggagctgcccagctagagccgtgagggtgggaggcctctgccaccaccccctggggagggagggagccatgcagttcccttttcccatagccccagggcaagtgagtttccggactaggggtggataggggcggggagtcctatcccaggaaacagatgggcagcctcagagcggagggaaatggcaaccctaccgcttcctcccatcccacgcagccagcgtttggtgggaggggggttgtgaggaaagggttgcctggagcagggaggtgctccagcccaccccagggccttttagcctgggccccatgggatggcaggccatgtctggaacaggacttggcttcccctctctggttggagttgatgccaaaagtgaggcagccagagggcactgaactgggagggagggctccccgactcagcctcttggagcttgcctttcccatttgaaaatagggctgattcctgctgcccatcccccagactcttgtcaggctccctgagatgttggctggggtgggaggggtcacagatgaaaatggtcctgtgccagtgactcagcacagag

SEQ ID NO: 62221 - DNA, 2341 bp, Homo sapiens
acgaaatgaggggacagatcaaggagcccttctccagccccctaatacactagtgctggacaggggaatgccggcacctactgtgtgccagatatttgcaaacacccttttccaagcttacaccgccaccgctatgaggaagacagaattccacttttgcaaataaggaaactgaagctcagcgaggtcaagcggcaggcgcaaggtcacatcgcagcaagtggcagtgaatgaacgatctaagggagcgactgagggcgcgtgacgggcccgccgggcactggttcgtggagcgtggcggttacgggcggtgcacagcgcccgcagcccgctcctagcgagctggccccacgcgggccctccgcacccgctgcccacaggagcgcaggctcccagaggcggggccgggctcttccccaaccctgcgagtcgccccgcccccgccccgcccccagcccgccccgcccgggaccgcagacggcgcccagcggcggcgcgaacggcagctaggagggttgctccgggcttggtgctcactgcgacttcccgcgcagggcccggtcggactaggacccgcggcctgagagacgctggaggatgcggacgcggaggccgcctggggtagcggcggcgggagtcctggcgctctgcaggtaggagctcgcccgctcggcgggcgcggaaacttgggccgagtttgcgggcggcgcgtggagaaggggcgggtggcgctgccccagggcgcccctaccggccggcccggggactgagggagccgcgcctgggccgaggggctgcggcttctggctgccgccggccccccgcgaacgggctgcggggcaggggtggcgctgctgctccgactttccccggacttcgaggctcccgggacctggtagcgctctgggtctccggcggagaacaggcgcctaatctggcgagaaggaactcaggccgagccctccggcctcccgcaggaccctgtcacgtggattgctgggggatggcgttgaggaggaggtatggggacaagggggcactggagggctgggcctgggggcgccgggcgctgaggcaccgcggggccctggacgcgccctgctgggatgggacggccctgcggttttctcgccacctcttgactcacccctctggcctcagcccaggctggcaggatcgccctgaggcggaggctgcccggaccctgtcgccgggccgcccctgttccgggacctcccgccggtccgcgggcgtcggtgtggggctgggtgcgcgggcctgcctgcgtgcacacgtatgcccggggcccgagcgaggggagagcgcagttctggaatggcgtgtgtgcagatgtgggccatgcacgtacgtgcaggcacgggtttgcatgcgtggcggcggcctgtgtgtcagcctgctggatgcacgtgcgtctcggcgccgccgggaggggcttggggacacccggaagcccgccaggtcgggtgcggcggcagcctctaagcgaaatcggctgtgggccctaggcacccgagttatgttcagggcgggtaggggaaaggggatagagaccgatcccgttcgctttcccctccactggagactttgggctgccccaggttgggttgtagcgtctggagagcccagagcctcaggtagggaaggtgggagatgggagaacactcggcgaggcccgatccagccctccgggagaatccagatgctggccacaattgggcaggaatcgcgctcttcttcctggtctttgccatcggccatcccgaggcccctagaaggtgaaagtgggaacagagagctgtttcctttcccactgcgtaaggcaggggcggtgctgcggtggtgggctcttctccgggaccctggcctgggtgctggctgagtgacgttggagcttggcagagaggatcaacagagctgcctctcaaggatgatctgagcctgctccctgggcacctgccctttccgagagcttgcttgcctcagtatgggtcagggaaggaggcacctacattttggcaactgtcttgagtggaggagtcgtctcccttgagagagtgtatcctgggctttccacctcctactggcaggagatcaggtcattcccacacccctaagagttctctgttggctccctgaagccgccacccctcccacaaagactcctgagggtcccaggtggtttcctgtctattgactgggtcccagataggggcctcaagaagtctccagagcaaagggtattccatgggctgagacccaggagagagggactcctggggtgggggtggggacccagcagaccccaagaagcatgtggggg

SEQ ID NO: 62222 - DNA, 570 bp, Homo sapiens
ttttagtagagacagcgtttcaccatgttggtcaggttggtcttgaactcctgacctcaaatgatccgcacacctcggcttcccaaagtgctgggattacaggtgtgagccacagcacctagccacctccctggactttcacacacgcccctgacgctgtcttggccccaccctgccatgtgcctaggaatcgccatctgcagcttgggggctgggggtggatccaggctcctcatgctctgggaccttcctgctggtgctgcagcaccatctgctgggctgccctgactcctgcggagggggaggagtggggcgagaggggtgtggcttgtacagactgatgtccccagttacctctcctaggggactgctctccagagccaagtccagtatctcagcattggctttgggcctagggacctgggctggaggcccgactctgccatttttgacaagatcagcaggtcagaggagtgtcacaagaaatctgtgaatttgtagacaatactcagattccatgttttggctgcagtgggcatcactgtggcatcttggaataggaccctgtgg

SEQ ID NO: 62223 - DNA, 1052 bp, Homo sapiens
agtggaaaacgtgtcaatgacctgaaacaccctggctcccgggatcctacccccttaagttaaacaaatgaaataacttccactgtctttcctaatgtcttaattcggtcctcagttaaactggcggttggcgccagttttttccagggaaggattctgggagacggaggaggagacgccagcatttcgccccctgcacctccagcgggctgcggtccgctcccggcctcactcgagcaggccccgccctcccagaggcagttagtccaagtcacgtgatcgtcgactcagctgaccctgcgggaccggaaaaagaaattcccgggccctggcttcttggcgcgatggtgaggcactaggggcgaagcgaggcttgggctgctggagcgggaatgagggggcgccaagtggctccggaaactgggggaggttgtactggcctctccgcaaacacagtgtgtgcgggcgtgagggctgtgagtctggtagggaaaagtccaccactctcccgctcccgagacgggggcgggggtacggggcgggtaagacagagcaggccggccggcttagagtcccggtgcttccctggcggaaggaagggcccctgcctcccggggcaggaactagggcttgtctggagctgggagtcctttcaggtcttccccatccccaagaggacctcccaaggatacccccttccccagccctgccgtggggcttgtacaagaaggtgcttagaatcaggctcactcttccacactgttaggaagcccctccgctctttccagagccagaaagtagtagttttggggttgagacttatccatccatccatccaatccatccatccgtacgttctaagcgcctggtctataccatgaagtgtgctaggcactgggaggacttgagctgccaagggaaggggaaatcggaggcttgaattggagtcatagctaaggctccaggggcagagacctaactgcgccttgtgtgtagtgctaagggggcttcctaaggatgccatcaaacttaaaggcggatggatggcagga

SEQ ID NO: 62224 - DNA, 1795 bp, Homo sapiens
gcactaacccgcagctatactccagccacacaggacttctttgagttctttcagtgaccaatctctttctcgcctcagggcctttgtactggcggttccttccgccggacacgtcgggtttcctcgtttttgcggactggcgctttctgatttcagagactctccgcaacagaaccatctcaagtgggtctacctcctcgcctttttttgttgttgttgttgcttggctgcgcttctgacagggcaggccgtgatgatgtttgtttatgagttaggtctgactgttcgttggtgcttaagatccccaccgggtccctagggcctgtgcgtaccgcgcacctgtgcacgtcctgcgcgcagctgcaggcgactccgctctggctcgtcgctgctgtttcctgctgggggtgccgaccctgtcccacgctagctgggtgacttcccccaaccgcagagacagcggcgacccggggcctcagacctgcccccgcatctcgccggcgccaggcagtgggaagtcaggttcttccgccacctcccagccaggtaactgccccgaagcctgccccaaagcctggaaccccccaagctcggggaccccaccccgaagaatcgcgaccgcttccctgagggactacacctcccagcggctcccagcgcgctcccgggcaccgcccgttctggcgttaaccctttagtggctgcagtggcgacgagcggaacggagtgcgggttcccggggagggggcgtgcaggatcgggttgtggggggtgcgctgtagggctaaggagaagatgagctttggggggccctgaggaggaggggagtcaggattaaccgaggacagggtcgcagcgggggcatggggaggacgggcccgagagcgccgctcctccccaaaactaggatttggagcctcacgttctcccgcaaaacgagccctgtgggtgccaggccaggggcggctcccaggtgtggagggggcaaggtacgggcgtctgccgtcgctaagtgcccccttccacttaaggcacaccttcgcctccgattccgaaccgcccggggacagaggcaagtggcaaagcagggagggcggaggtgaggagtcgataccccccaccccagggaccaggcgctgccgcgggccctttccctcccccaggcccggggcaggagctcggggagcccttcctggtgcccgccgtcctcctgcggagccatggggagcggctccagcgcatggcggcagcccgcccgcctcgtcctggcccctgccctgacccgggggcggccgcggggatgtccggtccgtggggcaggcccggttctcgctgcggccaagcggccgattcggccgctcccgccgctcccccgcgccaggccgagcttcgctctttccctcggtggtgagcggccagatccaggcgggtcctaagtgtggggggaggggggcgcagggaggggcggccacgcgatcctaagaccctttcagatggtgggagagcctggagaaagagacagcgtgtgcggagggggtgctccctcagatggggggtcaggaagtctccctcaagtgtctgggacagagggacagcaggggccaaggcggagatgagatccgtgagtgaggggagccgggaagaagtaaggctgcagccgcggccccgcaaggattgggactttcgtctaaacgcggtggaagcccatggaaggaagcggttagcagcaaggcagagtcctgctccctctgcagccccagctcccagcgccctgggctttccaggcacctgtccg

SEQ ID NO: 62225 - DNA, 2021 bp, Homo sapiens
agaagtcctatcctgatatccttccttggataaagtgtcggcaggggcttgaaactctccaagcatctgcagtgtcacaaggtactcagctttgagtcacaagaaaggagcaacaaggtgagaagcaagatgagggaaacaggcagaggcgtcaaaggttcgtgatccctagggtgcccttcctaagggatgtccagaggcggccacgtgggaatgaaaaccatcccctgaagacccagggaccagagagctgttcccagcagagggtgctgctcccagcagagggtgctgctcgatcccacgtagttgtctacggcagagggcagacaacgaaggtgtggctgggagctgggttgggacttcccctaggcctgtggccccgcccacccgctgggcgttacctacgtgggtccgaagctgtcgccgacctgcgcggggcggaagtcccgctggactgcctcctggtagggaagtctctccggcgtcaggaagctggagagcacagccacagggcagctggccccaaaaagcctgcgtgggacgggccggtgggcacatgctggaggccgccccgtttccgcctgggggccagctggccggtggggccgcactttccctggatcctccgccaagagggctgcctggccgctccgcggcacagtccattccctaccccctcctccccggcccctgccctgcccgcggcgggcactttgtcccgcggcccgggtggctgcagcttaggtttctccccggaaggaaagcttgaggcgcacggttgcggtcggccggctgcgggggaccaggggccacacctgccgcggaggttacagtcggtaaagtagagcggcgacacgaacttctccacccgctccagcgtggtgcgccagtgcttcaaggccggcgcagccgccatcgccgggctctcgctcctctttccggaaggcccctggcgctaccgttccgctccacggcaggaaaccaaaggttccggcgtccagagggcgcctcccagtcccgggcagcttttcttggaacaccggcggctctcggaagcccagctgctgtctgaactttgagccgagttggaagctagaaactgtttttgaggctctcctatgttgtccgaaatagtgggccgcagggaaaatctcaaaataaaatgggaaatttgacgattagaactctcgaaagtctcaagacagagacttaggccattcggcaagacaggcgggagcctcagctgctgcagacccagcctcagaagcagcaaccgggagacctctggctctagctgtcggtgaacacggaaagtggtgtttgcttaacgtggagccagactacccggaataggtgttttcataccggacggagatcagggtgttagtgagcagggtggtagagctttacgcccaagttactacgacttactcgattacacgctttactgaatgtatattgctaactcttgcacatcaccagaaactctggagtttgaggtggcagaacagtcatggcattgacgatcccaatggaaaaatgtatttcaccatacaggactgtagagtcccgggaagccataataccagaaacagacctccagtttcattctcatccctagtactccactgacagctttattttttttctcctggggttgccaagagtctttgtctataaaatcattaggaacaaaaaaaaatacacaagattagccctgatattttaatggaaatactgaccaagtttacaacatttcaaatgcagatcacacggaaaggtgactaagtacagaataacaaatgtgatttaaaacaaagataacctgctgctgcatataatacaggttgggtttagagcttggagctcagatgtcagacagcaggaggaataaaaatgctacttgtgaaaacccaggctgtaggtaaaacttactcttttgttggttgcactggtgggttgggactttctcctgaactggccttgaaatcctatcctgacctgcaggcaagtgctctgga

SEQ ID NO: 62226 - DNA, 6115 bp, Homo sapiens
tctgatgactccctgcccctcccctaccatcaccaccgcggatctagggttccagcaccagccacgcacgctcctacaagaggaccttgggcacttcgccccaatagttacaaccaagaggggagtgggggtgaccatgctcccactctcctggctgcacggtgccagacacgctgcatggagcaaagcggagaaagcagctccggcacagggcccttgtgcccccaggcagaaggcatgacccagccacaagagtaagtcctgacacctccacagctcccagtcggcgggtgcccctccctccccacggagacatagggcggggcagatctaggcgccgagactcccagccagacccgacagcgggctttccctagcacctcctcattgccaaggaggcggaaacccggggcctgggcggggtgcagggggggacggccaaggggagtggcatcacggatcagtacggcccctccggccaaccggatcccaagaaggcggaggaactcagacttcacgccccctccctgccgcgccctgaatctacacgcgggagacccccccctacccctccccgaccccagcaggccagagcgcggccgccagcccgaggccccgcccaccccaggaggaggggagggggtggtcggccgcaaactgcactcagcgcgaagccggccccgcccctttctccacaatcgcacgcgcgcgccggccccgcctctgagcggcggcgcgagagcccgcccccctccgcgcgcaccgggactacgctctcctccccctcccgcgcggagagctaccccgctccgccccccacccccctcacacaaccacacacctcccgcccgtctgctctacgggaagccgaggaggtcagccccccccccccaaaatacacaccctcgagtccggcgttacccgccaccaggctcccgcccggcccccggcccagcgtgctctcaccgcaaagctgcttcggccgctcgtcactgcgtgtccctctcagcgtgagccgcgagctcagcagggaggccccgagaacggcgcggggcacaggcccgccgaagcggactgccagctacctctccactaacgaagcggtcacaggctccggtgcccagactgggaaggagggagggagggagggagggaaactccgaggggggaaggggaggggggaagatggagaaaccgtctccgccgcctctaccgccgcggccgcttctctgttacccgggaaatcccgcccactcccccgaccccgccccgcagagggaagactcagcttcgttccaatacaggacgcaatacccgcccgtcaaagactcagccaaccaccgaggcctgtcttatgattttcccgccccttccccctcgactggtaggggagggggagccgctctccttctccacgcccctattggcggggagcttccctaactcaaccccgcctattggagacggactgctgaagcccacccccgagccccaacactattggaggaagcagggaagctcttcctgtctcattggaggacaccacataacccgccctgcagcgtctcagccacaggcctaacaagttggctcccgcctccgctggtcatcgcattggaaggctacccctggctctcccaccgccccagtaaggtaagtaaccgatgtggggtaaaatgtctgtaagtgaaacaggctccgcctaccgcactgccgggccaggccccgccccaagagtcggattggatatcttggcgctggtaggaccctccattggccagggcgcccgtctaggaaggagctaattccaccctgcgcgaggaggctgaaccttagcagtccttttgtggaatgtttacactagagactgaagctcggagttccagggcccgagataggagggggagcggagctcatcagcggagactccacatcctaggatttgaaggaaaggcagcccaccatggaggactccctcacaaaaaaaatgagagaatgagaactcatccttccgtccagttatctttacagtttacattctacacactgcgtccttgtaaacacaaatatccggagcagctggcaactcctttcagccaagtagagtacagaactaaggtctggagacctaggcggagaagtaaactccctagagctgaatatgcagtcctaagagggcggagataaccaaaagagaggcgggctctaacagccaccgccctggcaagcctccggaaggcggagcgtgaggcacaaggtactcacgatctcccgggtggatctggaggcatcctcagaactgagaaaggagaggaaaacaccaaaacaggccacggcataaattaacattggggacatgccacactcagagaatggataaaatttccgtagttggggacataagataacggctgttcaccttctccttggccgggagtgttaatagcagttcctgtgccctctctgtgtaggtaacagtgcctcgaacacacagtgagacaaagtgctttcaattcctagtttgcttttatttattcaccaaatagggcgtgggcctgacgctgatcttactttggggggcgctctctcagcgccaggagaggtgacgggattacgttgttaccgctctcccgaataagtagaaccctcctcccagagagctaagaccccaagggacacgcccagggaacccacgcctaggtccaacactgtcctccctctgcaatccagcggaaacggccaggaacgagctctggcagcaggtgggcctgactccagcgatggcttcgagccgcgaaaccacagcagcgaattgtgaactccaagggtagccgacaggtgggagcagcctcgccagtagccaagccctgccccaggacagagctctaaaaataagtcagaccaacgaagcgaccccagggccaaactgctcggaggttaggaggaagcggcactccagcagaactgacccacggctacttttaactttgcgccgccttccaccactagactgagtaccacagggcattcccaccatggtatcaagaactactcagaacccaagccagcattaggccgcccacgacttcccgtgaacacagggtaccacctgcgctaagatctcgcctaagggccccaggccagggcactaggttgtcagagtctcagatacagccaactaaggacagccgctgccatgcctaggaaagaacagacacttgcagcgtctgcagagttctcgagcttaagctcagggaagtcaaggggcacggaaatagccaagcgacagggttagaactttagtacttggccccggccccgaaaggcagatctcaaacccagcagaacctccggagtttcgctcccgaaatccactccgcactgtaatcccctggcttcaccccgaaggctactaggtctcgagcctcggtggaacctttgtgtggcttctcggctctccccgcccccctcgccaagggcgccgagcctaggacttccgggcgggagggcagttcgaaggagctaggcgggcctcacacatgtgcggagcgcgctcaagagcggagggaggcggggagcaagggtggacttcccctcccagctctctccgccggaggaggccgggctacccgccccaccaatcagaggcgggggcgggaccttgcgcctcacgtcatccgcaagaaccgtccctcctccctccgcgaaaaaaaaatcctagcaacttaaactccagcccggcctcccgataggcggagctcgggagaatgtcatccaatccacatccaagaaggagaaaaaaagggagtctcgcctagccagtggaagacaagagaaggcggggcctccgggagagccggaggtgggtgggagagaggaaaggggtccgcccctcagctcccctgcaggcgggttgcacaagccgccggcggagtagatagtaaacagtctgggccgaggagtgcaggcaagggccgcccggcgctcggtggactgggcccctgcgccgcctctcccggcgtcgccccgcccggccgggacggttcccgccggcgccccgcctacccgcccgcggccgccatcccggctgacaggcgcgccccccgcgcccctccccgcccgctgatgcatttccttttcccgattccgagcgtggagactgttttcccagtttccgaccttcactgcccctttcaggccaccccctcgtgggcgcgcacacgcccgcgcccccgcccccgccccatccgcgccgagcggtccgcagcagcacctcgcgggaagggggagcccggcggcggcacggtcgggggaggggaagagagcagcagtcgccgccgccgccttggggtgggcggggaagcaggcagctccatgtttgcaaggggatcagccggggccgcggacgaagccgccgagtttctgggggttttccgcaccaccgatgcgagctccttgctgggtcgcggcctgacgggttccggcaccgaatgctgactcgaccgccacggccagggagtttggagacccggcagctcgcagggctagcggcgaggcgcaggggctctttccggtggcctctcccgcccccggccgcccctcccgcaagtccggtgttgcccccgcccccagagtccataacaaccgcgggcccacagtgcccgcgcctctccggagcgcgcccaccgccccctccaagtttgcgggcaaaaacaaaaccctcggggcggctgccgcccttgtccagcgtgggtagccagggaagccgcgggccccggctcgctcgctaactccagctctcgagcaactccgagcgccgcgagctcagtgggccccgccgaccatgctcgagccgccgccccctgccgagcccgcacgccgcagctccggcccggttctagtcggtgtgcggaatcccccttttctttccagtatttttctttttaaaaaaacggcacaacaggagtcgggggtctcctgcccgccccttctccagtccgccgccaaaacctaccgaaaccgactgctcggtgagataaactaggctacacggccggcgcagggacgaccccaggccaggcccacccctctcccacggctccggccaggctgggaaacacacacactggcgagcgggcggcgccaagagctctccttcctggcctgtccctcgcctacctcggccgcggaactccgagcctcccctcagctcggtcccagggcccgcagggcccacaccacgtcgggccggccagaccgagcggccggcggactagccccccaaacgcctgagattggggggaccaaattaaaagcagctgtttaacataccttccgagccaggcgaggagtcctgaatgggggggaacgccccccacgggctattggctccccggcgctcacgtcagtcaccctgggcccgcctccgcccttcgccccgcctcttccccttcattgaacgccccctccttccaaaaaatataaattaattaattaaactaaacgcgagtgggagacgcatccgtggtagaggcccatatagctccctcgccgccgactcgagtttcttgaggtcctcggactggggggaggccgcctgggactcggagatccgctgggtggacgcggaggacgagccagcggagctacccggccccaacttccttcacacacacaacccatttggaactaggtaggagagaagggtaggagcaccctagtcactggctggagtgggcagactcctgtggctgtgtgacctaaccgtgttcggtccgctctgttaggcgactaaaaatgagtgatgcaaacaggaagccctgcgtccgcgggcaacaggcacttgcctgagcacctactgtgggtgaggcagacattcatacgtacctgctgctgggtgcaattacagactggatgacatgcttactctacccctccaagggctccagattcagccgaggagattctacgtaaggaactaaggcaaggcaggaatgtgtatgaaaataggaatgtgtatgtaaataggagctcagagaagagagattccttttcgctgaaggagaattgggaaaggtttcatgaaggaggtggcattcaagttgggtcttaaaga

SEQ ID NO: 62227 - DNA, 903 bp, Homo sapiens
attaaaataaaattaagtggatttgggtaagggccctcctaggagaaatcacactggtaggtcaggttctgattcctggaggcccgttttatgtgaaaagtctcatagaccagcctgggcaacacagtgagactgtctctacaaaaaataaaaacaaatttagttgggcatggtggcatgtccctgtggtcccagctactcaagaggctgaggcaggaaggtcacctgagcctgggaggttgagactgctgttagctgtaatcacaccgctgcacttgagcctgggagacagagcaagaccctgtctcaaacaacaacaacaacaaattcttgtagagtttgtgagttagggattattatccttagttatagatgagcaaactgaggctaacagcagtagagtgacttgctcaagtcaaatagcttaagggaagtctgggtccaaagtctaagctttgcctccactcccacacgctgtctttgtgcactccggccagtgacccaggttggggcctggagaaaaacagcctgactcccctgttgctccacactcctcacctccctaacttaaagatcagtttatcctcagacaattctaaatgatttctggccgtttccagaaaattatccagaaaagcaacatttgtctgatgcacatacatacatacatacacagaagacctaaactcgcaacacataaactcaaatctatcacacctcctgacaccctcaatctcacaggtgtctcacatacaccctctctctttcacaaaaaggactcattcaaagttctttagggcacttatggtaggtggtgactgagagacatttagggcctgcacttcagtgactctgccaaggatatcagtgccagcaccctatccacacaagctctgagggcta

SEQ ID NO: 62228 - DNA, 546 bp, Homo sapiens
gagacagtgcgagactctgtctcaaaaaaaaaaaaagataacttttcatttttcataaataaaccatgtcctaataagagaaaggcatgcaggtttcacacacttccttcaaagtacatcttgccttcctttttattaagctcagttcctccaaggtccttaatgttctgtagctcccaagagctgttgccttgagctgacctctgtccccctgctggtcaggatgttattcttggctttaagcacaggaacaattcctcctggtttggcctgaccaggccttgcatgtagagtccagtgtactataaacagtgatgtgatatttacagatacaaatacacatgcgtagcacctgctctgttcagcctcagattcaccctcctgcacacccatccctctggtggaagagatgaacctctaaaaggagtcagaaagaatggcctcatcttcaacaaccttcctttagacagttaatcagatttctccctctgcttacacataggtttaacatgaccactgagtacaaagtaatttgtagctctgctg

SEQ ID NO: 62229 - DNA, 2674 bp, Homo sapiens
ttcattaccactgcttgtacaaagcagaattctttttaaatttttttcccatacagatttcatcaccaggtgtcaaaagacaaaaccgtggcctgaggccaaatagaaaaatgtcatctccacaaataaggagaaaagacaaggactttaaaaaatcaggtcaacaagcccattagccaataatagtttgtaaaactggactgtcttcacactagaggctgtgctagcaaatgtggtccttggaaacaagagctgtagagcttgaaatgggttgccagcatggtttgcctttttcttttttcatgtttatttttattttttttatttataacatggaatcagactatgactataatcgagcatagctatggcggggtatgggcagtgccaaggaagagacagcgaaaagcccgtagggttcccagtctaagctagcagaccttcccatcttcctcaggagtggtccctgtctccgcagctggaatgtgcgggagggaaagttacaagggcccccaaaatgagacagcaaaccacttccttctgaaaactaaaggtcataggcttttaaggaacaatagagctcaatgtaagcttcagaaagatggagacagtcagatgagacgagggtagggaagcgcgggtgaggagatgcgccccgtctgggatagctgaataggggggtcaaggccagggactttaggaacacgagaagggctggatcttccataacctgcccaagtgggcctgagaaacctaagaggctcctctgaaaatctagggcatctatgcatccaatactctcagccctctcctcgggaagggagataatccccacaggaagcaccccccaaactggggcttttcctgcccttcaaaagccacaaaccctcacggaaaacatttacaagggagtggaagggccgggggcaagcagcggttctgcaaatctcgggaagaaggcccctggatccaaggaactttgcccctggaatagggggtggggtgcggagggcaccgtctgaggctggtaagcctcggcgaaagaagcggcgggaacgggagtagggtcccgtgggtcccccgacgagggggtggcggcctggggcgcggtcgccggtgagggaggcccgcgagccgggcacgggagcggggggctgcggccccgtggctgcaaagagccggcactcgggaggcagaggccggcgtaggcctcgggggcccggacacacccaacgcggcggcctcgggcccgcttacctgctcctcctccggggtcagctccggcgccatgtcgggccggggcgcggtcgcgggctccatccccccgccaccgccgccgggcggacaaaactcgctcgcgagcgcgggagcccggcgcgctcggcctccgcttccgcgtccccgcgcctcagcagcccggggccggctcgcgcatagtgtggccggcagggcccggcgcctgcagcggccgcaaacgccgcttctgcttccttaagaaaaatctctccgaactgccgctctcttccgggaggaaatccttttttatattattcgctccgttcctcacactcccccttatctcctggggaagaaaaagtgcaggcgaagagctaacagccactcgggatttaaaaggaaataggaaatcaggaacttttagagccgggagcgaagggtcggcggaaatttcccgaaggccgccgaccccctcggcgccccgcttcctcggccgcgctcccgctcctccacagcgccacagagctcggggccgcccagccgggccgtcctcgcggacgctggccctgcgacctgcgcggctgcctcagccaggctcctcgcgggcggccgcagcgaaagggagggagtggagagggagcgagggaaacgcgcccccctcctgactcacggccaacgctgcggccgccccgcggccgcccgagccccccgcggctccattgagaaactgagcgtctcattcacaagctggcggcgaggagggcccggcggagcgaggacgcagtccgggagggggagacagagaggagcccgggcgggggaggggaccgggagggggaggggacccgggcggggaggggaccctagctggacggaaggcaactcgactgcgggagggagaaaaaggaagaaaagagtatttcgtgaggctcagatcctcggaggaggaggagaatacgttcgtttgcaaattatctgctgactggcacctctcctggggttaacttgccgctgccacctacgcgtgagaaacccacaatcctcaactatttgtcgcttgcagcctgaaagaccctggaaaggttgcctgccaggccaggatgcttaggtggaaggaatcgcacctgcctccctctctctccctccttactggctgcaccctgtaattcatctccagtgtcgctaattttaatcccccatagaaacgacatcagactccgaacatcattcaggaatgacgcggcctttgcagacctttgattttcactagggcaagtgcagcaaagggttcaggattaggggtacagtcttggagtcatttggggaggaatggggcatagagaaggcaaggctgggtctggtacgttgttgcattattccaagccaaagataaatattccaaagggacccaaagtccacaactagttccaaggctgaa

SEQ ID NO: 62230 - DNA, 1859 bp, Homo sapiens
cacaacgcccggctaattttttttgtatttttagtacagatggggtttcaccatgttggtcaggctggtctcaaactcctgacctcaggtgatccgcccacctcggcctcccaaagtgctgggattacaggcgtgagccactgcgccccgccgggctcctgctgtttcaacccattccttggatggtgctgcctccaagtgttcggaccttagccccaggtggtcttagcaccagtaacccccgctccaactccctaaagtccgacccgccccaggccccgcccacgctccaccctccctccctgtctagccccctcccccatccccttccccctccttcgcgtctccccatccggcgcccccgcctcgcgtcccctgggtccgcatcctggcagcctccgcgtttccctacccctgctaccgggctccagccccggggacgctatctgcttcactcggccgtgcgcgccgccaccgccccgcactgcctttttctaggcatggggtcatctaggccatgcatgattcgcccctgccccacagaagtccctgaggggtcctggccggacagcacggaatagaagaacggaaactctcccaaaaggagtcccaggcctggctctatccctccagatgacgtcccaggaggccagagtgcagggccggccagagggagtcacagtccggcaccgagaggcaactcggcagctggcggggcccgggctcgaacccagggactcacccaaaccgaggtgaccgtcgcacgcgccgccgccaccggggccgacgaatcacctgccctgggaagctaggtccgccctccccccgcccccagctgctgcctcaccgctgggcccacaggcctcgcgccctgagtttccggctcctccctcctttgcgaacgctgggagttccgttgcctacaggccgttatttccgccttcaacggctggggcatttcccatcggctagggagggggtcttcttgcatttgctttgcactgtccgggactcttcctgctagatgacttgaccaggccgaggcctccctcctgaacacaagctcttcggggctcctttcgccaatgggaggaggctgatcttgtggccgggcattcaacgccctgggccctgccgcctcccgcagatcttcccgggccttagggcttcacctggagtccccttcccctcttgggcccgtgctcttaaacgggcagtgccaattgcctggattactccaactaacccctcacacccaagtttcagacacagaccttcgctcccccacttgcccttaacaaaagcagatacatacctcgattactgcctgtttgctgcttttgcgagcttctttcccactcggctgcgggctgagcaatggtagggacctggcttgattcctatttaagtagccagagtccagcacaagggatggcgctcagtagaccctgcgtgaaggaatgattaaattggtgcaaaagactagggtaagcggcagagatttaggagattaagtcctgccagggtgtagcctctgcagggcgggaaggctgagattacaattttaaaactgaatatttattgaatgcttacattcagccaatccctgcttcacacccatcatctcatttaatttttttccttttttttcttttttaagccagtagatattaactcttaatcatgacatgaggaagtagacacactgaagctcagagaggttaagtaatttggccaaagtaacacagctttcaaggaaaatgtttgaatttgctgaaagtttgatgtatagggaagttgactaccgatgtatgacagaagcaaagtatccacctttggcacattttgcgtccacggaa

SEQ ID NO: 62231 - DNA, 2220 bp, Homo sapiens
ccagaccagcctggccaacatggtgaaaccctgactctactaaaaccacaaaaattagccgggcgcggtggcgggcgcctatactcctagctactcgggaggctgaggcaggaaaattgcttgaacccgggaggcggaggttgcagtgagccgagatcgcgccactgcactccagcctgggtgacagagcaagactccgtctctagagaaaaaaagaaaaccagacagattaaaaagttgcacttacaaagcagttggggcatttattgacatttaaacaagggaggagatcctgaacactagtctcgctcagtttataaaaacttgaggccaaactctccatcatctgtacacagcttaaccacggccaggagcaagaattcgagttaaacgaattgaaccagtccaaccacaagacgataaagggaaacagggcgtggggatttccagtttttccttttacattacaaagtttccaacacaagaagccaacaataccccagtgctgcaccaagttacttcccactgtttcccaaggcacagtcaattaataatcagtagtccaagttctaagaacattccctggaaaacaaggacgcacctcccgtggctctatgcatggcctgccactgatgaatcaaattcttaagaacctacgaccgtctgatacccttgaggagagcaccctcatagaatctccagcatcaggcctcagttttcccatctgtaaaagacagccatgcaaagtgggagatccgctaggcttccagatcgaagtcatcgcgctcctcattgtactctagcacgtgccgcttgatcttggacgagtccacccaagtgacaaagtcctccatgctgcgcgtgacaaggaaggcggggtcggtaaccacgtcagggcccacgcgtacgtgcccttgctccacaaaggccacggcagcctgaaggtgctgcgccatgcgcagcttgaggagcacggtggggaggcggcggcggcagaaggacgaggccgtgacgaagtcgcagagctccagcgaaccgcgcgtgggcaccaagccgagagcatacagcttgtccagcagcgcggccgaagcgcgcacgcggaactggtcgcgttcgggcaggtcgcgcaggcgccgcgccagctcacgcacggcacggctcagctggttgtagcgcgtgtagtcctcccgccgctgcagccggtaacgccgcagcacgcgcagctcgtgcaggttgtggtcggtgacctcccagttcaggaagtccacctgcttcagcagcttctgctcgtggaacttaagcttccgcaccatgatggcggcagccgcagccgcaggacccgaagctgagagcgcgttctggcatccgcgcgatttccgccgcggcgccccaagacctggacggcctgggaccctgggccaatgaaagaaagacttaaagtcacgccctcacttcccattggccagggtgggaccacgcctctgcactgggatctcgcgtttcttcttttcttcgcgtttgcgagggagggggtagaagcaccggaggtgggtggttgggagcgggtccctaggcggttccgcgcggtttttagtagccaagactgtatccctttctgcggcaatcatttcctcctagacttctgtcctttggggactttcagagtctcccccgcaagagctgaagaggccatttctggggaagaggggtgactgcggcttgttgattgggtttactgtgctaacttgcactgggctcctgccatgccttgggggagcttgccggagccggctctcctggggctgacctggtagtccccgccgcccgccagcgtcaggtccttcacctggcatgcagagcgatctctcattgtcaagttgggataggtggcaccgaacccatgaaatactgattggctgcttcctaggcccacagaaaagggatctataagggagtcgcctggaaatctgtattattaactaaagtgtcagatgattcataaaacccagcaagtttgagaaacttggactataactacaagtccaaaccctttagtctgtgctcaaatgaattatcctgacatgaatttctggccaccaagcattgagttaacaaatttaatgctgtttccgctagttgcatctgtaagttacatctgagtatagcgctgcagacctaacccctttttgcccgggcatttgacgccacctagcttctcac

SEQ ID NO: 62232 - DNA, 2282 bp, Homo sapiens
taaggataatgtcttatttgtctttgtagctcaggggcctggtgcagagtaggtactcagttaatgtttcttgagtgcatgacttggctgaatgaatgactgagacagaatggattgattaaagacaagagagggtggactgtaagccccccaggatagaaaccccgactgccttgtggtgtactactccccagtgcccagcacagtgcctagcagaatcaatgcccaaagtgttcccgatatgctgaccgagggtcagatcccacttgcctcttctcgaagattctctacctgaccacttctctccttgctgccgctggctagcacagaacatccagtccccgctgctgtactaagcaacacggaaccgggtggcacctagacttgttccctgtcgctgcagatgtagagtagtgtctttccctccttccaagctagtcgcccagggcagggtcgccctgtctggctagggtgctgcacccgcagctctcggtatcttaggtcagacgcctggaacgcgcaggccgtttctgttcctccggaaaacaatctctgagctgcgccacgacccgtccctgcggagcaggagtggggaatgggaaggtgggaaggcgagtccgcgactctgctccccaaccccagctggcgcggcggctttccacgcacccccctccccccaccccgatctcccgatcctggctctggcgcggtgctccttgcagccccacgctttgcaaactttcggagttttactccatttgcgtcacggaaaaggcaggaggatgacggagtccaggaagcgaggcagcggcagctggcaagctcccccgccgggcgctccaaccacgggggcgtgaggtgtctcccggcgagggcggacaggcggagggagaggaggggaggtggcggtcccagggaccagccccggaggctctcgggccccctcgttcccgggtcgtttcctccctctcgcctcccggactgagcgccagcgagcgagggcgctggccagctgggaagccgcgcggaggagtaggcgggggctcggctgcagcgccccgggcccgcgggagggcggagctggccgtccctgccccgccgggacgcacggaagtgcagcggagtttgcccgattctccagcctgcttccccctccctcctccctctccccacccctcacctcccctttggcgatcccctccttcctcaggacgccacctcccggaatcgcctttttgttttggagctgccttctcgctggcggagcggagggtctgcgagcgccggggaaggcaggctgggggcgcagcccgccccccactggccgggccccgcagggcggagaggaggacggacggacagacggctggccgcgccatctgctcgccggagctcactctccaaactccaaactgttgagtgtgtgcgtgcacgcgagggtggtgatcgggggtcgtaagtcccgggtgaggaaccggtttctgctggggttacctttggacggggttcctgggattcagagcagggtcagcgtcaggctcagaaactgctgaggaattaggcaaacaaaagagaccactcagcgagtggctagaagtcgcccgacagcctcgtcgcgccccctccttcctccggggttggggctggccacttctggggcggggagagggcgcccgagccggcgggggctccggctgcgcagccggggtcgaagagttggcggcctgttgtgtaagcctcagtccttgttttcccggcctggctcgttgtgaagccggacacatccacccttggactcgattcaggcggctgctgcttttctccttgcccctcttggattttccggatttttgaaaacccagtggcccaggagcaagaggaggaaggaggaaggggcagatctgcagaggaatgtgagagcctcccaaagcgagagccgccaaaagaatctgggagccagagggacagccgagccctgcccgggtttctggaatggtggtttcagagtgagtctcttctattttagaacgttgttccagtggaaagtgtcgaatttttcccctcgcagggcagatttctccaggtcacttgacttttcttctgggagtaggagttaggagagattcccctctaaccccccagaggctgctaagggaggaggagactgtggacatgagccctccctgctcacaagcatatgcccggagacctgatagggcagtttctgggccatggacattgctttgaagagggggagactggacagcatctgtgggtgctga

SEQ ID NO: 62233 - DNA, 764 bp, Homo sapiens
agagtgggggcctgtcttgtgctccttgcaagttaacctccccacctttgcagctttggaagctactctcaccactgtgtattctctttatgagcgtcttgtctgtgtgcaggaagatccctgtccccattttgcagatgaaggagctagtgtccacagaagagtggttgcacagcctgtggcccggctgggactgtcccttcctcctgccacctccccaaggacacgtccatgttggccacttcccaagcctagccatgttttcagttctcatgaccccctctgtgggggagggacaggatgggcctctgcctgttactgctggggctgtccatgaactgccggggaaatgactcatcctgggtcacacaggggcactctggctgggccaggggtgcagaatcaggggtccagggcactgtccacatggcctatccaactcctgcttcccaagcctggcttctcttcttgcctgaggagagagccagtggctgccccagcaggtgcctgagtcctgggcacagctgggagggcagatgtcaggagagaggtgtgatcctccctggggctgcttggtaactcgtctgcagggcgtggagctggctccctggcccttgggccctgaggttagacctggcttggtggggagtttgactctgggtggggccagggggcagacctctgcactgagcctggggaacaggaaacatgtcacccaccaccaccagggagggcctggggtaagctggccttgctttccttta

SEQ ID NO: 62234 - DNA, 802 bp, Homo sapiens
cctggccctgccctcccctgggccaatcctctgggccaggctgcctctgaaggcccctggctgaaccgatccagcagagctccaggcagctcccttctcaagctagagctgagctgcagtggccacgggagccggagccaggatgcggtgggcagggcctaggcctgggcgggaggaacattcctgcaccatctcctccccaagcatgtgaggacccagcccgccctgcccgcctgcccgctgactcaggcctccaggagccaagcctgctcagctcccccacccaccctaacctgcttccccactagttcggctctggttcccctctccactggctggggcaggagaagacggtgagccctggtaggaagaccatggggaaaaatcaaacctcaccaccccccgacatagctcagaagggctgattgtgaaacccagctctgttcaacatagttgaacacaaactttttttttcttttggtttggttttgttttgttggtcaaaccccagtgcagtgcagtctgtttaagaagtagtgtcgcatagctgtggcctggatctgctcagcagccccagtaggcagcatttattccctttcgcaacaaagagactgagacttggccagagggaagatgggacctgcctaggttcacacagggaatctctggcggggctggactcaaacccagctccctgccatcactccttagagtcacactgatgaactcatttagggccaaaggaagaaggggaggcagatttcccctctagatgagtgaagggataggaggctggtgaacc

SEQ ID NO: 62235 - DNA, 884 bp, Homo sapiens
gcccaaggttaagagccccagtctcatacccaatgcctcccataaacagattcactgggtgacctcatgtaaggtcatcattcagtctcagtttcctccagcatcactcaagcgatggttaccacgattatacatggccacgagttcacgagtgtggatgctgtcactgcctcaggccggctgcatcctcaaagccacacaggtcagccaggttgggtgggcctgagtgcacaagagctaccattttttcagtcctctgtgctggtaccacgactgtttggaaggtaggaactcctattgtcaacattttccagcagacggtggctcagaggcattgagtcactgcgagattgcgcacctgccccatggcaggcctgggctgaggtctgcctgcacttggagccgtgcccttcccaccgcaccaggctgccttttgaaggctggggggctaggcgtggcgggggccactgtcctgctgcagtgtgaacacaagggtgctgggaatcgaagggaatggggagggagaggggcaggtggccgtgaggggcaggtggtgggtattgggtggaggtggctgtgttccttcaagtcagtgggtgaaaggtcagagggcttggcccacagagagtgctgagcaaatatttgtggagagataattttctggaaggcccgaggctggggcatggggtcaggttctggctgtggaggagggggctagacaggtgaggccatgggcagcgagctgggggcaggagcaggactctggtctctgagaagaactcaggagcctccttactccaggagacaatatgggggcagtgagagctggcaggaaaatgtcgagactcggggaagggggcttgtgagtgctgagccaaaaaggg

SEQ ID NO: 62236 - DNA, 359 bp, Homo sapiens
tggagccaaaaccacccagcaaagtcacttttaaactcctgacccacagcaactgtgtgcaacagaaggaagttgctgtttcaagcaattatattttgaaagtaatttgttatgcagcaagagattactgatagaagccagcacatcgtagatggcagtccagtgagtcagacctggcacgtgcctggggctcagaaagcaggactctgcttccatgaaaagaagtgacattccttgatcaacaaattcattcattcaacaaatatttcttaagcacagatcatatgtcaggcactatgctgatgctgagggctggggacacaggtgaataaacaggaccctggttttggggaactgac

SEQ ID NO: 62237 - DNA, 646 bp, Homo sapiens
tagcaggctcccctaatcccagttattcaggaggctgaggcaggagaattgcttgaacccaggaggcagaggtcatagtgagctgagatcacgccactgcactctagcctgggtgacagagcaaaagactctgtctcccccaaaaatcccccacaaaaaaaccaaacaaacaaaaccaagaggcacacatctattgtgcaatcattgggatgttgactcgtatcacttggttgaggtgatgcctgccaggcctctcttctataaagttactgtttcccctttgcaatgaataagcatacgccaacattgaaaggtcaggttgaggaaggaaggaagccaggaagaaagccagtgcaggggcagccgagagacagaaggaaagaaggagggcgtcctggagccagcaggaggggcagcatgagtgaggcagggctggcatttattgcattagaggatgaagagtgtcccttggaagcagctgccacctgcaggtggcgggcgtcgagttaagcctctttcgggtggagcagtgggcctggagccaactcaggctgagtcaagtgtgagagggaggtgagaatggagatgactggaaaacacctctgtggggaaggtggtctgtgggctgggcagagagggacaggca

SEQ ID NO: 62238 - DNA, 735 bp, Homo sapiens
cttcacccgtgacccaccaaccctttccattcctttccccaaccttagggcacccactgggagtgaagcgctagctgatacgtaacaccatctctccatttcccttccctgacccagggtcctggggacccccaggccacttggcctggttggtgatgggggacagtgggatagtcagggttccataactaagctcccagcatagaatttccacgccgcagttcaggcgccatggcaaccaggggaaataaacactacgagtttcacagtccaagctctgccgtgacgtcatctccagctccagcctgctggggcctgtgctgactgtgccccagacagccttagctgctcaagctggagaactgtcttccttcccagcttcctccgtgtctggggtgggggatgggggggtctcaggcagggatactctagccccttgactgctgtttagaccctgctgtagctgctgctgctccctgcccagccccagccatgaaactgcccaaggggaccaggagctctgtgtactttgcacagcacccagaaaaggagccattgccctcaaggcaggaggtcaagcagacccctgtcatcatggccaagatcaaaggtgagagccatccccaccctgggcttgggccccctcccctctctccaggactccttccagcctgcctcctgcaaagccccttccaacttccttgaagccttacagaagacctgagcctccaagct

SEQ ID NO: 62239 - DNA, 1077 bp, Homo sapiens
tcaatagtttttaaaatgtcttttgccgcagcccgcagctgtgtataatgctattcgcttaacagtggaaaacatggcaatgacctgaatccccctggctcccgggatcctacccccttaagttaaacaaatgaaataacttccactgtctttcctaatgtcttaattcggtcctcagttaaactggcggtgggcgctgctttttttccagggaaggattctggaagacataggaggagacgccagcatttcgccctccagcacctcctgcgggctgtggtccgcttccggcctcactcgagcagaccccgccctcccagaggccgtttgtccaagtcacgtgatcgtcgaatctgttgacctggcgccaccggaaaaagaaattcccgggccctggcttcttggcctgatggtgaggcaccagaggtgaagcgaggcatgggctgctggagcgggaatgagggggcgacagtggctccggaaacggggggagggtgtcttcactggcctctccgcaaacacagtgtgtgcgggtgtgagggctgcaggtctggtagagaagagtccaccgccatcccgctcctgagacgggggcaggagtggggggcaggagtgggggggcgggtaagacagagcaggccggccggcttgtggagggcgaggcaggcagatcccttgagctcaggagtttgagaccagactgggcaacatggcaaaaccccatctctactaaaaatacaaaaaattagctgggcatggtggcacatgcctgtagtcccaggtagttaggaggctagggtgggagcactgcttgagcccaggaagtagaggctgcagtgagccgagatcatgatgtcactgcactccagcctgggcaacagagtgggaccctgtctcaaaaaataaaaataaagtggaagcatcagtatgcatgattgaagtcatgctttccatctatttttttccaccttcccttttttctgtctaaaacattgtatcttaagcttttgcctatgttatcaagtactcataagcattatttgaatggttgtatcataatccattatctggactcat

SEQ ID NO: 62240 - DNA, 2094 bp, Homo sapiens
agacacacacacactgacacacatatatataaagtataaatacatattttttaaagtttatttttaaagttttaaagcaaaagccggcccctcccctctcccagagtaggcaggccccacccctctccccaagtgggtggggacagcatttgcataggcagctttccctgtgatgccacaggttcctcgggacaaactgctgcctggccatgcctcctttccctttcatctttctcattgaccaatgggcttggagcattaaggccacacccctattctgtgttctagtggggccctggttacgcctcctctggctcagtcacacaggtgcctgatacgtgactggaggtgttcgctgatgtggccccaaccctgccttcctccccaccccacgatgttagaagaaactcaacagagtaaattggcagcagccaagaaaaaggtaaaacacacgagttcatggccccccaacccagccagagatccctccaatgacaagaccactgctagagtccataccactcctgaggcataccgggctgggcccccccaatttggggcctctggactccccccaccaaagtcttgtcagtcagccctgccccttcaagcaagcagcccagcccctgccctcaccaaccaccccagggtgactttgggtgggtgactcctagtgctccctgctccacactctgccctcatgtcctgccaccccaagcctgacctccctgggttctttgggctcatctctccaaggacctgggtccccagccccagcccctcccgtcaccagtcatccctgggtgactttgggctggtgattcctggggttccctgctgcagactctgctctcccctcctgctgacccaagcccaacatccctgggctatttggactggagtctccaaggacctgggtcccagccctaagtccccctcccccatcgtggatcggtgactcagccatcacactgatgaggtttcccccacccccaggaggagtggaatgtagtgatgtcacagtccccctaggaactgtcattactgctgcaagaccagcctttgatcttatgacccaatcccctaagcattctccccccatttctggttcctctggttgcagcacaaatttccagctggaaggggaatggggactatgggacctaagagcaagaggtttcaggctgctttattcccttcacatagacgttgacagtgtgaaaagcctacacttcccccgtgagctcaaaatgttgacagtatctctgggtgacaatggaaaatgggtttggttttgttttctcccaggcttctactctccagagagacttcaacatttttttctgagttctccacctcatattctaattctccatggttctgggaccagactgcccttcagtcagtggtctctgaagtgagattagctcatcttctatggaatagatcttggaaaactaaacttgacagcttgaatcttcctcatatcatctcaacttggggtacattgagtgccacaggataaatgcgggagatctttctgaagcatcagtttcccttgattctcttgagacagaaaaaacattaatatacttagggatgaccctcacataggtttctaagagtataccagacttttctctgaaatgagatgggttgtactctttctgataaattcccagatttaacaaaaaagctgccttctgccatgaggacacatagatataaaagtttgagaggtactggtgcacttcttcacactaacagacatgtgaggatgtatgactctaaaccacagagtgtgcagttcctgcctacttaatgtttacttttctacttctgcctctggttttggtccctggcagctgctgattcatggcaaaaccccagagcttggagtcagaagactgagtttaagttccattattgccccctccttttttagccataatatcaatctctctcagtcactaagtgattgtgacaacacattgtacagttgttagtggcattaaatcagatggtgtataagagtattttgcaaaaactgtaaaggaggctgtggctgtagggactggtagttctcatgtgtat

SEQ ID NO: 62241 - DNA, 1880 bp, Homo sapiens
tgccggagatgatatttgagctatgagtttagtgaaaatagtgggcagccctagctccatgggggtgtgggtggggagggttatcttaagcttgggaaacaaggcaaaataaggaaaggggggagagagagactatatacggcagagtgaacacaggtggtagctaagggaagggatgaaatcatgggacacctccaggcaacagcctccaggggctaaaccatcgtcttgggtaaatggatggtttgagagcaaaggcgggagcagcgagtccggtgagaaggtcctcacaggaacccaggctggtgagaaggtcctcacaggaacccaggctagcgaagcggtggctcggactagggtgaaagtagcggaggtaacgctgggtgagccgcacccgcgtctcccacgaggtccccccagtgaggttagcgggtgccgcgccgagcgccaagctgaggagccgcccccaggggctggcgctagtctgcagcggcgccgacgtggccggcgcgatccgccacgcacgtgtccggctccaggccgggggcgggggcgcgcgggggtctccggctcctccccgacttctggggcccgggcgccagctggccccgagcctccagtccgcgggtgcgaagaacggagcagatgggtcgggaacaagggagctgggtcaaggcgaggagggggcggccgggcgcgcgcgctctggcctcgtgcacgcgctgaaaccggagcgcgcagggcgcgccagggtgagggggacgggggcggggtgggggcagccctttcccaggcggtagcgggggcggcgtcgctgttgcccttttaagccgcggggccgccgcctcctgccgctggagtcggttacaaaggaagcgccacccaggccgccacacgccgaggcttccgcgcccctcgccattttccagcagcgctcgacgaggcggagccgcgagagcgcggcccaggccggccccgcggggcggtcgcggccgtgacggcggctccgggcccggctccccttccgcgcccggctccccttccgcgcccctcccgccggagatgaggggaagatgtccgtgtcagggctcaaggccgagctgaagttcctggcgtccatcttcgacaagaaccacgagcgattccgcatcgtcagttggaagctggacgagctgcactgccagttcctggtgccgcagcagggcagcccgcactcgctgccgccgccactcacgctccactgcaacatcacggtgaggcgcccggccgcggccccgcggggcagggcgaggacggagagggggcgcttcgagtcccgggacaaaggggagcctgccccggagaggctccggctccccgggcggggcaggcccgcccctttcccccgcgacttgcccatcccaggccgggctgggactgcgcgaggcttgggtgggaggaggcggagggcgcgtctttccggcttctcgccaggggctggcttgggggcttctggcccatctcggtccccgtctcctagccccgaggggggagtccgcggcggcccaagcccttgtggggtccatggccgccctcagccggcctgctcccgggaccggggcggggcggggcggggcggcgcagctccggctgttgtttgagcccaggccggcaaggggaacggcccttaagttttaacgcctcatttttcagtcggattttccttcttcccgcttgttcagccaattgtttttaagtttgcgtttaaggagaaactgacaatgagaatggactcgttgacggaggaaaagttggaatgcagactctggtgctgtttgagcgacccctctcccccgggcctggctgcgcgctgctgtgttctggaaaggagcatagtaccg

SEQ ID NO: 62242 - DNA, 1735 bp, Homo sapiens
tcatctcactcagctaccttagaatggcaggtgctatttatgccattttactcattcgaaactttaaacctgaagattacaacgagttaactaagtttacaaggaataaaggcagtgattttcacacactaagacaattttttaaaagcaaacgtccgtttataaatcgagcttatgctatttaaacaggcattgggactacgaagagcaataagtactacctagtccctgcaaggaatttgtgaattagagaaagatgtaaactcagaaatatggcggtgccagggcagtgagaggcacaggcacagaagaagaatttattttcactgcaggaggcctcctagaaagttgccaggagcggtggcttatgtctgtaattccagcaccttgggaggcccaggcgggagtatcgcttgagccctggagtttcagaccagcctggaaacccgtctctacaaaaaatacaaaaattagctgggcgtggtggcgggagcttgtagttaaagctacgagggaggctgaggcgggaggatcgcttgagcctgggaggtagaagctgcagtgagcagaggccgcgccactccactcccgcctggccacagcattagacccaatctcaaaaatgaagaaaacagttccgagcgtattacggaacggagtacacctcggagtacgggctccagacgagggaacgcaccggcgttgccacgcccaccttccccgtccagccggaagtggcgcggacgcctgctcagtgcgcgccggccgggcaaccctatgctggcgtaatcgggttcctccgagccgccgtaggactggttccggcgggctggtgaggaatggagccggtaggctgctgcggcgagtgccgcggctcctccgtagacccgcggagcaccttcgtgttgagtaacctggcggaggtggtggagcgtgtgctcaccttcctgcccgccaaggcgttgctgcgggtggcctggtgaggagaggaggcggaggcgggaagcttgcctggggacacgccgtgggcatgtcccaggctggcggggtggggggagagacccttgggacccaccagggccgtccccggctcgctcgccctacctgaggtgaccccctacccgcgaggtatctcccagccgtggtgccccggggggacttccctgaggggcgaagttccccttaaggttttctccatatctggctcttcttccgaactagcgccctgactgacacctacctaccccggggactttggatcccgcagggatctcctgctgctgcgccagcgggtgggggtttgtgagctgtgggagagacgaaaatgaacgtccgttcgcaatcctttgtgcgtttgcgtcctcagcgtgtgccgcttatggagggagtgtgtgcgcagagtattgcggacccatcggagcgtaacctggatctccgcaggcctggcggaggccggccacctggaggggcattgcttggttcgcgtggtagcagaggagcttgaggcaagtagcaaggggtgtcatgcacagtcatttgcaggttggtggttcagtctttgagaactatttttttttaaatcccagttttgttaattaaaggaacatctcgttccgtgaaaagattttgtaaacatcagttttagtgactacacggtaaggatgtgtcatgatttatttgaccgttcatcaaatgttgggcctttttttttttttttgagacgtagtctcgctct

SEQ ID NO: 62243 - DNA, 4809 bp, Homo sapiens
acattagccaacgatgtggatagtaaaaattacttaatcattccatttttttctgttagctctacaaaattactgagtcctaaattccatcccccaccacaattataatttcacttaggccagacttgtaatctgtccacaaaactgttttccaactgctgcatagagcagcattcttctggctcaggttcctggaatttccccaaattcatgattttcacttgtttatgtctagatccccaaccgggagaaaacatgtcctgaggggaagacaggacactaacctgaaagacatgggtttgaactctttaggggaggggagggtcagaactttttattaaacaaggaatacgcacaagaaaaaagatgtctaaggccaggtgcggtagctcaggcctgtaattccaggactttgggaggccgaggcaggtggatcacttgaggacaagagttcgagaccagcctgggtaacatggggaaaccccgtctctacaaaaaaaaaaaaaaaaaaaaaaaaaaaattagccaggcgtgatgatgcgcacctgtgatcccagcttctcgggaagctgaggtgggagaatcgcttgaacctgggaggcgacggttgcagtgagcccatatcgtgccactgcactccactccagcatgggaaacagagccagaccttgtctcttaaacaaacaaacaaacaaacaaacaaaagtctaatgtctacagacatctagaaagagctccagctatgcctcagagagaaaaatcccaggagtggatgggaaaatatccatgcccagaaaaaaaaaaaaaaaaaaaaaaaggagaaaaggtacaaaccatcaggtaagtttctgacccaagtttaccaatcttgtttctcatttcacctaaatgtaaactaggaaaactacacaatccacaatataaattattgttacttgacttgtgactggtcagtctccaaatactcctttcccacagcatgagaaggaaaatatgtttcctatcagtccttctcacaacagaagagagaaatgtggtttgtcactaatgaaacactgaaaatgtaccactgtcaccagttaacctaatctacaatctgctggttaaaagcaggtcagcctgaagcatataaaaagacgtctgcctttcaaaactggctaaagctgtcaaatcggatcgcaggttttacaaatacaatcacctaaattcagccctgctccataaaccagaaagcagaaccagcttccataactggccacgcagcctcccaccccaccccacccccgcccttgacagtgagtgggtcggagtagccacgatgcgcccaaagtgtttaattcttccagaaatgccggcctccgggaggaatctaggtttgaaactttccccaacagggcattccccggtgacattttgctccctcgggtgtggagcaagtgtggaggacctggcggcccgaaagtgcccagagtgaccgacaaaggtgggaaacggcagggcagagagtgggccagaagaaggggcagcagacgcgcaaattcacatcattcggggtcaccctgaccccaaacctctgacttctgccccgaactggcgttccgcagggagtccagggtaggccccagaactttggacccaagtcccaggcggggaccggcctgcgggcgcgagggctggtcgaatctgagggggccagtgatctttgcaagaccccatagggacggcgggttgacggggggccgtccctgggttcgccttcccagtccggactcaccgcccgccggagctgccccggagccgccgctcggaacatggtctccgcttccgccgcaacctcggccttacagcagccccgtgcccggccaactggcgccgcctcagccagtcacctaatgctcgcgagacgcgcgaacgagataagacgccctaggccgggagcacgagcccgcggtttccgcctgcccattgggcggctgcgcagccaatagacggcgggaagttaggggctagactgggaagtggggcaaaggtgaggctattccccggggaccttcgagtaagcccgggccgcggagcggcagagacaaagctggccacccgctgatgaccgagctcagactgtactgtctcacagccccgcaatggtcagcactgctagagtgaacttcaaaactgagctgacctcggggtaaggtacgagtggagccttgccaattccaattagatacctttcctatatgcccctatttccccctgtatttccccatggtagcaattgtcacatgggttgtaataacctaagtacttgtctgtgtcacccatctgactgaagatctgtaagggcagaaagtatgcccttttttttttttttttttttgagagagagagagtctccctctgtcaccctggctggagtgcagtggcgcgagctcagctcactgaaagctccgcctcccgggttcactccattcttctgcctcagcctcccgagtagctgggactacaggcgcccgccaccacgcccagctaatttttttgtatttttagtagagacggggtttcacagtgttaggcaggatggtctcgatctcctgacctcgtgatccgcccgcctcggactcccaaagtgctgggattacaggcgtgagccaccgcgcccggccagtatgccctacttttaaattttgtgtctacctgcaacacctagcacaatgcctggtccatactaggcattcaatcagtatgtgttgaatgaataagcaaatgaataaatgactgctaatgagtctggactttaacacgaaatttttaagagggaagtggtatgttcagaaattgtctcaattcccaattcagcaacaacctacctttccaatgttatctagtctatcaacaaatcccgttgactctaccttcaaaagataaccagaatccagcaatatcctccaacacccctttgctcctctgctggtatcaccttcactcaggaccctgtcctctctcgcctggatcattgcaaagcctcctaactggtctttctgtttctgcccatgtttccagaagcctcttctccaaactgatggactgatcatgacctctgctcaaagccctatggtggctccctctcctcccactgccctcttctctcactgttccccagatacataggccttcttgagcacacaagcctgctcctctcagagttttgcactctggctcttccctctgcctgaaatggccttctcttgttacccgcgtggcgtacttcctcacttcattcaggtctctgctcaaaaaacacatttgcagaaaggccggccttagcctctccacctaaaatagcacccatgccactcccagacgccctatcaccttgtttgattttttttcttggcatttatcactgcctaacaggatgcacatgtttgtttattgctgatctcactgcattggagtgtaaattccctgaagcaagagctttgtctgaactaacaagcactctaagggccttgcgcttttgctcttccctctgtctgaaattcccttccccatctgacagccctctttaaaacccagatcaagtgacaattcttttgttctgtttaagacaaggtctcactctgtttcccaggctggagtgcggtggtgccatcacagctcactgcagtctcgaactcctgggatcaagcaatcttcctgcctcagcctcccaagtagctgggactacagtcatgtgccaccatgcccagctatttttttttgtaggggcagggttacccagggctggtctcgaactcctggcctcaagtgatcttcccaccttggcctctcaaagtactgggattacagacatgagccaccacgcctggcccaagtgacatttcttttgtaagctctttctcaattctgcaggatgaattaatcctttcctcttcttcactcttgtagctctatgaacaaggaggtgaggacccatcttaaacttaagttgcacccacttcgaacacgtctgaactcatgttgccgacagagctgtggacccctgtcccccagtcaatctgcctgtgggaggggcaatttagtattccatgtctcactgcatttacctcctaaccagtcccacactggactagaatctgagacctatgggagtggaaggaagagggaagggtacttttagtaaaaacagaaaaggatattttactaaaaaccatataaaaaactgggatacaaactaacctccttccctacctccccacccatgacaaagcgaaatacaaggggagagcggctgccccgccctgcccccactgggcagattcaacagctcccaggcttgggcaaatcagcagcagctgttcaccccagagtctcgttgcccctgggggttcctggtggagcagttcagagcagagggagaggctaaaaatgggcaaagtctgtgacacctgaccagacctgttctgatcacacatgaaacgccccctgaggctttgggatgtatcagggttctacaatcacaaccaggttatgtaccacagaaatgtgtgtgctaagacatttctattagaagattttccctagaggcatatgactttcccactccattaggagccgctttggtggcaggacctatggtttccttttatttacttatttttattttatttattttggagacggagtctcactctgtcacccaggctggagtgcagtggcgcgatctcggctcactgcaacctccacctcccctcagtttcaatggattctcttgccttaggctcccaagtagctggaattacaggtgcc

SEQ ID NO: 62244 - DNA, 371 bp, Homo sapiens
ggaaggcaaaaataaacagctggcttacttttacatttctgtcgcattagtttacacacaaagctagacaattacgtataatgtagaaggtacctgaatgaaagtggccagtaaaacacagctcatctcttgctccagaatgatcttgttctgatggttgttgtaacaagcagcgataagtgaagggaacagtactttgatcagccgtgggtcactgaaatactggaagggcaactggcagagcttctgcagcactgtggggtggcggccggactgcacgatcacctgaaatggaagagcagcccaggtcagctgccgaaacgccccagcctgtccctcacccacctgcacagtgtcggctagtaccatgg

SEQ ID NO: 62245 - DNA, 546 bp, Homo sapiens
tggcagccaccctgtggtgcagacagagagtctatgcacttgggagacaggaagcacagtggcagtgagactttgccttggaaatcagtgctagcctgttacagtggaaagcaacaggacacaattcagctggcccccacagagagagcatttataccaaccttagaaagcggggaatcgcccatcctagcactcggaacctgagttgcaggttaaagtgttctggggacctaaataaacttgaaaggaggtttaagccacaagaactgcaattcctgggcaagtcctggtgttgtgctgggctcggagccagtgaacttgggaagaatgtgacctatgagaccagccagggcagccaagggagtgtttgcaccacccctctctcaaccccaggcagctcacaactctggtacagactccgtccctatgcttgaggagaggggagggaagactaaagaggactctgtgccaggcacagtggctcatacctataatcccagtgctttgggaggctgaggcaagcggattgcttgggcccagaagttc

SEQ ID NO: 62246 - DNA, 1834 bp, Homo sapiens
aaccttttgagcccccgtttctccattcataaaataagtattactcctagcccatccatccttctaccagattatttatgaagatgaaaagttaatgatgaaattaatccataaactaagacaaactataattcatataaggaattagtatctgttcggtaaaatgactattaatgaatagctattttcatggaaaataacttgtcacaactagaataagagatgcagtccaccagcaacaggaagctgctcacaaacaggcggcctcatctcagctggggcccccttaacagcagcaggtgttgcttacaggaccagttttgtgcctgctttctaacaatcccgttcctccctggtgccgttcccacgaacgcgcctggaaaacggtgtagaggaaaggcgccaaggaagtgctgttttggaaaagagcagcaacagaggcaggaggctgggtcccactactcccaggtgcgagaggctcttcgcccctccaggcctcagcgcacgcatctggaagacggagaggccattcctgccccgtttcctgggcagagctaagatcagagtacagggaaagcatggtaaaccccgctgggaatgacagatgacgaagacgatcacctgtcaaacgaagggaggctcctccaggggcccctcgcatttagacattccagaagcctcgtcacccgcggccggggctgcccccaagtgaggtgacgcggcagccccccactcacccctcagaccgcgtagtgtgcggggtctcacgtccctcacaccccagatgagcccgcagggcagggcccggacgcggctcaccccagcccccgtcccgaggcctccgaggccgacctccgagccctccccaggcgaccgcggctcccctcccccagcaacgatccctgccccgctcaactcgcactcccaggtgaggggagggggtgaaagggcgtaccccgccgccattttgtcccctggtccccgcaaggcattcagacggcccgcgccccaacccggacccgcccgggtctgcgctacgcacgcccctcgcggacactcacccccgaccgccctgcttagttcggggcggctcaaagcgtcccgccgggaaaggggcgtgacggggcggggcagggaggcctcggagaggcggggtggcttcccggcgcaccacgtgatctcagccgctgccgcgccgctcccggctgcaagatctgtgttgtccgcgcgcaggcgcacgcccgttcgcgccgttggggcgcccaggcgggaggtgtgagggttgatttggttcgatgtcccggcgcggcgtttccgaagctgtttcttttcctaggttaagcttacaccgccgcttttggccacacaggtctttctcgtactcaatctcttccctcctcctgccttatcaccacagtcaatccacagattaaggacttagagacgcgcctcacagaaatctgtgctggcgaaagcacttgacaggagcacgctgggctgcgctgaacacaactaggcctccgagaagctttatcagggcccttctgtgtgccaggcttggaaggtcgaagtacagagacctaacaaatacgtttcatctacttcaaagacaaacatatgatgaattaaatactttaacgtttaaatcagtctgaacaaaatagaaaaaagattcaatgcagactgtaattatcaaacgaatattcaccgtcccttttcatccagctgggaaacagctctttacccttccctctccctccccacccgcagtaggcgggaagtcctggactcacaagcgttgtgggggcaggaaccatatggctatgttctggct

SEQ ID NO: 62247 - DNA, 1267 bp, Homo sapiens
acttgtaaatcacgaaattgagcatcagatacaagcatctggctgcacttcctgagtttgtacgtcctactctcataaaatagatacattgaagactgagaaagaatactgttggccgattcctcaggcaataattttttcgatattgtattgttgtctcagaaacctccagcctctctcattgatggacggtaggaggggcacatggagtggaccaggagtgggcaggagtggggtgggggcgtgcttttagaagcgtttcgggggaacgacaaggcgcgggtcgtagaggtctaccctctctgcagtcccagcatggctcctggagctctctgggcggccgctgaccccgacatcgcggcggcccgcccccagcgccgcgctgcccaatcagcggcgcggcctggtgccccgccactccgcgccggccatataggcctcctcctggcgcgcctccgcaccgcattggtggaccggcccccagcccgtccatgggcgttgtggccgccaccgcaggttccgcctcccgttccctccgccctcaacgtacgtcgcaccgcctctctgtagccgcccgcggagcatcgcagccggcccgggcccccgccagcctccctcctcgcgtccctcggtgtcctccgcgggccggcgcgatgcggctgggcccgaggaccgcggcgttggggctgctgctgctgtgcgccgccgcggccggcgccggcaaggccgaggagctgcactacccgctgggcgagcgccgcagcgactacgaccgcgaggcgctgctgggcgtccaggtgaggcggccaggccggtgctgggagggccgggcctcgcaccgcggctgccgcgggctttgtcccgggacaaaggggggcggccgggcgaggcctggcaggggcggcctgacaatgggggccgggcggcgcggcactcgctctctgggggtcctggggcctggaaagcctgaggagatagcacggcccaagagctggatcccttctacccctcagatcatggagggtgtgtagggggtaggggccttgaagtgcaggtgcgggtcaccccgaaaccctttggcaagggggtcttctagtagccctgtttttctccaccattttgccccactgatagtaatgcttggccctcctgtgtgtcgcttccccctaaaggaagatgtggatgaatatgttaaactcggccacgaagagcagcaaaaaagactgcaggcgatcataaagaaaatcgacttggactcagatggctt

SEQ ID NO: 62248 - DNA, 2771 bp, Homo sapiens
ttgaggctttaatgttctctcaccaatgaattcattcctggatgtgtccttaaccaaccaaaaacagacacctcttccatcctaaatattttaggcacctctgccaatctctcccacttaccacttttctcaggtctgtgtggctttgactcatcctgtacatgttttctgattatctaacacaattctttcaatgtacattatgttccttttctcataaatattacttttcaaggagacaagttttttttaaagtcctacttaaattggggtgtaaagttttatgtgtgtttttttaactcaccactatactaatgagaaaattctattttttttttttaagacagggtcttgctatgttgcccaggctggcctcagactccttccctcaggggatcctctcatctcagtcttacttgtagctaggattacaggcatgtgccaccaagcctggctaagagtttaaagttctgacaagccacttttgccatcaacatcactattattattgccattattcttaaattagaaatattttaatcctttttactgctattactctgatgatatgccaaaggtcatgctcctcaattctgccttattttcaccttttctctatttggtttttcataatcattattaaaccagcttaacaaagttgttctatttaatccaatatctactggctgaacaactcaaaatttcaggtggcaaagaaactggagattaaccaattgccattgccaaattattgtaacagcatggaaactggctgtttccagacagtagggctccagaggttatctgagaagcctgaaatttaaatatgcattttctttgagaccctctgttaccccaccctactctaattgtaaaaagagtccattacaacatcataggagcctgaggtgcttaagctttgtaatgctagagttcatccacacttgggttatgtgtttaatcagtagcaacaacaatgtaagttacaaaatgtcaacatttattctagaacccctttagtagattacaaactacacataaatgcagataatttttcttacctattaactctgcctaactactaaaaggaagacagtgaggagaaggaagaggaagaagatatgtcaatatttttcaataaagacttacttgagaccagccatgagtaagatttctgggggaaaggtgcatgtagaaatttaattcgatgaaaagtctaccctctctccccattagctgtcagactacagggactgtgtttactctatttctcaaaaaaaggtcaagggtagatattcaacacacatttactcatgaatgattcttagtacacccgtctggtctaagtacaaactttatggaatacattttctgaaaaaaaaaatcaaacaagcctaacctgaattggatcttatggaataaaattcattaaattatttcaaagcatgataaatatcctagaaagctaataacccattccctaaactgcaactagagagagcgcccctgctgattccaagttctaaatgattactcagggccacaaggctcttggtcagtggacaggtgactaagaatgtagtaagagtggaaacattcattttcttaactgttgaagacaaactaagacagacacttcctattatgtacttgcttcctgacaagttagattttcttctagtgaattgaaaacaagcatgaaaaagcaaagttagctgaaggtgtgtcccatgacatattctttgtcagagcagtcattcatgataggagaaatacaggaagtagagaaacaaattccaggatatcagatgcaggttccggtttaaaagtatcatattaccacctcgaatgtgtaggatgtgctggaaaacacaaagtatgtacaagatttgtgacaagggagaaccacacttgaaatacctcattataaagttttattttttaaacaaaagcatgacggtataaacctcttagtaatttgaacatagcaagtatatttttgccttacagcctacagcctgttccttcagttctgaatccccccagtctcccaatctcttccaaatcacccaagtcagcaacttcttatactccagattttttttgccaacataaagcacgacccaatcactttatcacatcaccctttaattctctgcataacacatcactctgatcatttttcttgtttatttttgtgtgtcttgcttcaccggaaagtaagttctgtaagaatagggatttttcactgtcttttcatcatttatcaacaatataagcacaaagtaggtgctcaaatagtagtgttatatttaacaaagcaaattttccttaattatatacattcacagacataagcgtgataagttttatttatttatttattttgagatggagtctcgctctgtcgcccaggctggagtgcagtggctcgatcgccgctcactacaagctccgcctcccgggttcacgccatgctcctgcctcagcctcccgagtagctgggactacaagtgcccaccaccacatctggctaattttttgtatttttagtagagacggggtttcaccgtgttagtcaggagggtgatctgccacccttggcgtcccaaagtgctgggattacaggcatgagccaccgcacctggctgataagttttatttttaaaggcaggataagttttaaaggttacatatggctttcaactacaatttatatgtgtgaagtatttcatatgaatgaatgatggttagtgaaggtgccacgttcc

SEQ ID NO: 62249 - DNA, 1886 bp, Homo sapiens
aagaaactgaaaaaataaaataaaataaataaataagcctgtaactcaaattaaagtataagaaacactgctctaattggaaaagaagaaatcacggaaatgccaatgtcgcctgggtgtttgccaacagctactacctcccagttaggactcttcacacacaaacgccccgaaggactctggcaatacaagtgtgtagcaagtgctttttaacatataaccatccttttatgagacagctgtcaggatatgaagttttatcccttgttggggggtcgggggaggaggaaaggattctttccagaacaggtgtgcgtatgcgtgggagggaggagctgaatggggaggaggaagaggcacagtatggttaaccggaatgttcaaggagtgctctggcgactgtggacagagcaatctgtccagggcactcaagtgtttaaggaaatgacaagttcagagaggcaaggtgatttgggaccagactgaggacttctgctccaagaccaggggaaggagttgaaccttattctaccgctgaagcttctgttttccttattttcagatcaagtgatgtgatagaggaaacgttttaaaagatttatccgggtgcaaagtccagatgggctggagggtggagagacggataggaacaacttaggttactataaaagtccctgatgagataaggacccaaactaagatgacataaacattcctttcaaagagggtgtaccccttaaaaattcataagccaccttttattgaaagtgaactcatcactttcaaaatcttgtgacatctccatcatatatttaaccaagagttataatctcacagtttggtcacccccatgaccaaaacaaatagaccgatgttcttggtcaatggattatttggctcctcgagttgaaacccttcattttctgggctggtgacagtcagccggttctccacacacaaagggcgttaagtggaacccccgccccggctccgcagcgtccccgcggatctgcccgcctcgggacggccactcgtctgcgaggccccgacaaagagcgcggaacctgagcctctggcgaagatcctatttcgagcccgacgtcctgctacagtctgcaataagcgctctccgtccagccggcgactccgggggggggagactggggcgcctggcacggagccagcccgcgtgggccgagcgcggaggcgccggctggaggccgtggagtccctgaaggcctcccctcgctgtcctccgcgcccaggctcccggcttggtccggcagggacctcgcgaagcggcctcacacccggccctcccctcgcctcagccgcctgagggcccgcgcgcggcccccgcgcgcccgcccaggcccaagcccggcccccacgggcgcctccgccgcggcctcgcccggccccgccgccggcccctcgctctgcccggccccgctcacccagaagatgaggttgagaaagaccagcacggtcttggaggaggtgatgccgcactggcccatggcgccggtggcccgcgaaggcccggcccggagagcggggctgcgctcaccgagagagcggcaatggcggcggcgcctcctcgctaggaactgcacggcctgcgcggcgctccccgcagcccctgcgccgtcgcgcagccccgaccccagcaagtgcctcgctcctccgcgcagccgccgcagtcccctcagggctcccgcgccgctccctggcaaccgagtcccgccccacgcggccggtagcttcagccaatcgcctctgcggaggctgcagtgaggccacgcctcttaaaggagccaaggcctcagcgccttttcttggcctctggccgcccttggacgcagatggctccctagggaggttct

SEQ ID NO: 62250 - DNA, 3967 bp, Homo sapiens
catacattaaaaagccttaaagaaaataatttgacattttttcccacataatgtagtcatgttagagaatccaaaataaagacatgataaaatatttccctttcccccccgacagcaatgaaaaggggatgtttgttttttcacatagtttgtgagttggtcatatccaaaattcactagcaatgctatgacttctacttccattgttcatctctgggctgaggctataaccctcaactttgaagccaagaaaatgtaccatatctgccattacagtttactaaataagtcaccaaagagaagtcccaggcaagtcagaaagtaattagggtcgtcagtgaattgagctatctagaaatgctctgagattacgagagaagccatcatgaagtgagtatccaagattgctcatggaaagttttaccccggtggataattcacgtttttcacttccacactgcagagagcaatatgggttctctgactatacacatcactacatcacttcatttatcgggggaaaaaaaaagacgctgtggctgaacaaaaatcagtaagtaggccccaaaacagaatcctcaaggcaatcccaattcaggtgaaaagctgttcacgtacatcatccaatgacctaaaaatagtcttttatgtaagtctctaagtatttaattcaacgtatgatcttaccacattcaacagaggcagaaaaaaaatcaattaggttttctatagcaaggccaataaagatgaaatcatagttttcctctaactcatcactaccccctcaacgtcagccttccaataactccattccacagctctcaaattcctgaacttggatctttaaaaaacaacgaatcgcaaaaagtaacatttaacaggccagaggcaggcgggggaggagggtctctcccggtgctctcagcaatctttaacgtagccaaaggaggaaaaaacgaaatcaagctcccagacggatggtgcatgcgacgagaggggagggggcagacgcggttcagacggcaagtccccatcgaaggaggaaagaaaagttgcaagaacggatgggtcaaagggcagaaaagaaaaaaactgagcagccgaaccactcacaacccccaaacgaccccgccagcccacacgttcgcgggctccccagccgcggcgcgaagggagcaggcagggagccacccggctccgtcccgacgctgccggcgaggctgcgccgatgctcccgggtgcgggagcgggctgaccgtgtggacccggcaggagccagagaagcccctcctgccccggcctccccgcgtccagctcctccaggcttcactttcccccgcaacctcccagccgcgcccgggggcgtccctcgcggcaggtcccaactttccttcctctggggggcgtcgcgctcccggggccgccgccgagggagggggcaggggcggcagggggcgcgcggcaccggcggggcgcgggggtggccggggagctagagcccgcgccgggcgggacgcaccggccgccagagccccggcggcggcgccacccagaacccgcgccgccacccagaacccgcgccgccccgcccggattcccccgggtcagcgccctcaacccgcggcaaccctggtcccacagacggcgcgtgagtagaagacaaccgagcggacgcggacagccgggccgctgttacctgaggggcgcacacgccgccgcggcgaccaccatcaccgtccgtcccgtccccttcctggtgaccacggccgccgccgccgagcaactgacactgactaacaacaactaactaactactcgccgcggccgagtccaccgcgcgctcccggccgctcgccgcccgcccagcccaccagcctgcccgcctcctctcggccccgcgcgccgcccctccgcgcgcgccctcgcccgctcgccgcgctcctggagccgtgagcacgcgcgcgctcacgggccccggtcgtctcccaggtctccctcagccccagcgggaggagtcaccgccaggcccctcctctctgccttccaacctccagaggacgagacctaaagggtgcctgattggctgcggagggcggggctaagacaaggggcggggctgccgagaccttgggcccgcgtgagggaaaatttgggttcgattaagccgcagaggaaaagaccaggggagtctgggcccatttgggcgtcggggcccgctaggtcagccgtcatcgaatacagaatatgttttcgaggacgctaatatgtagtcatgaccaatttcagttcttctactttctgcgggccttcgcaataaaaaaaaaaaaactacatctcccagaaacctccacgaaaataaggctcaccttgcgtaaccacgtagtccttcgccgcattggggcaaaataatcccttcatttttgtgaaggtaccgtggaaaatatttcatttttcttctcaccggagcaattgtaaatgctatgcggtaagaggagttacctgtggaaaggtggttaagagattaggtaaagaaaaggaaaggacaccaaaataaagtgctgcggaagaatttttgtccagctgtgagacgacgagtgcgtgaagtgaaggcgattgagaggggctgagggaattgtcctctgtggaagggactttcttttggccctaggccccttcctgcccctgtcgtcagcaggtcagtaagcaaggcgagcttgggggtggccccagtcgagatgcccttcaccccttgaagatcacccctcttttggtggtggtggtactggtttgtctcagttggaggccggctgaatgggggcgcctcaacttccggttgggggaggggaggaaggccgtcctggggaggggggacaccctcacttcctgtgggggggtggtgatggtttgggggtgtccgacccacttccagtgctgatgagggcttgaaaaggtggtgcttggtgccattcgcggagacattatcttgcagcttggggattgtgttttatgtgaaaagttagattattccaagttgtgctgaacaccaacctgcagtcagaatttatgagtttgcttccacgtggaatatggagcatttcctccccagcaaaattgtctgtgttttcttcaaagaattcgaaagcccttgttaaaaatctctatgcacctttgcaagacgacatagcttgtgtgactgatgaattgccaacacctgcacccctactcaagtccagccttggctgggtgaagtgtggtgccctctgccttgacatgcaacaggaaatctagcttctcttttaaggagataactttttatttaggggactgaatattttacataaaatctggggcattttcatcttagcagaatgaaagtatcacactgaagtactcaaatttgaggttaccttaactgataaaattgacatcttaaattattaggactgttgattttgggctacaggttttgccctgtgcctgagaacagcttcttcagccttaaaaattcttatgtgtagcttacacgtaacatttttgaaagttgtattttattacattttcctcctttgtaatttaattcatcactgatttttaaatggtatctgttctttgtggttttaaagtataaagcaagggtcatgagactcagctcagattctaaacaggaaaaagttggctcacaaaggacaaaaggtcaataagaactttctggttttcagtagctcatttttaataaactatatgtgaggcggtaataaacactcaataattttgattccttggttctgttgtcagataacacaatacttagaagggtgtgtgtctgtgtattgaaggaatcaatctatttgaagcttactttgtgaaatctgaatgttagtaattttagtatatatatcagtgaacctagaactgtattgtcttgcaagaatttttgaagtaataaggcctgtgtactttttctttt

SEQ ID NO: 62251 - DNA, 2608 bp, Homo sapiens
aaagacagtcattggatacactgctcacagcagtttgaaatattaaaaccgtaggtcacaattctggattccatctgactgaaattagattatccacagagatgttatacataatacagaagtgtcttttcattctttcatctactttactttgtaaaatcaggctaatgttttgcaactgttgctttccttgtttgtcgttttggtggtggtttgtttttgttgttgtttttgccgtagggttgaggattaaagaaagtatcttaagaacctgaatggtttttcaccttactgctttgctgtctctatttcatagccttcacaggtattcaaatgagaataccctttacgtgacttttcattatttaagcaaaagtttagagtgtctactatatgccagtcactgttctcaggactttgaatacagtaaatacggccaaatattcatattctactgtagtttactctctaatttacaaattaaaactagaattttgctcccttggtattcctaaataagatctatgttatgatcgttgttcagactgggtaaagaagcagccctaaacttgatctctcctggtcttaatctctaagccattctaaacccagatttgaatgtttcagcctaatttttctccagaccatagaagcccctgtgttaaatatgcagtccctttcattgatacatgtatcattttcctaccattctagcttcttttgtattgtgaaaacaaatgagagtgaacagtggggaaaatatgggatcagataggcccaaattcagcactggtctctgcattttactggctgagcttactagcttggtaaccatgagcaatttatttgacctccctaagcctcagttttcctaaatccaaatggggttgtttggtggaatcagaatgttgtatgtaaatctcctggtccaatgcctggtgccagaagcttcattaatgcaattatcttacccccaatcttgcttctgctactctggctattgtgatttgcccacatgtctgttttaagctttacattttccccacagtatgggatgcagtggtagactgactgagcttcagccttgtccccctatcagcatgctcacacagttgtcaagatttaattttttttccttgtgggaaggagaaatcactaatttccatgattagaagatatacaaaatagaaaagtttcaagaaaaggaatcttaatcttggcacaaatcactaaggtaatttgaattgttacaggcagactttcaactcattctcctaaacttatttaaatacgaaaaccaaaaatgacctttcacactatgatcatacctcacattattcatctacacatccaaacgggatcgcctctggggggaaaaaaatctgtactgcacccagcattaatatttttttttgctcatgctattttctgcctgaaacactcttttttcctaggaatccccatctatcaaaatgccactttctttgaggtcgtttctcaagtaccacatttaagaaatattttctgatatccatcctcttctacactctcccaaactgtacacgttctgtccattaactctccagagcattatacctttcttacagcacttactgtccagtgctcctcttgtttgtttttattgcgttgttgtaggtagagtttatgccttccctaaaaggctgcagactaggtcttattccactctgtgctgtcatacctggcacaagaccattcacatcataggtattcagtaaatatttgtggacgtgagctggctcttggagtatgacaaaactgatcaataacttttgtccacaattatgcccagcatcagcacaatggctatcatacattagacactcaaatatctataaaatgaaagagtgaatagtaagtcatcattctctcatttgggagcttcttagggtgtcagataagcatatattaagcacctcctatataactggagctgtaagaactgatctctgctcctcaatttaattggaaaaaagtaaattgttactaatatctgcagactttgaagatggtaggtgtttgagtagggatggcatggagagcttaatatagaattgtttgcattgtgagagataccctctgctacctgaactcagaaaccaaatagatttttatatcaaatatttggacacttaacttgtatttccactcctaggtatatatccaagagaacttaaaacatgttcacacaaaaacttgcacacaaatatttgtagcagccttatttgtaaaaggcaaactcaaatgtccattaattattggatgactaaacaaaatgcgatatagccatacaatggaatattattcagcaacaaagagaaacaaagtagcaatacctgctgtaacatggataaaacttgaaaatattaaagtgaaagaagtcacatacaaaaggcaacctattatgtgattccatttatttaagatgtctagattaggcaaaactaatagagacagaaagtacattagtggatgggaatgggagtgactgctagtatggagtttcctttggaagtgatgaaaatgtgccagaattagatagtggtggtggttgcataaccttatatac

SEQ ID NO: 62252 - DNA, 748 bp, Homo sapiens
caatccagaatttgtggaggatctctctcaaggtcagttgcttcagagtgagtcttcaaatgcagcagaaggcaatgaacagaggcatgaagatgaggtaagctgaagtatctccttctgttcctatcctctgaaacttctgaagaagcagtcacaaggaaggtgtgttgatcaaggtgttcatatgaccttcttatattcttaggctgatacctgcaaaattttgttttctatttcttgttttatacggaaccatattaataattttaatgacatagacaggtagactcttttttccctgttccctaagaaatgtatacttacctcatattagatgttgaacaaatacttgttgaatgagtgaatgatttaatcattaataagtaactaatgagaagtgtacatgcccttgctcaaggctctgctcagcaagccctgctgcatggagccctatgtgcccaaaggattcatactacttaccaaatctttcaccctcccatagggggtaactttccttaactcacacaaaggcgtatgagcctgggcagtcatgcccttgttggactttcagtgtttcttacaaataactgattacattgtcagtgttttaaggcactcttttttttttttaagccaataaagagtgccaccattgatttttgtcttttttcttattttaaaaaagctggccgggcatggtagctcatgcctgtaatcctagcactttgggatgccaaggcaggtggat

SEQ ID NO: 62253 - DNA, 656 bp, Homo sapiens
tcggagggaagggcaaagtcttcagaccagaggtggtcccgccaagcgctccaccgaggcctgaccaagcccaagactcagatgtgttggccgccttggcaaggcaaattccccacattccacaagtgctcttgagggagaaatagaagtaatgagaaagtggaattcttgatgtgtatgcgtgctcactcgggtgccaattcatccgacacagacagatccctggccttatttcgcaagagagtgatagagcccatttccagatgtgcgggaggacggcccgggacccagtgctggcaggagagctggcgccctctgctgtcccggctaggaaacactgcaatggtgggaaagaacctggggttcctgaaagccggcagctctgttacaatccatagccgaccctcgcaagtgtggaaggggcctgcagctccttgctgttcaaatgatgaacctgcaaggggctggattccctccttctagctggctctctttgtgtttcgtggctctaaatgagccagaaatcatgaggatttacaataaaaccccagcctcccacagcatctgctggtcccgttcccgagaaggtgaggaagagtggcactgtctctggcctgtgaacctggccagcaggcctaggcaaggcgagacaatga

SEQ ID NO: 62254 - DNA, 1317 bp, Homo sapiens
gccaggcctggttttataccctcctcagttccctttggcacccagacaggactagggagacagtggccccagaagcagtttaaaatttttttattattttgaaaagggattacattcacatgtttcaaaatccaaacaagataacacagcatagagaaagaagcctttccgccttcctactctgtaaccctgcttttcgtttcctgtgtgtcctttcagagctccttttgctttcaaaagcaaatacaaatacgggcagcttctgaatggatggccaagtgactctggagcttccgcgctgtgtgagggctgggctttctgtccctgttcaccctcgaacccaggcttcagccaccgcacggtgagtatccattggacactttcaaatatttatgaaacaccgatggattttctcagtccggagctgtagcttccatggaatttggctttattagccagaaagtcaatattttccctgggccaccgcagagatgcacatacttctatcttgcctccggccccgtggacccggctgctctgcctggtcagcttcctgctggtggatcacgacctttctgctactgggagctggcagggaaggactcagacaagccaaagctcagggctggagcaggagcttggggtgaggcagaagttttgtgcagactcactgggggtattggacaaacccgtttccctccctgagcctctgttactccacctgaaaacgaaaggtctggccgatcgctgagttctgttgccgcttgttgcgcaaggggagtctcccgggcttcccagactggggcctcctaagtgcggggctgggtcttcttttgctcctttctcacccccaacctcccacacatagggcagtttggcttcgggctttttcttcctcatagtacagcagatttatggctttgctattctgggaagcagccgtttttccgtgggatctaagggggccacggccggagagccaggacccccaggcctcatcccaggttgtccctggctcgtggcttcttgctagggcctgagggagcagctgttacaaagctgatgggattggagtctgatcaggggagagggatggccatagagcatggctgatggaaggttgtgaaaacagagctgaagtttccataaccctgaggtcagaacaagggcagcagtgagaactaatgagcttggctgtgatggtgcggggaggggagctgggggagggaggcagccaagagcagccaggcagggggtccacctggcaccaggggagctgtggtggggcctccagacccctgtgcagccttttgaaat

SEQ ID NO: 62255 - DNA, 932 bp, Homo sapiens
cgcagttaggtctctgcccctggagccttgactatgactccaattcaaggctccgatttccccttccctcagcagctcaggtcctcccagtgcctagcacacttcatggtatagactaggcgcttagaacgtagggatggatggactggatggatggatggataagtctcaaccccaaaactactactttctgactctggaaacagcggaggggctgcctaacagtgtggaagtgtgatcctaattctaagcgcgttcttgtctaagtcccacagcagggctggggaagggagtgtccttgggaggtcctcttgtggctggggaagacccgaaaggactcccagctccagacaagccctagttcctgccccgggaggcaggggcccttcctttccccagggaagcacggggactctaagccggccggcctgcgctgtcttacccgccccgtacccccgcccctgtctcgggagcggagtagcggtggacttttctcacgcccgcacacactgtttgcggagaggccagggcagacaacctccacccgtttccggagccactggcgccccctcattcccgctccagcagcccatgcctcgcttcacccctggtgcctcatcatcgcaccaggaagccagggcccgggaatttctttttccggtccgacagggtcaactgagtcgacgatcacttgacttggactaacggcctctgggagggcggggcctgctcgagtgaggccgggagcggaccgcagcccgctggaggtgccgggggcgaaatgctggcgtctcctcctccgtctcccagaatccttccctggaaaaaaacagcatccaccgtcagtttaactgaggaccgaattaaggcattaggaaagacagtggaagttatttcatttgtttaacttaagggggtaggatcccgggagc

SEQ ID NO: 62256 - DNA, 1182 bp, Homo sapiens
agaacagaaactgaggcccctgggggcctagaaccaaggacggatggcccaggaggctctgggcttgcaaggtctcccaggggcgggtgtgagtgggctgcagggagtgggctatgggggctggttaggtggctgaactagaagctgtcctaagtgagttttctgccatcagtgaacagtggaggggggctgggaaggtgtcctggactttgagatctggaattcccagatgttctgctggtctgtgggacagttggtgggacatgtggaaagctgggaaacgcgtgtgtgtgtgctcactgcagtgacacagcatggccatatccgtttgctgtggaggtggggttgacagaggagagaaccgaggcccaagaggtgaagcagcttgtctgaggtcaccccgggcgaccaggatgcaggcctgcagatgtgcactttggagctctgcctggagctggggtggaggagcctgcctgctgcctcgtgccctctgccgggcctgggggatgtcccaggcccagggctggctgctgtcctcctgctcctcttgctggagtaagcagggcctggggtttgttagcagcagcggcagcagcaggagcaaggctaggaggctggaaacaagccacatcccaaaatagctctgataaccatggggcaggagggcccagccaagcctcagccctgacaagcacagcctgcagctggcctccctccccactgggcctgggctcagtccctggtttccactgatggcctgtaaggcccactcactctaggctttgtggcccacctgagaagtgggaggctggcctgggagatgggaccctgtgactcagaacccgaggctgtgtacagcccccgtggctggaggtggtcacagaggcctggcaggataggtgcactggagcagggggaggtggcgggagtggacggcagaggttgctgcaggctggcaggaggcccctgggacctcagttctgtgccaggatctgtcggggaataccaggggtgagcaagtatggagatggggtggcagggtgtcaccctgggcaggctcttttatgggcatgtgagggggtcagggtggggtctcaagacctttcctccagaaacttcagcccagcagcgcccgttcttgaatcctggggttggccatgagcaggtgggacagaaatagca

SEQ ID NO: 62257 - DNA, 2325 bp, Homo sapiens
ccgctggtccacctggagagggaacaaaggggagaagtgtatcaggcctgccaggtcaccgggtaagcagacgagcagacgcgcaacctgagagcctgggggtggagcccaagtgacagcagcacaactgttccaaatgcaccgtggggcccatcacggagccagactactatgttccagcagcgctgacctcgtgcactgcaggtacacaccgagtgtccgctgaacagcatgctttccacagggcatgggagtaggggagtctgtaacctgaaaccaactcctgcactcaaaatgccctgggaaataggccactgcaagcagcaggtaggacagtcagccttgccaatccacaagtaaatacgtgagatgttgacacaaagggccacaaactagaatcctgggcagatggggattctgcttccaaaaaggaagcagcatcaccacatccattcaacaaacatttgctgggctgcatgtgcagtgggggtggcgaggactccggcgtcacatgaacctgagtctgaatctcagctctaccacttactagctgggtggcttttagcaaattatgctctaaacggctctgtgcctcatctggaaaatagttaattacctctctcttactggactactgtgaggattaaatgaggcttatataaactacctgcgcacgacagacgagcaatacctggttactgccactctgtgtcaggcacggggccagtgctgggcagagcgttgaataaagttcaaccctgacctcaaggagttaaaagatgagaagggaaggccagacacgtggaccatcctaaccatggccaggccctggtaacgatgtgttcatacagccctgtggaaccatggacaggtccccgccaagcactgaggagaaaccgctcctacagctagagctcaggcttccaggcaggagggctgggaggtgaggcagcacagccaggcagaagctggccacagacacccctgcgtcacactgaggagtcaagacgctatcctgtcagccaggggctttcctagccaggggctttcctcacaaaaaaacatgcatcttcaaccatcacccactccacgtgaaccggtatgcacgtgtacaaaacagaaacaaatgtttcacaaaacaatacttaatctcacacagtggactacactttgatgcttttaattctaatcaattggacaattggattttatgggaaaaaaataaaaataaaaacctagtaccaacctactaaaccaatttctctatccatagtgtaaaaaacaactatagtcatcccttggtgtatacacaaaaagctggccctccgtataagagggtttcacatcctgtgaatactgtattttcaatctgtgtgtagttgaaaaaatccacatgtaagtggacccatgcagttcaaacccacgttgttcaagggttaactgtacatattttcctatacttcatgcccagccaggagctgcctttcaggagctgtaaagtggcaagggagatggacggctcactgtaagaccagctaatgatgatgtaattcattcagcctggagtatccagctgcagacgtccaagagggaggggcatatcagctggccctgacatgggagaagatccttgtacacatctcttctcccaactaggaggcagactgtgcctcactcttaaggctgctcgggtgcttggcggagggctggtgtggagcaggctgccaggaaacgcttgctctggcctctgttcaagctccctcctccactgagctctggaggacatggaatgactgtgtcattcatctctgtgtcctcagcacctagcaaggtcctggcacagaacatgcactcaaagcatggaatgaatggaaaagctgacaagcatgtggactgcagtagcagtgggcacggggctcgggcacttggttctggcaggaggcagtttgacagtgattggcaaagcccagtgctcagggttgacagcacactcaaagctatccgcattttaagagccaccttacgcaatggccatcgataagtgggaggataattaaacacattctagcacccacctgatggaatattaggccaccaaataggatgggtacacagtataaaatgacatgggaaaatgctcatgctataatgtgaacaagccaggatacactgtgctctcaatttggatacctatgtgaactagggggagaaaagcaaaaggaaatacatcaaaatgctaaccacggttctccagttggtagaataacaggcaattttcattttcttcttaacatctttctatactgcctgacttctgtttagtga

SEQ ID NO: 62258 - DNA, 2306 bp, Homo sapiens
gttcaaaccccagctcagcccctcatcggtggcacctcaggcaaattgcttattagtgtcttcggctcccagttttctcccaagtcaaatagggatactgatggctcaagcgtgcaggctctgtgcagttgtacagctgctggcacggggccagggctcagtaaatgccaactctctttccctggtcaaagagtagctcatgtaagttcaaacatttactgtgtggggtgccaggcatacaggaaaaggaaaaagaaagaaaaaggaaagacagggccgtggccctcaggtaccactgactagctggaggacaagcaggcacacaaggatgatccaatcaggtggccactgtcctggaggcctgcacccgagcagcgggaacagcagcaggggcccgtgcctgccttggggcgggaaggaccactcacaaaggagatggcctgtgtgctaaggctgcacaggagcttcccagggagatgagcgatgggatgttgttccagtagagggattatgtaggagagtacccagaggatgggcatgcccagagaacacacgccccatcagcgggcaggaaggagggccctggcagcgttcgaaggcatctttaccctgaggagccccagacaacagcagcagagggatgagactgaatacctgagtgagacagaggttaaactggagctgtgggtgagtggcagcaggaagaaaggagagaggcaactgcagtgatggagacaggccggtggccccactgtggtgaaagggacaaaaaggggacacagatgtaagcttccaggcaggcggcagcactagaaatggtgacgacagggatacaggggaaggaggcaggagtccaggatggcttgagtttccagcctggggagctagagatgtgaggagcacaggcgggaacaggaggcaataatgaggaccctccctccaaaggcagaaatgcgaatgcaaagaacacttgctcagggtccagccaggaaaacagaaatccctctaaatatgtgtcacagagtgaatgtcatccaggggctggccacactggtgagagaaaagctgagaagccaaacagctgacagtgaggcagcccagagttatagcaagggcagaaagccaccctgcaggggagcaatgaagggagccggtggggtcagctgttggcacagaggacccaccggacaggagctgggcacagaggagacaaagccaccttcagaggcagtgcccgagatggggagagggaaaaccccttcagtccctcctgtcacccttcagtctcctgccagcacctcccgctggcctgcagggccaggccttgcaacaccaagtggtgcaggagaagggcaaggagaggctgtgagcaggcaggccaggcgggggcacagacctggagaagagacacgagacagggcaggcacacacggggacagctgtggctaagagagaagctgcctgagtctgggccacatgcgaagggccggcttacggggaagccagtgctggcagcagccccagcccagcctagggatgattcaagggccaaggatctggtccagggccaggactgtcccaagcaaaggcagaaacactgggctctcccagcccttatcactctgccctggcccctggcgtcagactccaggtgtggatggcatgaaatgcgccactcagactcccactgcaggaggtgactgcaggccccactgctgcccctctggtgcatcaccacgttcattcccagcagcagggcatgggtgcggcagcggcaggaatgcagcccatctgtggaggcaggtgccttggtcactgcccttggcttgagggctccccactggccctgcccagacttcctcaggactgcatggtggtcactgcacagggtctgggactctcctccccatcctcctcccttcctggggctggaacttctctgtcccttgtcctccacaggggcttccccccgccgaagtctctggtttgtctcattccagcctgacattgcttcttgagagcctgagctaacacaccagtcacccaagcacacctggattatgactcagcccactggtaggcctgtgtccggggaagacagtgcagagcagtgaacacaatgttaggcctgcaggacgggtctgtctctgctggttcgcagggggctgaatgagcccaactcggcctcagtcacaaacagcaggccatgactggggacagcctctgagatgtggcctgctgtcttcaggaatcagtctctgaagtcacatacacaaagcaacccctcaccctgaccgcaggtttaa

SEQ ID NO: 62259 - DNA, 600 bp, Homo sapiens
gatttttgcaaatgcagctgattctttgagttcatcaagaagttccaaataacccttttatgcacaaaaattccagatgtgaatgtaagtaacaaagaatacagaatggtttaaaacagctttcccaacaccatcctgcttccaggctgaaggaataaaatgggctgcagatgagggcaccccaaaggagctaacagcgctgtgcccactgcatgcacagcaggggaagaggaccatgtgtctcacttgctttgttgttcataacggaaactggggtcagctatttacatgctgtcactaatcaatagccctggtatggctccaagcgggaatctggagcagcaggatggaaaggaagaggtgagagaaaggcctccctctactcagctgaaatccaaaacttctgcccatcacacgaagcttataagcaacactcatgggaaaatccctgaagccatttctcagaatatttttcttagataaaactataatgaactcatctcaaattaaatggaaaaaaagtccaggaaggggatgtctcaagtatgcagggatgggatggaaaggagaatggtgaccactggcagagacagaggagag

SEQ ID NO: 62260 - DNA, 1478 bp, Homo sapiens
accgcacacagccaatttttttgtagggacggggtttcaccatgttgcccaggctggtttcaaactcccgggctcaagcgatccttccaccttggcctcccaaagtgttgggattacaggtgtgagccactgcactggacctttatccatatttttaacaagcctgcttacctactttcattacacagaaatataaatggacaactgcaaggacagcagtaagcagaaagcgcgccagccaggtaagaagcagtcacagcaaagtccagtgacaggaagagctttgtggggagcaaacctcagtcctcctgaggtcttgtcccatccctgcacagctcaggaggatgagcctacatcacccagaaaacatgagaggcttttcggcatcctctgcctatggaagtagggaagtaggcaagacctgttaaaagttctagtttaaaaggaaacaagtttaagtccatgaagggctaagtttcagtcagctgaataattgtttggggcaacctcttgattcacaaaaagatcctgtatactgcataaacaacgggtgaccaccaatttccactccatgcattacaaactaataaaatcaaacttctgatcaaaacccgagtgcgatgagaacaaacaggaaaaaatgagactccaagtagtttcaaatgaatttaactcttgtgttcttaatactttctaaaagcatgctttttctctcagttcttctagaactggggatattgtgtaatgaaaactggcttgctgcaactacttttttctcttaaaatattgacttttcttggccaaccaggaagggagggagctgccaggcagcaccggtgcctacaagttgcctaatggcaaatgggaacattttgtgctgtgcacccacctgtttaggccttgacagtagccgatatctggattccgccaggagaaggcgaggaggacattgcgtaacttctgtatgccttctgaggtggggcaggagtaatgtttgttgttgggcagagttcgcagcaagtccagctcaatctgcttggaggctgggttctgtttctccagcgccttctgcagcaaggtctggaagtggccaggctcagtgttgtccttgaacttcctggtgtgacggtccacacaccacttccacaccttggaacggtgctcgtggggaatgcccgcacggatgaggttttttaactctggagagcacatcatctccctgttcactgtacttgcaaaatagttttcccacttgaccccagtggagacttcctggttttctgtgaggtagagagtcttcagatccaacgcgcggaccttggcaaccaatttctcttcctcatcatcctcaggtacagtcctgaacccataaatatcatattcactgttgataaaaacaaaaggaaaaattaaaatgacaaagttttagcaacaaagaccaatgcaacagaaatagagagtctagaaaccaaatcagg

SEQ ID NO: 62261 - DNA, 2348 bp, Homo sapiens
cacaccaaccctattgggttcacagaggaggcatttacctcaccatctccataaatacaaaactgaacagcataaatcaaaacccaaataatcttaatttaggtgaccttataattatgtacttactttgttttcttcaaaatctattaaaaatgcttatgaacaaaggtacacaaagaaagcaataccttatgttctttttttaactagagaaactgaacacattttctgtagcttctcattcttacttatccagtttatgtgaaaaactcacatctcacggcatttatctgtcttcatcagagataataaaatgagactaactatacagctctatgtattatatgtattttaaatatattttgttatcagtaaccacatctctccaagcctgggagttgaaccgctttgtaaagcatgcttatttttaatggtttcctaaccttacctcccaccaggtaatagaatccacctatcctgacccacctttgccatcagatccctctctctcctttctgcatttcttcgtagagctgagagttccaaaatctccttatttagaaatttgttttgggttttgtacccctgtagattatcctgttagaaaaaaaaaaaatccctgaattcacattggttgaatattgactaattaattaccctatgtagtcagtagcttgctgcttcaccaatcaaatagccctgctaagttagagtaagttctaaagaactagaagttgttaaaaggcacttcctaattaatctttttggccatttacagtagtagaaggcaggcaggcatgactgccgtaacggagatggagaagatatttttatttaattgtggtagtttttctcaactgatgacaggagaaataaatatgacatattcctaaatctatgcaaatattttatctatccatattccatattcattgaggtggttaaaaaaaagcaataccttacttttttttaaactagagaaactgaacatattttctgaaggttctcatcttcacttatccagtttacgtaaaaaaagtctacatacatatacagcccataactaaaaatcactcttaataacaaatcctatgacctaaaacgtataaggcacgtaagagaacatattcttcaacactgaaaaatttcaaacttacagaaaagttgaaagaaaagtacaatgaacacaatatagccttcacctaaattagccaattgttaacctttgcctatttgctttctgtctataaaagaacataacaagctggtgacaagttctgccgagtccaactttgagagcaggtcggggcaggacacatgtcatattggcttcagcccttgaaactccaagcaagaaagctgaaaggatccaacagcaacaaaaagcaaaccaaaaagggggtgaagtgttttcatgtaaaacactgaaaatgaagctcagaaaacttccttagactttcctaataataaaaacaatgaactgaagaagctgctaaggatactaaaccgaatcacctctgagcagtgacttctaaatgttctttacaaatttagtcttttataaatgtgtctcttctcccccagcttctgtttctcttttataatctgacaggctggtgtgtgaggttcctaatctcccagtcacagaagaaattatgttcaagacagctcaaacggcaggccagggtagtcaagacagactctggtgatatcacaagcaggagactgctgccgctccccagagatgcggctacagaaactccccatcgccaaacaagaaaccaccacgggattataccacttcccccataaaatgcagaagaactgaaaatggttcaatgttccctttaatcactaacatttacggagcacttgcgatgggttacaggtgccccgtgctaggcatgtgagattcctaatcttgtttaaaactccaactcttaggcagccattctcaccatctttatttttgaggtgaagaattgagccatagaaagctgcccagttactgtctagcctgcaaatcagacttctgagagccagaccagtgggctcttagctccatggtctcaggcccgactcccactagaacttcgataggcatcatactcagcctgagcacattcaagtacttgtcacgtcatgacaagtacttgaaatgttgaatgttggacttccttttctcacctgaatctcctttctactggtgtcttaaaagcttttttttttttaaagaaacaaggttggctgggaatggtgactcatgcctgtaatcccagcactttgggaggccaaggcaagaggatcacttgaggccaggagtttgagaccagcctggctaacatggc

SEQ ID NO: 62262 - DNA, 1976 bp, Homo sapiens
aagaggggaggtgcagcaaaggacaaggtactcaaagttcaggacacctgccataggcaggttcaaaagcttcaaagtataggtttaatgtctatcttctccaagaaacaaactccaagttgtctccatttctctagcatctagctcagtgtcaggcacatagtaggtcagtatttactgaatacatatatgaaggaataagtgaatgaatgaataatcagaaaatgatacaggagaacttggtcttaaaggggaagcaggcagtggccagaggaaaagagattccagggagagagagaagtgtctacaaaagaacaaaggtcagagagcaggagtgaggtgaggtcagtgagtggcaaggacctggccctgaagggacttgtgtgccttcctaaagagatggaatggggaacttagcagggcactgacattattagacaaaggtactgctggtgaaaatggtggtgagggaaaggcaggtgcacagtttgcataggaggagattagttcaggccagaggccgtgagcccacttgggagatccatgaattgcagcctggagtttgggaggcaggctggttgcagtgcagacacaggagctcagcctggccctggggcggggcaaagagcacacaagcatttccacaggaagggagagaagagtcactaggcaagtcaggaactgagagacacaaccagagccaaattcagagcccaaagcccacccagtcctcctctttttttttttttttttttttttttttttttgcagatgaggggacagaggcccagaaagggaagtgacttgtctaggtcatacagggagtcaatactgtgagcccagtctgccaaacccccaacccttagaggcaagtgtgtgtttgggtgggggaatgtgcgtgtgtggtcctcccaccagctccctgactacctggcccctccatccccatgccacaggtgagctaagcaccctgggagccttctgctccagccagggaggtgcccagacacttcctcttgttcagcctgcatatgcagctgtgtttctatttatgctcgggagccacaggctgctagagaagctggcacatactcactagggcatatctgaaccaacctctccagctgcctctgacaatgcaggcaccatgaaaaatctgctttttacaagaaatccttttcactttaaatctttgagtattaaatgtaactgggaaacaatcagtaacctctgagtcatctctcactaaattcctgaggcaaaacttttagatcacatgctttcaatgactgatattttatcatattgtagaaatttggtcaataagatgggcaaaatctggttaacaagtcagttaatcaagacactgattaactgggtttgtttcctttcaaaaaaaaaacctaaacaggctgctatggcggctcacacctgtaatctcagcactttgggaggccgaggcaggcggatcacctgaggtcaggagttcgagaccagcctagccaacatggtgaaaccccgtctctactaaaagtatttttaaaaattagccaggcgtggtggtgggtgcccgtaatcccagctacttgggaggctgaggcaggagaactgcttgaacccaggaaacggaggttgcagtgagccgacacggtgccactgcactccagcctgggcgacagtgagactctgtctcaaagaaaaaaaaaaatctagagatcactagaagacttttgacttcaatccccaattagctagtaaaaggctgggggccagactgtctgaaatggctctggggcatgtgctttgacagaaaagccccaaagggccttttctgaagacagctgaaacccaaagacagaaacacacacaggttctaagactgagcaccactaaaagtacaacacagcaaaatcagcagaaatccaaaaagcctctgcgttttttatctggtatcttttagcaaaggactaaatgga

SEQ ID NO: 62263 - DNA, 2390 bp, Homo sapiens
tgcactaacacctccctaacaaattcccactcactcaagacccagttcaaacatctcatctgtaaggccagccaacatcccttatacaaccaaacgatcattcctccaacacgctctatgtgacgcacaccatctcaatcacccacttagggttatgaactctgggttccttcccaaagggtcaggtcctaccatgtttattagccaaaagaacaacataaccaacaatcacgaaggagccacaggaaggaaaatatatatacagaataggtcaagtctgcataccttctagaaagcaatttaaattacatggataattttgggtatccatttctgaaaagaatgcgatggctgctcataatgaaggaatttttgtttcttaaactcaaggaagatatttggatctctaagaaatgtctaaagtaatttcttccataagcaataaaaagcacaagaatattgtaagcagcctggtaatacaaaacaaaattcaaatggaaaacagactctaaccccgaatctgataaataactctaggttccaaattttttcctgagtgtttcaaaatcatgagcctggaaacaatctcaagggatctggcccagcaccaatggaaaaaaaaaatgtatttttttccccaggaaggttttgaaatcttctgtttcagcccagcaacagagactaagaaggcaaatactggatctcctggctccttggaaaatggaatacaaggtcacaaacctccattcctctactgaacataacaaattctcctttcgtatcttttaaaattgctatcttaaaattagcattcatatgtcttacaaaataattgtatcttattaaaatagttctaatctagcccctttcaaaggctgagcacacacctagaacccataatcaatttcccggaagagtctgtgttgaggtgggcagtcattccctgggaagatgccacattcatcatccattctggtaggtggtggtctgaggagttctgccatctctaacactcaagcaccccttttaaaaagcaaacaccttgagagaaaagccatttcttaaacccatattcagcaaatacatttttaagcaaataccatttaacagagattagcaactaagggtaatggactagaagaatagggcctacaactagaacaaagaagagcaaatgtgagttcactggaaagtgggcaatgaaaacaactgggcttgtgagggatctggccacatcaaagcctctcacagcccaggccacccagctgggctgagccacagatttcatcaagacaagggcaaggacaaggccactctccggacatgctcgtccctacaggaaatgtagaagcctgtcaaaatactttctgtttcagagagaaagggagcacgaggcctccaagtgaccacagggctacattcctatggttccctctcagctctgccattgcacaatgtgagagagccaaggatgagctcaggataaataacaactcctgcagccacagcctgtagcctattggatggtcttgctccacctctgcccacattggcttccacacactatgcaataccacattattctgcttgatgtttttcaactaaaactagggcaaaagaatgactgacttaacatgaagttttaggaaacggagttgggacaggttcccaggctccacccaccagagatttgggaggcagtggagccaggtaccaggaacccgcctagtctttcagtgaatttacaggaatgtttgggaaccacggtgatttctaacagtgttttaaggtggagttggtgtctcaggagtatcagatggtcgtcctatatcattgttacccacttctctctggtgaaaagctgagggatctgaaagtacttaccagctctttggtggtggtgatcattgcaattcaccctcccagaaataccgaaagatgccaagtgaacactgttccctcctggagcctccctctgaatgctcaggaaggaaccctagcacgtagggtctgccagccaccatgatcagcaaaggggacagaaaccttggggccaatggagaattgggccaaaagccactcctctgcagcatagaaactcagaatgcaaagaagatatgcagctataaaccacagagagtcaacccgaggatggagggctcacacttcactggtcttcacccaagcagtttagttatttctagtccacttagaaagccaccatcatacagggtcagtcttttcttcacagccaaagagaacattcatcatcgggaggagagcagtgtttcacagggaagccacagagatctgcagcagaagggctgggatgctggaaagaaaggcagattcctgaggcccactctggcctgccaactaaagcagaatct

SEQ ID NO: 62264 - DNA, 2715 bp, Homo sapiens
ctgcaagctcttcctcccgggttcacgccattctcctgcctcagcctcccgaataactgggactacaggcacccgccaccatgcctggctaattttttgtatatttaatagacatggggtgtcaccgtgttagccaggatggtctcgagctcctgacctcgtgatccacccgtctcggcctcccaaagtgctgggattacaggagattcagattattttaatgaaaaaaactgatagagttctacagtcatctgggaaaaatgtgaaacacgatgctctattttctttaacaaacatcccacaggaaattcgtccgacacagggacagcccgtatgtacactgaggaagagcctctgcctttggcaaaggtctcccactagggtcattaccaagtttatacaggcactctctaagtaagcctgtgtaggactgcaacccgagttggttttctttggggaaacaggctgtctgcacccacttacagacaggacaggggagcccaagagaacatgggaatcagatcctgcttgaactggcaaaagctgagtcagcaaagctctaagaacatctccagggagcagctccagctgttagcagctctgggggtctgaggaacagtcctcagctcacaaggccaggagtttgcctagtctgctctccgtgtggccagctttgagagcactttcatacatcccagcccaaccctgttgctctggagaaagcccaacctggaatacggaagaggagtgagagtgagggtggagactcacagaaaccaggcagggagcaaagcctggaaaaaggatacccagctccaggcctgggcccagatccctccagatgctcaaagcaggtgggcccctaggaggtgacagtctagtcccccagaactcccaaggacaggggaggcctttcagcaccaggactcctgactctactctcctgcttctacactgtatctctcattttgtctgtccactggaggattaagggagcctcaaaggagcaaggcataactggctgaaaagaccccctcccacccatcctggacaaagcaaggaggaagaacacaggatctgccacctactggctgtgtgaccttagctggagcatccccgtccactctggaggaaaatgtagtggactgtctctaagggccctgccatctgactctttctgtctacagtgctaaatgcactctggctcacgcctggcatcccagcactttgggaagctggatggggaggatggtttcggcccaggagttcgagactagcctgggcaacatagtgagacccccgtttctttaaaaaaaaaaaaaaatttaattagccaggcgtggtggcccgcacctgtggtcccagctacttgggaggctgaggtgggaggatctcttgagcccaggcatggaggctgcagtgagccgagatcgcacccctgcactccagcctggacaacagaacaagatcctgtctcaaaaagaataaataaacaaataaataaaagcactgacatttactgagcagtttaaagtataattcatttaatcccaacaccccatgaggtagatactactgttatcccattttacagaggaggccgctgcagcccagagcggttcactgaggtaccaaggccataggcaaagttctaaaggaggccccaggggtagaagcctacgctcacggatgcctgggaaggctgcacaggacatccacgggatggtgggggtcgggagacaccagagactggcccgaggttaggcgcagagggagataatgggtcaaggtgtctgagaaaggagacggggcttggtagccccagcgagactggcctaagcccagatagtggggaggagataggaacgagggcgggatgtggagaagcagggaaaggcaggccgacgtgggcaggggcgaggaggccttggaggaaggagggtggatggcgcaagccagtggcggaggcaggggacgccggcggaagcgcgcgggcggctttggggcgagcggtcccaccttgagcaccgtgacggctcccgcgctgtgcacctggaagtgcgcgggcggctccgtgcccggctccgccgcctcgtcggggccctggtagctgaagcaggcgtccgcgatgtccaagtggccgaggggcagcgcgtcctgcggactcttgaaatagtaaaggtagcagcggcgcgcgtcgaacacgaaccagcggctgcggtagccacgcagggggcccttgcccgacagcttctgcagatagccacacagccgcgctggctcccgcgccggacccgccccgggctccgcggccgccccctgcgccgcgccctcgccgccgccgccgccctcctccgcccgggctccggcccccggcatcgctaccgcgcgccaaccgtaggcgcccgcgccctgcgcctccgcgccgcggccgctgcgccccctaccccctccgcaccgccccttcgctccgcacggcccgcgggcgcgcaaagcaccctgggacttgtagtctcgcccccgcccgcccgccggccgttgccccctcagcccccggaggcagggtcctgcgaccagcaccccgcgggtcagttgccttcgtgccacctgggctccaagtcctcgccctgccggatgaagcaatggtctatttctttatggcagtgtaggtacatgggagtgtgcatctctcaaaacccagcggagtgtccgctt

SEQ ID NO: 62265 - DNA, 1166 bp, Homo sapiens
cgcgccgagctcacctggtagttgtctagctgctcttcggtgaagatggtctgcttgttccccatggtggccgccgcgccgccgctcgcccgcccgggctccgactcccatcagcggccgccagacccggagccagcgccccgtgcccgcggccctcggcagccccgcggctggcagcggcccacggtggccggacccttcccgccccgcagctcgcctggaggaggcgcgcgggggtctcggaggcggggacgggaacccggagcggcagcgactccgccgccggcgggaagagggcggggcacccggctccgcggctgcagcgcgcccgggtcccggcaggaggcgacctggccccgggagacgctgcccggcacgaacccttggctcccgcggccggaagtgctgggggcgcgcgggggtctcggaggcggggacaaagacccggagcggcggcgactccgccccgcagcaggaagaggtgtgagcccgggtcccgccgtgggagtccaggtcgcacggcgtgagggtgcggggcctgggaaaaaaccctctcgaggcgggcagtggggcgagtggcgccccttgacctggggcgggggcggcagcgaggactgtgagtgcgtggatctagctggggccgggctccgccaccgtctcgcgtcgcgaccttggtcaagcccttacccgggccctgtccctctggggagaaggagggggtcagtcaagctgacatctgaggccctcccggccaggcctcgggaagcccatctggcctttgggcgcggcctaggcagggcatctcagaccttctgtgttccttagggagcaggacaggatttacttggcttggttacaaacgtgagacttgagaggatttaaaggacttgactgtgtccacagaagtgtgacaaaggccaagacattttttggagcttttaagcagatgccattgtaagggaagcaggactttacctctgccctcctagggtctttggctgggcttgagaattaatttggcataagacagattaaggggagaaaaacagatttaatacaagttttacatgacgtggaagccctcataaggaaatgaagaccctgagaactggcaaaatctaaatacttttttttttttttgagatggagtctccctctgtcgccca

SEQ ID NO: 62266 - DNA, 1831 bp, Homo sapiens
agttgcctgggattgaggacaggagcgggattgactataaacggacacaaggaacattttcatatgctcaaaaactggattgtggtgatggttgtgcaactgtttacatttactaaaaatcatcaaactgtacacttacagtgagtaaatgttactatatatacattatacctcaataaagctggtaaaaaataaaattcggccagtcgcagtggctcactttgtgagcctggggcaagcagatcgcttgaactctggagttccagaccagcctgagcaacatagcgaggccccatctctacggagaaaaaaaaaaaaaaaaaaaaagaaaaagaaaagaaaaaacaaagttgggctgggcttagtaattacttgatcccaggaggtcgaggctttgtagtgaacctgttcgcgctactgcactccagcctgggcgacagagtgagacccggtctcaaaaaaaaaaaaaaaatcaaaatttgtggaataagaaaattatgtgtctttctccacgggattgtaaattctatgaggagcgctatatccccaagatcctagaacattaatcagcacctagtaggtgtggaacaaacgtcttaccttaacagcgagtcaatgaaccagggaggggaggaagaagctttcccggagatgccggcccctcagtttccgggttcgcctggcgctcagccaggccagtcacagagagacgagcccggcgattcgccagcggaatgtccaggggcggggcagcgagcgagcgcgaagcaatcctgaggcggtctagggggcggggcgttcagggggcgtggccgtgcaggggcgggctccgagcgtggggtgggcgcttgcgcactgccgctgcggctgttgctgcggagccaggaggggaagcgatggctgggcccgcgtggatctctaaggtgagcgctggcaggccggcgtgtggcaggcaggcaggccgcgagggctggcaggagagccggtcgcgtgccgggtgtgggcgggcgcgtgggccagacagggaggcggtggctgcccgcggggacagcttgggagccggtcctggtcgcccgtgccccgcgctccgtggccggctcgcagtgtatgggccgccccgggccgggtcagcagcgcagaggcggggacggcgtcaaggtcaaggcgggggggcgccggccctgctcctgccgagacccggctgccgtcacccgcatccgcccaggccagagcccaggcttcgcgccgagcccgggaaggtcacgggagcctctgtcccggctccgccatccgggccgcttccccggctgcggccctgctgcgggactgatcccctcagcactgcccacacctctcatccgctgtctgcgcggcccttggccggggaaccgcaggtgccacgggcactggcgttgagcttgggaggttttcccaggtgagagaatccgggggcccttttccctatcagattgttttccctttggcgctcttcccagtcagacctctagtgctcttgtagctatttccccttcataggatagggcatcttacacctcggaattaccgtctgaaccttcggagagagagaccagcagagccttccttttacctttcattggtgggaatcctgcaatctggagcgctttagctctccttgacagctcagatgccagagctggaaagggtttcagatcatctatgcagttccgtagcttctcagtggaactaacctgtgcctgaagaagaatttgctcaaggtcacacaggaggtcggtgtcagagcagggagaggaacctaggtgtcttggttcccatttcccaaggtcacata

SEQ ID NO: 62267 - DNA, 732 bp, Homo sapiens
aatctttcagaaagggtgagggcaggggtggtttaagacatatccccctagaatccactaggaagaacatatttggagcaggcaccctggagcccttgactgactgaagcccccagcccaagaccccaaaggaagtgtgtttgctgagaggcctcaacccccaaggctcatctcagctccaccttggctcctgcctgggtgggtggggcagcccagccagctcacttcttacccagttggcagtgctcatagtgtccaactctgtcatgccaaatcccacagcctgctgtatacaaataaatgtgtcagacatcaagttccactccaaagccctaaaggagttggcaagcagcctggccgtacccaagacaaagttctctgggcaccagaacatctggcttctagcccaggctctgtttcagttttgtgaccttgggcaagtccctggttcattctgggactctgtttcctcagatatcacagataaagggccttctcattttctatctgtgactggtcatctagggctctgggctggaattctgctgcatcaggtagggacaaggctgcaaagttgggtgctgccaggccccccaggcccaaggatgcaaaagaaaaccagacaggaataatcacagtactagcttgtaactaacacataaccagcactgcgtctcagacaatgttttatgcaccttacacatgcaatcttcgtaacagcccaatgaggta

SEQ ID NO: 62268 - DNA, 892 bp, Homo sapiens
ttccaatacaggaacagcctagagtggctactgagcataactggcgggaggcgaatccatccagggcaccaatcaagggaactgtgttcatggaacacctaagcagctcttctatcatcaacccaaaaaggggtgtgccagagaaatgccaggctatctgcaccctctagcagttaccacccattctggcagagcaggttctgctggggaatgttgtgcagccatttataagtaaatgtgaagttcaaaagaatcctgaaatgtcctctgctgctccacattagtcagcctatgacatcattaatttctgtcatctcagatgatgtttactgaggctgatggacaagattatgctgttctacagtacttaaaacaaaaaaaattgatgtttcttaaaagtttcatatgtatcacataccaagaatcacaccctttaatcaaaattagtagagatgaccatgatacagatctataaggaccccatgctttacattctaggtttccgtaaggcagtgaatgaatcagttcagaatatggcaaataaagaacctctggaaaatgcaaaatacaggtcaacgccaaaccagcagttttgaaatccaaaaagctctggaaactacaagctttttctacaggtttactaccaaaattcatttggcagcaaaatctaacctgaattgacataaggctatttatagcctttatttatctcccttagtgtaaacattcatgtttacttgcagaggtattagtctttcattacagtgctgtttccagccccactgagggtattatgtgaaatacagttcatgcacacattatcacccctctcaaatccaaaaaattctgagctgtaaaacacattctatccctaaagattttggaaaagaaa

SEQ ID NO: 62269 - DNA, 1641 bp, Homo sapiens
aatggggttacttcccaataaacctatgtaaagttgaaaaattgtaagtcaaaccacggtaagtcagtcagggtccttcactatccaagatttcagacatccactggaacgtacaccccgcagataaggggggaactactatttttttattatcagttccacttttctagtaagaaaagggaggcttagaagcggttaaggaagcttccccaagggacactaaaaggtggatacaagctatagtataggctaccaagatacactacctcttacttcagggtcttatgaaggtcagagctaagagactttagaccttagccctctcttgccatcttctctctttgggaaacttttccctaaatttcctaggcagaattcatcactgactcagtgtttccaaggaacactacagatgcctctatgaaactactcaggcaagtcaacagcccacagtattgcacggtacttggcgtaaagcgaacccagcctctgtctgtacccgtccagtgatgtctgtatctgtccagcacgctacctaagacagcgtggcccactactggaaaacttcggttaatacagccctcccagctacggataaatgatctcctccgcagagaaaccagccctaatctcgatactgcccagaacattctcaggacgcaaaaggaggccacccacgggcctcccccactcccctcaggccccgtacaccgaggaacagccagggcaaatggagccatggaagccaccctcaggccccagggcctggagcatccctgaacggacctgcttacaggcagcctcgggcccaacctcgctcactcgccctctggcctggactgtcaacggccctaatgaccccaatccccaacggccctgcgctccaactcaccactgcactgccaggctgcacgtcggaagccgggctccgcgcgactgcgacgcgcaaagatgagctatcgaaggggcggggcatcgcgccggccccgccctcacggctcggagcactccgcagcgcccgttgccgtcgctatggcgggcgcggggcagacgccgacgagggtgggcggagagaggagggaggaagccaggtcctgcttccagaggagtggtagttggaaatttgcttccggaagcgcagacgtttagcttccggcaactgcaggtttagaggtttgtgttgcaatttcattttgtacttttgagattggactaaagctaataacttctgttgctgaaataaattcagtgaaatcgagctttgtctttcaaactgctagtcatgacccattaacgtgacagatatcagtttaataggttgtcaactgactttttttttttttttttttgagggccaggcagagtagctcacgtctgtaatcccaggactttgggagccgaggtgagaggcttgcttgagctctgggtttccagaccagcctgggcaacatagcgagagacctcgtgtctactaaaaataaaaacaattagcacatgcctgtagttccagttacttgggaggctgaggcaggaggatcgcttaagccctggaggttgaggctacattgagccgtgatgacgccactgcactccagcctggggaacagaactagaccccgtctcaaaaaaaaaaaaagagat

SEQ ID NO: 62270 - DNA, 1412 bp, Homo sapiens
tttggagaggaagaaatcttgggaagaaggacacctgggttttggtcttttgtcagggaaggaatccagtgtttcaccttgggcaagtccctgcccttggggggacttcaacttcctcctttgtgaaatattgagacataggtgggtgatgtgggctaggctgaagatctgtgggctttttcagcccccggattcattttattcatgtctgcatgctgagggtttactgagcccctactattgtcagcccttgtgctgggcaatgggacacagccaagaacaaggcggacacagccaagaacaaggaggacaccatctttacccacgagggccaaggctacctcccaggtcccactatgctctcattttcagagccactgagaaggcctggtgtgggcaccttatgcgggttctcagggaatgagcactcaactcggtgccaggccagcaccaggtgctgaggctgcacagggccctgcccttgagggcacacagtccggtggtgaggggggtacagagttgtatgggaatgtggaggagagaaccacacctccatttggatgggtcaggaaagacttcacagaacagagccctgtaatgggtggttttccagtataagagggagagggtgttccaggcagacgtaacagcagacacagggcctggaggtgttccctgcacgggaggagctggagactggtaaatagagaggcaggcagaaaaccctgaatggcccatgctgtggaatttggactttatcctgcagactatgaggatagagatatttaagaaagggtgtcaggtgaccctatttactctggaggacggtcactctggctgaagtgtggaggatgggttggctgaggcaggaatagaggcagggcagctggtgcccacacaggagaaaccagaggaccacggggatcagtggtggcagccgggatgggaggagggatcatgtgaggtggaaggccagggcttggttgtgggttggatatgggccaggggagtctaagaggcctccaggatgctggctagagcacagggaggttggtggggttggtcgctgaggtagggaagaggaagtggagcagggcggggcagaggcctggagatgacgcatatgtttgcaacaggggatctcaggaggagaggccctgcaggcacctggctacctgggcctgaagaggagcaggggagatgagttttgtgggagttgacagcggccaggtgagaagggaacacaggcataaaggactgagtgcagggaggccatttgaatgagaaaacagaggactgaggcagaactccaagggccaccaccactttaaaaatctgttttcttggctgggtgcagtggctcatgcctgtaatcgcagcactttgggaggccaaggcgggctgatctcttg

SEQ ID NO: 62271 - DNA, 676 bp, Homo sapiens
gccctcgagctgtcacttacttgccacaagcagggccctgaaaagcctgtttttttctgctctgacttcaaacacagattctccaagcaagaaaggctagcttgtgagaccaagtttcacagagatggagcttgcagggaaaggtcagaggaattgtccccgggttcctcagaggaggcagacgagttcggagtagttagcaataaacatatcagccccggcccctagagggcactggccagagggagcctcaagggagcaagcagggctggggcatggaagccagccagagtccagcctagctttgggccgggcccagaaaccagttctgttaaacaaagcattacacaaccatctcattaactgcatcaatccagaaggtcaaactaactcactccagcgtctgcggggctctgttggggtgggtgggagaggacagcctcctgaattccaggcacttgggtccacgttggtttaattagctccatgatgtccgcttcccttgggcacagccttgcatgccagggccctgacagctgcctggtgcccctagaggagccagaaaaagaggggggtgcctagggcaggagtgaacccctcacccaggccagccagggcaggaagtctggggttggcagagcagtgatacaaagaccaaggctggagataccatgtt

SEQ ID NO: 62272 - DNA, 2379 bp, Homo sapiens
atctcctgggcccaagtgatcctcccacctcagcctcctgagtagctgagactacaggtgcatgccaccacactcagctaatttttaaattttttttgtagagatagggtctcactacgttgctgtgtttggtcttgaacttttcagctcaagccatcctcccactttggcctcctaaagtgctggaattacaggcatgagctactgtgcccatcaagtgcccagtacatttaaaagctgggcggaggaagaggtctgcagaggagcctgagatcaagcacccttaggagaagaaacaaaagtagagtctgaagtcacagaagctgatggaagagtatttttcaacaatgggagagaaccagtcaagattgagatatgtgagattagaaagtggagttatagctggccttggctaaaggcatttctgggagtggaagccagactggaagaggataagaagtgggtgggggagagccgagtatgagcgactctttctggtaagttgctgcgacaggagataatgctgggtaggtggagaacacagggaccggaggagctgaggcggaaggatggagaggcttaagcatgtgttaactgccactgggaagaagtcggcaatcacggaagctaccggagggtaagaaaaaattcattcattcaacagttgagcgcctcccacgcgcccgatcagtatggccgcccccacttgaaaacacgcgtgtgggccgcccacgtctgacaagttaatgcaaggctttatagttaggggaaagcggttctccttgagctctttctcctagcagttccgattccgaccctgactccaacagacaccttgcgggaacgcaaacaccgctcgaattcatgaccccaatagaaaacttaaggccgcaactaagtaacggatcgctgcgaaggccaaactagccacgccaacgcccccactggagcctccccagcgctccgcccccgctcgcgagaacagcggcgacggcgcgagaaatcgctttctggttagctccgccccttccctttctttgttttcctgtccgacgatctcgcgggagttaggcgacaaatcccgcgagcgcagacccggggctggctctgctgctctcgcgatatttgcgcgagcctgcttccttctttcctcccttgccagtccgcctgtcttcctccccgtcttccctgcccggcctcccccttcttcccccgctggccccctccccggagggataatatggtctccggcgatggacgccccaaaagcaggtcagtttcgggcctccgagctgggtctggcagttggaaacgcgcgctgcctaggcgccgaattccttgcttttctcgcctggagtcgctcggcaggcgcccaggccctcggggctcgggttgtgctcccctcggggcctgcctgctgggccgccctttgagcctaggccgcggaagctggggctcccgatccccaccctcctgcgcgacacccgcagggcgggccaccccaccgctggccttgacccgcacccctctctctccggtggccgctgcctgctgccagcggcttcctggcccccgtcagcaacaccaggggcagggagaggcccaccgtcttctcctgcccgccccccattggcgagcgatgaaggcgggggcctgcgtctccgtgttcgggtctcacgcagctagatgttgattccacggtccagcctaaggcccctcagtctctctgtgcctctggaagccgaatgaggggcagtcaaggttgaacattggtcagtcagttctccgaccatttattgcaccgctgtctcctcccccgtccacctccctctacaaaaaaaaaaaaagagaaaaaaatactattcattctgaaaatgggctgtgcttatgttttctccttttggatgaaagccttaacaatgttgagggtcctggccacccaccgctatgagtctgcacaaaagatctgaaggttcttttcaacctcagggctgcctccccgccactgccccctagaatgttgggagctgaggcacgtttaaatgagacctctggatctttgacttagtagttcagcttcagttcgtgcaaaaccagaagacttgtctctttcgggtagaatatgctaatttcctagagattctgttacttttattttcagtactaagccctggtaaggacttaactgagaagtttttttgttttggtttattgaatgctctgtaaaaatccgtcttttagtttttttttttaatcagtccctctaatgttaattgtggaattcacaaattcctgtctctgcagttttcaagacatgtctttccaaaacgtccccgtggattatttaaatcattcttattgtccctttccaggtattct

SEQ ID NO: 62273 - DNA, 1245 bp, Homo sapiens
gggattgcgagtctctctggggccacgctttctaagcgtatcacttccaggatacgtgcctccaacagaaggaatgaaggctaggaaacaaaaacgtggatgcgggtgaggagctgtcagtgttaccgccacgacaacgtggaccctgcgaaactcggaggtgccactcaagagccgaaagcctgcccactcggggtggggcggcaacccggagagccaatcaggaataaggagtccggttcatgaaaaggtagccggattctgactgggatactcactgtgagaaggctgggcggagttgcagaaagtcaacagaagccgaatctctgaatttctgttcgcagcctcctaggcggggccgggaaaaaaatccagtagtctgcgctgactgggcggcgagggaccgggaggagccaatcagaagtcaggactcgcggggcttggaggaggggcgcgggcgctgcggcccctgctctacctcctagcgccggtgcgcggccgaggccgcactacctgtctgcgggaaagcgggatccaccccaggacgtcgggtcgctgccggtgagccaaggagggggaagcagagacgagccctgcgtccccgctgcgggagtcggggtcgcccccgagggcagggaggctcgctgcaagtgtggagccgggagtcctatgcctcaggctcctccagcccgcgctatcctcagctcgctgcgtgcgtgatgggcaagtcacccttcttcccggacctcacctgtaacctaggagggctgagctgggcccccagaatgaaagcgtggcacccgagaagctgtcgaggccagccctcccgggtctgtgtggggtcgctggccgagggctgtgccggcgcctggccggtgtctactgggagcagtctctgagctccgctgaacctcacttactcatgcgccctcctcctctcttttcctgcctcttggttcagcagcccctctgcagcccgctcacccaccactttttccccttcacccaccaggaagacccttaaaagcacctagtaatgcactgttgtctttgaaaaactgcagatgctagattccccacctttctgtttcatgatccccttggggttgaactgccccgtgagtctgtggaatgaaggtcacccttggttcaccatttaatattaaataagggactagcctaggggctgagaatacagagattgactgggtataatcccttggaaggacgcagcaaaagggaatg

SEQ ID NO: 62274 - DNA, 2136 bp, Homo sapiens
tcatcataatttttttttttttgagatggagtctcaggctggagtgaagtggcgcactctcggctcactgcaacctccgcctcccgagttcaagcgattctcgtgcctcagcctcccaagtagctgggattacaggcgtgcaccacacacccggctaatttttgttaattttagtagagacggtttcaccatgttggccaagctggtctcgaactcccgacctcaggtgatccacccgcctcgacctcccaaggtgctgggattacaggcatgagccacccggccttcctcatcataatgtgtatgtccaaaatgtatgcatcagcagtaaaagtgaaagccagaatgaaaaaggaaggtgatgagaggggtaaagtctcatgtggttggaaccattttgggaaacaggacaggaatgatagcaattaagaagccggtccacactatttgctatcctaggtctgaatagtgaagagaaaatgaaaggagagcgccaagggtaagagaaagaaattagctattccacctcctggttggctactgtcttcctgccctcttccccatggcacagcaactcctccacctgctgaggaccctagcctaagctgcagcgccccagagcctcagcacccccgcgacccagctcccacgaggggcacgggttctagctccgccccgcaagaaggacttccgcgtcctcggccgtcccgctccccccgccccaacccagcggttctgcgcatgcgcgggggccatattagcagcggttattcggtgagcggtggtggtttattcttccgtggagttaagggctccgtggacatctcaggtcttcagggtcttccatctggtgagcctttggccccttggggcccgcggaagcttggccgctttcccattgggcgggggtcgtgaacgtcaagacagtcggtcccggcctgcagttgccgccgaggagccgtgggcacgatgactctgcaccgcctcctctgtgacggaccgaccgccgggaatggcccccgccggccgccgtcgggggcttcccagtgccaagcctggacgccggggcccgcgagggggcgggctgagggtgggggtctgtgggcaggaccgagagttggggtggcttccgtcctcaggagttcggtacgtgaaagttagctctcccggaggtgccggtgaactcaaaatagtgctgtgcccggcgtcaggcgtggagacaacagaaagttgtgcttaaagctcgaatcagaaatccccggcgagtgtctctgtgtcctccctgcttctctgctctgtgccatccttactttgcaccattcctattgcaattacctcaaccagttcgctgccctcggtctctcaccagccagagtgatcatttaaaatgccaatcagttcctgtgggccttgggaatcattcagaggagccccattggctgagagataaaattctgtttttacctgggcacgcgggctctccaggatttgattccagcttacctttccagtcttgattccctatattccagtatttggaaatgtgggccttggactgaggctttaccaaataacgctgaacacctagtattgccttttgcacgaatggtactgatggtgcccaagataactgcctccacccccaagttcaggacccagatcactctctggagaaggcctcagcctcttgccttggctttcaaggctctgcgtgatttggatactcgcttagctcttatttatatatattttaaaagcatcagcagtttatctcatgcccactaaactatcctgcctccgtaccctttgttcatactttctgctctgtgtggaatgcccttctttcttcccctgttctttctcttagacccaagggttctcagccttatttctgcctctcccatctctgatttactttcattttctgtatcgatttctcaaaaaatactttcttgattctttcatcatcccttttcccaccctacccccggttcctctttccacattataatctatgactgcctctctcacctaactgccagtattagcttttcaggacaggaactggttttacacattttggtattccagcatctagcataatgcctgacacttagctgaataaagggagtaaat

SEQ ID NO: 62275 - DNA, 747 bp, Homo sapiens
tgaagtcataggtttgtttcgtgcaagtgtagtcgggctttgtgagatttcatagggcgtaagtgcagaaaatgatggcattagcatgatctgaaggtggagtatttggccctctgacatcaaaatggaccttttctcgggcattggcacaggtccagttgaagggtcagtgatctcaaccagtttgaactggacaggagctggcccaagttcctgaaaaacagctgaagcaaccatgaccatggcaacctatgactctgatctataaagcagccagtgatctataaagcagccagtgaaggttgaggttcagccttcagtggactaaggcctcagggttcatggataaaacaaaaacaaaacaaaaagcaagcggccaaaagcaagcagggtggcaggcagacctgatcaaattcaccccttggtttcagcagtgacagatgtagtggtgctggcaaatgccagcttgtcctcactctgccctgagtccagctcttctccccgactgctgaccatatgacctgcactgaccctaagtctaccataggcattttgtgcagatccacagatgtgggagctctgcaaggcacagctgcccagagacctctccagggccttgcccttggtggtcccaccagaagctggacatgtttcagcttctcagattgaccgagaagtggaccccttctctgactctccagctccctccccacacctctacttcccagcccctccacaatcatgtaa

SEQ ID NO: 62276 - DNA, 1397 bp, Homo sapiens
tggggttacaggcatgcgccaccacgcccgattgtacttttagtagagacgtggtttgcaccatgttggccaggatggtctcgatctattaacctcgtgatctgcccgtctcggtctcccaaaatgctgggattataggcgtgagccaccgcgcccggcctttgtttttttcttacaaagtagtttccctcattaactgggactgtttggctactgtgaaatcacttattctggaaaacagaataaatctttatttattatttttttttttagtagggagaggcttggaataatggtcccttcccacactgaggttctatcagtctatggaataaattttttcactttttagttttgagtgtgagcaaactctacggtattttcaattactcgctgagactgctttagctttctaatctctcgtgtaaacaccatggtatgtcttagttgaaccaccgtcatgccaaagaaaagaattccgaaaatctctaagtcacacgatgccgagaggccagccagctctgcagctgggctttcagttccaattgtttccagagagtgtgcaggacatttctccgcagccatcttttgcagtgggccacgagggtgctgagaacctctctggtccccgcgcttcaaggggtgggcgctctgccggcgggaatctttaggatgaactggaagcacccctacactcactcctattctccgggctggagtcggcatcgccttccttggcccgccttacctttaaggaaacggaaaggtgctgaccactagagggctgtttatacatttttattaaacaacagaagtttgtgcgcacagaatcagacatgaaacacaagttttaaaagtcatgaaaaactttaccaaaaaaaaaaaatatatatatatatatatatataaaatagaaaaatcatttaatacgaaatgtaattcttagaacaaatcaaaacaatcttattcctttgaaaagatctaggaacaacacttttctctaactgcccggctagctcagtcggtagagcatgggactcttaatcccagggtcgtgggttcgagccccacgttgggcgggtttgttttgctttcgtttgaccaacttcaggtctcatcaacggtagtaattccaccagtttcagttgtcatcaacggtaataacagacttcagcccggatggtcttattttcaaataattcaatacatacaaaactaccaatactattttaaaaaaggaacaatgggcctggcacggtggctcacacctgtaatcccaacactttgggaggccgaggagggtggatcacgagatcaggagtttgagaccagcctggccaatatggtgagaccaccccaccccctgtcccccaccccgtctctactaaaaatacaaa

SEQ ID NO: 62277 - DNA, 2517 bp, Homo sapiens
agaagcacaaacagggcaggtacggaatacagacgttgacatattcacactagcctttttcagaaagcagagctccattatctcaaaaagctaaagcgtgactagtgtttcccacgtcatcatcctcatttccgcaaggctgggctggagaagaggaggtagacctaggagccaacaaatggctatcaatcccaccaaataggctccgcagtggggttgctaaacaacgaagcttccagaagcggaccccagttcccaccctcttgctgatcctaaagcctttctatgcaaaaactagcggaatgctattgaatgtaggtttccgagccagccctattctctccgactacttcaacatcaacgggggcttatttgcccaagggacgtcgcaactgggcctttcccattctattatcactggtggctcaccacccccactctcccccatcgccagctccgccttaacctcccacgaaatcaaatccccgctttaccaacccgcagcagccgggggcatggagagagaagcgggggtggggtggggtagggtagccggcccctcccccacccggggggggggggggggcgcctccaccgactccgaactaccagtcccggcgtgccctggggcggcgcgggcgcaggggcgcgtgcgcggcgggctgtcgttggctggagcagcggctgcgcgggtcgcggtgctgtgaggtctgcgggcgctggcaaatccggcccaggatgtagagctggcagtgcctgacggcgcgtctgacgcggagttgggtggggtagagagtagggggcggtagtcgggggtggtgggagaaggaggaggcggcgaatcacttataaatggcgccgaagcaggacccgaagcctaaattccaggagggtgagtgtgcgcctttgggaaaaaggcacctaacggcgcaggagatagaggcgggctcgaggtgattgaggcttgagggccgggggcggcgcgggctgcgccctgagaaggcggcggtcagtgctttgtgcggggaaagcgcattgcggatggcaattccggtgcgtcattgtgagaaagcgctttgtgaagcgagagtgctgcgcaggcgttagagtgggagagagagcgtttggcgcgtggcacaccctcgtcaagtgtttgttattgttctgaggaagagggcgcggagagagcagcctattgtagggaggcgacgggagcgccatggcggcggttaggggaagtgatgtggcggcggggggggaggggcggtggctgtttcgggcggtcctgcggcgcgcccggccgcttgggcagctacgacgggtttttcggtgcttcctggagccccggggtggttgcgttcggtggcaactcagctgcggatgggggtgggtttggcgccacggggcgggagaagtgcgttgtaaaatggccgttgcaagatggcggcgccatcatggccgccggcgtctcggtcccgtatggaggcacagcttacgggcagatgcagcgcccccttccacgacgaccagaaggttgccggggccctccgcataccacagagtggtgggtggggacagaaaaaaaaaagtgagatgagcgttttcctccgctttgtgttgcctggaggcatcactctgctattcttgggcgcagtgccgagatcctatggtaatgtgagtgagctctcgctttgcagttgctcgtaaaaagtaaataaaaatgatctgaatgcagtgttgacgccgtttgcatttgtaagtcccattgcctcgacgtcattttttaaatgcagtaattgtttgattagttgcagtgtttaacaatgacttgaaagttgaatttctttttattaattggttttcgattgacatgagttttgggtaaggttagactgactcccagtggaaggcagctctttaaattttcacaacgcttcagttaacgtataataaggtggaggtctaatagctaaaaaggaagtaaagtcctgttgagaaaggaggaacactttaacattccttttcattgctatggaaatttatgctagttaccgtaaatacgatgtctacatgcgtacgatttttgttctaggggtttttagacttgcattagaattccttttagagccgtaaacctcaaaccgtagtactgcgtattttaagtttatggaatatttaaggaggttttaggggtattttgttaatgagtgactttttttgtttgtatttttgagacgatgtttgtcacccaggctgtagtgcagtgacgctatctcggctcacctctgccccccacccgggctaaagcgagcctcccaagtagctgggatcacagacgcgcgccatcacgtccggctaagttttgttttgttctgttttgttttttagggtttttgttttttcttttctttttctttctttttttttttttttttttgtatttttggtagagacggggtttcatgttgcccaggctggtctcgaactcctgggcttgagcgatccacccgcctcggc

SEQ ID NO: 62278 - DNA, 2547 bp, Homo sapiens
aaacacagtagctaaaataggaactcaataggtttaacagtgggaagataggtcaggaaacaaatacgcatattgagggacagagacattaaggatagacaatgcattggtaaacctaactgaaaatataattattgcaggagcgaatggggcaataatcgagattgatgactttgcagaactgttaataaagtgttaactttaagcatgacaaaaataaccagttaaagatattaagactaggcactgcagcttaattagtgtaatcctagcactttgggaggcagaggtgggaggattgcttgagcccaggagttcaaggctgcacttcagcctgcataacagagccaagacgtctttaaaaaaaaaaaaaaaaaaaaaaagcgtatataattaaaacctaaaggcaattttaaaggcatcccaattaaaaagacttgacaatgcaaataatggaagccaggaggcaatggagtatgtttagaaagctgaaacaaaactgcaatttaaaattctaaactcagtaaaaacccttcaagaaaacattttcagacaaaactcgaaaaatgtgttagaaaatttaccagcaaacccaaactggagaaaaagttattttgttttttgagatggagtctcgctgtcacccaagctggaatgcagtggtgcagtcttggctcactgcaacctccacttgccgggtttaagcaatgctcctgcctcagcctcccaagtagcggagactacaggcacgtgccatcatgcccagctaatttttttgtatttttagttaaccaggatggtctcgatctcctgacctcgtgatccgcccgcctcggcttcccagagtgctgggattacagtttgtttcttaaatgttcattgcaaggtggactgtgaaagcatatcacaatttaaaaaaattgttacattagaattgttagattagaatcatttagtatttgcatggatattttgctcatacatggttttgtaagattttgcattggtcatttggaaaatatttactgagtcacgcaaatttttcaaatattgacctgccttacacaatatggaagactgatgcaaggatttctgaggaggagttatgtagatgggcctctttagatccagagtgaagatattagtgtcttgtatgaaagttcaccaaagggcattcatggtagacaaggcttccatgtgtcatctcgtgtaagaagaattgtaggtgttttaaccacgtccccagctagggtctcattgccagacgtgagtgagccttctgatgattatagctcccagtctttgagccctcccagctgatgcagaatgggacagagatgagctgtcccctccagctcctaccctaatggcagacttgtgagtcagataaataatgttccaagctactaagttttggagtggtttgctatgtagtagtgggtgacctgaacacttggctacttgccattgcgattgccaaatctgccattccctgatatggtgtatttcctgaggttacaagccagccacttggtgacaggttaattacgttggaccccttccatcatcaaagggatgccagtttttcctcactggaatagacatgcattctggatatctggatttattaatataatattaatactttccctgtctaatgcttttgctaacacaatcatccgtgaacccagaaacctttattcatggtattccgtgtaacattgcttctggcatacactatcagcctgagaaaatggaatgagctattgaggagtcagttgtggtgccagttgggagacctgaaaagttgaggttcttaattaaaggatgcagtatatgctgtgaatatggcccatagatggtgatctctcatggaatgcacaggtttggaaattaataggagtggcttctcactatcacaaaccaattacagaatgtgtgcttcccattcctgtaactttgcgttcagttggtatagaggttttggttcccaaggagaaattctgtcatccaggcaacatgatgggtcagttggattggaagttagatagctattttggtcatctcataccaccgagccaacaggcaaagaagagaagtactgtactggctgagatgatcggctctgattaccaagaagaaatttgggtgctgctatatacaatgaggagagaaaggaccatgtctggaacccagaggattctctgggatatgtcttagtacttctgtgttcctaggtaaagtttaatagaaaagtacataagttaaaaaacacaagaccactgaggtttcacattcttttaggaatgagttttgaagtcaccctatctggtgacaaaacaagaccaaaaccaaaaacagctgaggtgctggctgagagcaaaggaaacatggaacaggcaggaagaggaagaaatatcaactacatagggtcttaacgaccagttatgaagacaagatgaagacaaggactataacagctttgtgccttttttcatgttatagaataatcagatgggattacatttgaattagaaaagtaattaa

SEQ ID NO: 62279 - DNA, 1419 bp, Homo sapiens
caggaggaagagccagctcagaggggctggggtctgggagagggatgtgccccagggaggtggaggggagtcgaggcacggcaccccaagagcctggctttatgcacaccatgtgccaggtgagcaaagaccacagaaatgtctcagagcactgcatgaagggagggctagagtcactgtagaaatgtcagcaaattcctggcaacctgctttacagtgggccaggaaagcaggtccaggcaaggtacagcccttacacacagccacctcaccctcacagggcgcaatgagcttgggaggctgggactttagtgagttcatctaaaggccaaccctgtatctgtgtgtggatctcgggtttggaggatgatgtgtaatggtgtgttgctcactctattaaattcttttggccacactcccagaggccttggtggcgggtgaggccaaccgcactgtggagagccaggtgatacagtggagagaggacagaggcctggactcagattccagctctgccctgtcctggctatgagacctggccatgtgaggtgaccacccctgtacaacagagaccattttgccatcgcccagggcagtggtgggttatatctgtggcagacccagcacacactggatcctgtcgaagcggtcagtgggaaatgaggaagttttgggccccttctggtcagagacgtacccttggcagccgtgattattgaagtcctgggcgcagtccaccagctgctgttccgcctggaagaaggacacaacccagtgacctgccagctgagaagccgtcaaggctttggcgtgaggcgctaagcctccctggctgagccacatctgaggccccgtcagtgctgtgtcaaggtgaccaaattataaactccccaagggcagggacagttgctgtatgtcctgcagtgccagcccagcagctggcacatgtcgggaggggctcagtaagcaggggcagccagggaaggtgagagggggcaagggctgttgggtccaaacccctgccccgtaggtgtgcccatacgatgcagagtgtggggtcccacagcggtgtataggatgggggaaacaggcccagccagagaccctacccccacctgtccacaacccagggtcctcatggcatcaccaggccggctgtgcactgtccctcctttctccacagaggcaggggctaggatagttccttcaggggcatcatccgtctcttgtgggcgaggggatggatgcataggtcccggctcttccctcatgaagacaactgaggctgctgggaagggtgtagctcctagttggctacccaccaggcaggctccgcctttctgaacccctccgccgggaaggctccaggctgtcaagctaaggaccacccagatccatctaggaatgagcccttgggcc

SEQ ID NO: 62280 - DNA, 1153 bp, Homo sapiens
gtaggaaaggagggaggcagtagggaagagcaggctccttgccttcagccaggggaggtgcctgagcccgggcagtagacaggatgcaagggcagcacgaagctggaccagtcgcagccaatctggccaacaagaggagtcctggggctccacctgacgccatgggccctggggtgctgttaaaagcgctgttggtctgagtgctttccctggtgccgttgcacagggattcactgttccaaacagcccgtccaacctactctacagatgggactcccaagacactacggggatcccctgtgtgccaagtcccgggggaagctgctagagaaggctgggacgtccttgctcacctctggcagggacagatcagagtcctctgtgtgacactctgtgtccccagttgaggaaggcggaaggagctgcgggctcctttggtattctaggctggagagccacctggctaggtgggaccctggacactcagcccatctgctcctctggtcctacaagccgcccaccctccgagaacccccgcctataatgcagtttacccctccccgtgccagcacgcagagttcctggcctctcaccggggaaagctctgccccgttcctccggagcccagtgcgcccctggccaagttctcccagcgtccactctagggcctgctagcaccctctcgggcggcgcgccctctgcgtacctaaggagttcacgcacagttcggcggcaccgcagacggggactcccaggagccaggccccggcgcagagcagcggcagcgtggcccacatcgcagcgctggcggcttggctcttgcgctcagggtccgcggaggtggcggcccagagcgtcaactgggagcgcggggggggagcggcacgagcgtggaggagcggcgggagcgcgaaggggcggagcgagcgcggggcggagcgagcgcggggcggggtgggcggtactcccccgaggccgggctcgcgggagggggcggcgccgactaactcgccagctctagttcacctgtcggccggccgcgtcgctcccttatctcctctgggaggaagggcttatctgggtatcaggcctggctgagtcctggatctgcctggactggctggcaccgcgcggggaggtctcagcctggcct

SEQ ID NO: 62281 - DNA, 2795 bp, Homo sapiens
ttccacatccacaggctgattttatatggtaggtcggtaggggattggctcagtggttgggtgcctggctatgtgtttggatgcatgtgtggatgaatgaatagaagaagggatggctggatagacggctctgtccatggcaagatggaccaacagctgtattgttggatggatgggtggaaggagggatgaatggatgcagggatgagtgaccaaagtttgtagagtggaaaaggtaacgaatacagtaggggtgtaagtccgcatcaaggaggttcagccaccaaaggagcttcagctgccttgtaatgtgaatttgaactcttgttagttctgttggccaggagacatcctgcctagccaccttgattacttcccttggctgtgggtcagagaattccagcctgaaaaatgtccattgactgaatgagaaggcactgtttgtcccctggaaagccagagaacatggagaacaccacccctttggccaaaccctggagatgctgcacccacagccaagaaaagtgtggagacctgcagaaaagtccagaagctggtgtttcatcacagccaggatcagggtgaagcagcgaggttatgctgtgcaagtccaaaggtcgattatttatttatttattttcgagacggagtttcactcttgttgcccaggctgtagtacaatggtgctatctcggctcattgcaacctccgcctcccaggttcaagcaattctctcgtctcagcctcctgagtagctgggattacaggcacccgccaccacgcctggctaatttttgtatttttagtagagacggggtttcaccatgttggccaggctgttctcaaactcctgacctcaggtgatccgcccgcctcggcctcccaaagtgctgggattgcaggcgcgagcgactgcctgatcccatatttatttttaaaacgtgacattttgctcaccatgtgttttttgcattaacttttcattttaaaacattgcattcaagtattatttatcttgattactgcatttttggacactccctgacattttgcacctcagtagtatgcctcactgctctcgccctagtcctggccctgtaacagagtactcatttctggacttttctgcaagctgcaaactcccgtgcagtgtgagcttatcccagcttagttggcataattcctacctctaggggaagttggagttcagaggcaggagttctgaatcccacagttacagcctcgttgtttcttctccagggcctccttcagtctctctttgttcacaaattttcacagcctatactcctttgctttgcacttaggaccctctgtgatttttccttatcctgcttgtaatgcccaccaccactgcactcagcatcagttcacaggtctacttcctgtcctggacacagccccatcccaattcttctgcccacctctcctctttcttagccacaccgtccccaacccattccaaatttcaccccagttgaatttttcctctacggaaacttcctcttcctgaactcctgaattaataatctgcaccacacactcacgtttaatcctttatgacttttcagggtttcctgcagctgactgatctttagccagtttgtaccagtttggccgtgagtctgagtggttcagtgcccacgccacactggtggttaaatattttgaaaatcacttccctggtttcctgtgtcttcagtgaaatggaacacactcgtgtgttagtgctcaaacacagagcctggctctctgcaggcacaacacaaatggtagcagtagcagtagcagtggttgttactgtttattctgagtcagatggtaaaaggcttgtggcattgaaggtgatgtttgaagggcttcgggtcctggaataaagacatttggaggtgctgtactcacctcctgattaggcttgtgggtgccttgagaagtctctcgagagaagcaaaaatgggtggatggtgtttgcaggtgggtgcaaggtttagagggaacaaagaaatagaaaggcacagttggggccatggagagacccagaagaggcagtgaccagagaggattgcaagtttgcttggacctgcccgacgtgagcagaacattcctaactccccttcctggcgatgagaagggccttgactatttctgggtcatgagtcacttggtctgatttgggtaataattgcatagtaaacaagcaaacaagggctgataagggcttgactgaatgaaaatggaatcaggccaggtaggaactgagcctgcaagatttcagcaccaaagccctattgtggtgcctctgcacacttccgggaccagccacccacccagccccatacccaggcccacccacccgccacctgcctctacctccctgccgcccccagggtccctctctccctggactcctcaccccattgcagctcaacccatcacttacgtctaccttatctgggtcaccccagcccctcttctctccagaaaccctgggcttcttctattccttcaagaacaagtttaagacccttcctctgagaagctctgccttgccaatccctttttctttctttttttttaacttttaaaaaattaaagtgaaattcatatatcatatactcagccattttaaggtatgcaattcagttatcccattaatctacataatctcctgatcacatctgaagtgctttgtgaatgagcagttacagccagttttcctcgttttgttgaggcaaaattcacataacatgaaataggccattttgaagtgtataatt

SEQ ID NO: 62282 - DNA, 928 bp, Homo sapiens
agccaagagcctactatagtgcttggcatgtaggacttgctcaatgaatatttgtggagtgagagaatgaatggaaagcaaagcaaaagtggccagtttaactaattgtagttagtccactgatttttctccttcgatacggctatcagctataaagcagatcatgagttctcagaatatggcaaaaaattgacacattctcaaaaaacacattgatcacaaaggacattagaagggaaaaacaataaaagcttgattttccggtgtgcttgagggtgtgtctggagctggatgtttttgtgaactgcacactaggaggttaagatgctgtatctctgggcagggaagaaaggtcataggattggaggctgggcgtggtggttcatgcctgtaatctcaacactttgggaggctgaggtgagtggatcacctgaggtcaggagtctgagaccagcctgaccaatatggtgaaactccgtctctactaaaaatacaaaaattattggggcatagtggcgtgccagaccagccattctcttacatggccttgcaatctttcaaaaatgcaaactagtccaattacataacctcctttcagggcttcccatggtcctaaggacaaagtccctgatcccagctatgcgggaggctgagacagaagaattgattgaacccgggaggtggaggttgcagcgagccaagattgtaccactgcagtccagcctggtgacagagtgagactctgtctcaaaaaaaaaaaaaaaaaaaaaaaagaaaaagaaaaagaaaagaaaagtcataggattgggagcccaagagtctgggttagcaaatctgttattttatctgtaaaatggggcctacagtacaggctttgaataatgtaatgagactaacatgccaaccattcttttttattaaacaattt

SEQ ID NO: 62283 - DNA, 2981 bp, Homo sapiens
atttatattttagaaatgtgtggattagactgcagaaatagggttacactaaaacacagctcagaaggcacataggtgcacacacactcacacaattcttcaaggactaacagaatgtaaatatctggcgttgttttcatagcagcgcatggtgtagtcaccatcaaggaaagacagggaaggccccaaattgttgagaacacgataaccctccacacaggatggtgataggaaatgggggtgtggatcttatgaacctgggtcagcagcactgtgagactccccaggaaagacactattggggtaccccggagattgtaatagaacaaagaaaagagcatgtgtcttctggtgtagaaatgccaatctattcagactctcttagaactcctggaaactgcaggttcactgggggtagtaaacaggcaagtacagagccccagtgccttccctgttcactaagcagcatcttgaccagaagacagaaaacagctaagcttcacctcctttgtgtcctgtgtgagtgtcctggcctaggagcagtcagtctgtagagccttgttgcttggactctcttctgacccttgtacacatccaggaatttgaggcctatgatccagaaagagagtcaataattatcagaatagtacacagaagctcagaggggaagctacctgacgtcacacagctcattcgtagagggctgggatttcaacccctcactgcctaacctctgctcctccaaatcccccagcttcctgaggctgcagcatccagatctccatgtatcagtcctgtcccatcacctgacaaggcagatccatttggcattttacaggtaccagcaggtgtggagggaagtcttatcccagaagtctcctgagtctgtgccctggttcctgcagtgagacgaagccagatgggttggggatgggaagcaatatgtcctgaatgtcaatacactgggagactcataatgagccattgtcaggttgcctcccaggagacttgaaactataaagaaaacagatccaagagccctctaggaaaggagaatgtttaaaggatgcaaggcctccgtttttctctttccctcctgtcaaacatcatttactaaactctgatttttagcaaaagcaagtgttttatacccaaagtctcttttttttttattaaatacatccctggttcttatatttacagcctgagatgatttcgacatggtattgaaattgtcaagggaaatcagtaaaggagacaatgttagaaacagattgtctgagctgatggcttgaagaagttacttcaaagcaaaacagcagcaataaagaggagatgggcagctgtgtgtgaggaaggggaagacagaggaggaggcatgacatttcctagcagcagggtgcaaacacatcacaaggaggtggcagacagcccacactgaagaattctgagcttcagaccagcagacatcaccagactccagacatcaaatgagatcatttatgtataagccctttgaagatataaagcattcagaagctttaaggtgtcataattgttgctaccattgttacttaatcagtggtgctgggtgtctgtctttgggaggacactttcagaccagaggtggatgacaaatgtctttaatacacagttggcctcttttctctcttagttgtcatccccagcacatgagtcagactgtgagactgaacaagaccgaagctctatattaatgatcactatccatcaggggtacccagtgattcatagtttgcaaagcattttcactcgcatcatctaccatcaccccacagcaagggagtcaaggctgagattgaccagccccaagggcagcccagccaagacagcatgagcttcagagtcctctccccaagggcaacgacagaattgtcggcctctccgcttccacctcgccaaaacaaggactctgctctcttggttgctctgagataatccatctctggaaagcagaagacaaagcagttgaagagtgggcaagttcatcacatcttcgtactttggaggtccctttagcaatcaaagaaaatgcgtgccagtgccttcttccttcctcccacaatctcacacacggtcatccttgcatcttaaaaacacaaaggccattccccctttcttgtttttatttgtctgcctaccccactatactgtttgcagcttgagggggcttatttactgcagttagcacagtatcttgccttaggaagtatttgatagaagatactgaatcagtgaatggtttttggcattgctaagttgttccactggccattggatttcagtatctgggtccttgatggttgaccttttccatactcctatagggggtactgtttttgtcattcccacctttttggctgaacctgattttattctggcatttcccacgcccacactcttctgtgcttgcgggtcaacctcgtaccccgctccagagatggctcctgattagtccaagctcagtatttctgtttgcatcaaaatcatctggcatgcacattgaaatgcctatgtctgggccctgtccctagcaatcagactcactaggcccgggaaactatattttatgagctctgcaagtagtttatttatttggtcaactttagggttcctggtctaggctaagtgatccgtcagcccctcagcagatgtcactggttcaggacagcacctagcccttgctggtctcattagactgaagggaaatatgaatgttccatagtccagggagaggttttctctcaaactctccagctggatatgaacaaggaagaatctacattgtccttaatgctactgccaccaccttatactcatgaggggaagcagcctgaagatcaagccaccccctgaggttagtggagagaagagagagaacctgtgtccttgatgacaacaatgggacactgagtcaacctaccctggagcttctcctaagt

SEQ ID NO: 62284 - DNA, 2690 bp, Homo sapiens
agaggagaccgcactttaaaaattgaacagagatgaaacatgtatctgtctccaaacagataccagtatatccaaataccagtccccaacacaaaaagataaagccaattcaatcagctcgtggaaaaaaaaaaaaagaaaaatcagccaaacagtttttgtttcccatacattcattactttttaaaaatccatgcagataaccgatctgtgacttttacttttcaactggctactctggtagctgaaaaatggtagcagatctatttaaaaaaaaaaaaaagtagctacatctgctgctaacatgctcataaatgttttacagttctcaaggtactttgatgtgtgatactctggttgagctcagaacatttgtgcttctgacacctactttagcctgggcactgttaggcattaaggctttgctcgctacccagagtggtccctggaccagcagctttggtatcacctgggagctcattagggaagcagcatcttacccaccccagacctgctgaatcagactccgaatttcagcaagatcctctggtggctccattgctcattacagtttaagaagtaacactgtagaggataaagtgacaaataagacatgtcgcttgtcctcaagaagctaggaaacttgaaaaagagaggatcacagaattggataatcacaatacactgtgttagatgatgtgatggaataaagctcagagggccctgggagccctaaggagggtcatgctggcccctggcaaaaagtgatcttaagctgaccccgtgaagtagaagatcaccttttgagaaggtgcaggagatagtttccacagacaagaggccctgccaaatgagtgtgcatgtctggggatgtactccatgcccaaagccttatcaggaagcattagtgatgctcctctttaggcaccagcggcgtccccataccacagataaggaggggactttgtgtgtcagaatctgggcagcatggaggggtagaagtggaagcagaggctatttgtttagcaataactctgtgatccctattatatgccattatgtttcacttagctttcacttaataataatttagtttgcatgtgcttctgggctaatgctttgtctagccataatagaatgcagggacacctaaattacccatagaataatcaaattaagtaaaaatgcctctctctttgctcaccgcatggaagaggtcactgacaccaaacaatgtcatttctggtgcccccataaatgactgaagtcagacctttctgagctgatgaacccagcctaagattccacaggctctgagtcatggtggtgacacagcaacagctctaagataggaattggaagtaggaaaagagctaccccagggagggcctgcagtatgccacgagtggtgctggccaccttcccagaaggattttcttttgtcctacagtggacctgccccagttgacaaacagcaaagcagaggtgggaaaggcctctgctgctgaggcatatcaggctccaaactcctcctactccccgtgtgactatttcccatataaagtactatctcccaaaatacttcattcttttctgccatccttcccacctccattcctctccttccttccctcaatcttccatcaccccagactcagtgtctcaggcatttgccagcagcactcatcaccatgatgcctacaggtcctgctgacatcctcttagtgtgtgctccaaaatgcatttatatctgcatttctgcttctgattgttttctgccttttaacagcattgatcctagtctccacttcagctctcttccatcatgcaacccccattcccagtgatcaataggtgctttcacctgtagcatctcatatcttatattctatttattcctggctttcaggacagatggtaagcatcatagaggctgctgatccagtgattgtagtgatgttgaggcaggatgagagtagagggtaaataggcagggtgcttaaacaacataacctgaaaaagaaaagctagcaagagcttgaactgtgaaggagggagcaaggttgatggtcaaagacagtgctcaacatcaaatgcaaaaagcaaatttgcaatatgaatgacccaaaaagcttaatgtcagaaactgggagaatcctaagaagtgaagagtagcttaaagtaagtctcttatatagatcccatggcaaaggctcattctctgatgagaccagctggaagaaacctgctgatctagtcatacgtggctttaaaagctctttcgtgaggaactgaaggctgaatggcctaccgactgggcaataccatctttggtttggagcttatttttggtctgtgcaatcccttcttaggtggtttaatcaaatcagcaaaagtggaaggctgcccttctcccatgggtcctagtgactattttctgaaactcctttgggtgtacctgtattgagtttagtggaacaaggggaaacatattcagacttcacagctcatagtaggatgacctattttcagctacaaagtaaggaagaatgcctctcaccctacacatgtgtacacacccatttgcagaagttacccaaacaaccactgtaaagtcagtggcaagagtaagaactggtttagaacaagaccagtaaaagagcagagagtaaatattttaagccttgtgg

SEQ ID NO: 62285 - DNA, 954 bp, Homo sapiens
aaaaaagcaagtttaatatcagacaaaagataatcttttgggtaaaatataaaagacaaagctatatattatacaccaataaaaggaaaaataaagatgatgtatatctaataagatatcaaaaatgtataaagcaacataacagatataaatacaaagagaaagagaaataagttaaccattctaataggagatacaacatttctttcttagaaactgatcatatgattaaaaatatgcagatataaaatattgcatagcataattaatatgtttgacattttaaaacatgtggggactttatatgttcaatataaatgtagcattcttttgaacatacatagaactttgtaggtggtatttattaggctgcacagaaagcctcaattaattccaaaaaaattgaggtcacattaagaatgttctctggtaatgaaagtaggaataaaaaataaaagctatctgttaatttttaaaaggctgaattgctgaaagtttagaagcataccattaaaataaaggaaatcacaggacaaattgtggaatacttattgctgaatgacaaaacgttacaagtcaaaatatgtgagatataactaaagcaaaaggatatttttagttctaagtattgcattcataagcaaacaagaaatgttgacataatagacaaactatttaatccaagaagcaagaaaaaagaacaaataaaagaagcaggaagtaaatatcaaagataagtacaattagggaactagaaaataatagttccctatcaatcaagctactgaaaatgaaagacttctggtgagactgactatagacagagggaaagagaaaggatgaagtaaacaggacaagaataagaagggagaaataattacatacacacaagtatttaaaatatgatgagtaaaataaacttgaaaaccaagatgaaattaaaaatttctgaaa

SEQ ID NO: 62286 - DNA, 2063 bp, Homo sapiens
taggaagacaagccacacacagaataagcttcgtctttcatgtaatatgggctacctgcttctattcaaggacccaagaaccatttacagacatcattaactttgtataagcagatctccctttggcagacttagattccttaatggtcagtggcaggcccaaaaataaagggtgcccctcatcatcccccataagagagaaacctgagggtcaagccacaaggaattgggggctgggataatatggaggagccgccacacccaagagacaaagaagcagtcctgagaaggtgtaaaccctcgatcacatatagattggggaactgggaggtcttgggtgtgacagtctgtgtgacaaaagggttgcgttcggtctccatggaaagttcagccagaggctttaagccctaagctcagggtgtgggatggggaggagacagccctcaggtacctgcaatccagctctcctctcactgccatgatggggagagcagccctcttcccagcttgccattaggagcctggagaacactcaggctgatgtgggaaacagtgcacaggcactcagtcaattctgtctatcctaatgagtgggaccaaggacagatctcagattcagtgacagccatagaacagatcattacaatggagtgtgattaaggtgggcagaaaggagatgcctaacccaggcagggtcagggactttccccggggatggtgaccaggttgtgagccagtggagggcaggactcctgaatgacttgcttcttcatgccagagtcacagactggcagcatctgacccagagaccttttttttttcctgctaacattttgaagtctggaaatttcacataaaaagctggactcttgatttctctctaaataaaaagtgctacaaatgtaagccacattttttacatgttaccaatcagatagatctgaatggctaatggacgctttcaaaagggtgtgtactccccagtttgccccagtctccactcttccctacagtctttgcaaccctgaagctatgggtcacataaagtttagggtcttatgtcccgtccactcatttattttactggctgtccccgagaagtgtatttatttctgacttctgtattaaccctttcatttcttgtgtcctccttctccctcccatcaaggtgcctgatctataatatacactcaataagtgaattgaattgaaaataccctattctgctatagaagcagaggagcaggaatgtggaagaaaaagcacaggcctaaaaatgaggagaacttccctcttctaatttactttgtgccaatacatgtctaaaactaaatctcctttttctctaaaagcagtggttggatttgatgaactatcaggtcccttccagctagaaaacgtgccctttcacattccccaatcaacagtattgagagattacccaacaattactacactaaagttcaaattccaagttctgggacctcatagcccagtcacaggccactttctaaacctgcttcccattggtgccactcagtcatccatttttctctccagttaaattagtctcccatgctttctgcagaaacctcgtgttctccctcatgcaggatccctgttctgcatacaacagaaatcactcttagttacctgcacaacaggtatttctccctttcctggccctcaaaccaagaatcccaattttgtttgcagtggcagtgtcccagccctgtggatggtgatttggcccaatcccattatttcactcctatcctattttgcccaactcatgacttcccagcatgcttatcgtttggagttgctatgtctcccagctctaggcaatgacacttaaagggcaactgctagaagtacatggggaagctttggtttttctgattaactgggcagatgcagctggcactattcctttgtgtgtcttcccgccttgaacatagccatgatgcctggagctacaggagccatctggtacccataagcagacgagccaccatcctaaagacagcagggtaaccagacagcaagaacagaaagggaga

SEQ ID NO: 62287 - DNA, 1284 bp, Homo sapiens
ctctgatctgcaacttacagctaccagactgggaagccagacctccacctctgtaatgagcagctccaaatcatcaggactcatcaataactgacagcttccctatttttgccctccatttgcaacttagagccaatcagggaaggccaaatgtgctcccctaacccataacataagatgccccacttctggttagcctgcttgtaacagcctccaatcagggcagacctgcagtcttccttttgtcctctataaagttttccactttgagtctctgccaattgcaggtgacgctggttgactcctttgcttactcagaacaaatagccttcacttgttctcgtttgggtcatctttgtttatttttgcagaaccaatgatttcacatggtagtctttcacacagtagcattcagcagttaccttctgggtagtagaaatcatatatgatatcagcttgggggatatttaaagggaggggcttggtaaggaaatcactgattgcaatagcctagcagcaagaccccttggacatgcactgaggggatagccgtggagagctaaaggaaggatggatttgggcacagtctaaaaaagaaatggcaaatgtgaggttgaatcaaaagcagatggaaaagccaatcaggctgaggatagaaaagaactcccagggagcccaaagtgtcaatcctgtttaggtcagggactctgaggagaccaaactataaccatgagaagtcagaacaagaagcaggttctggagagaaagtctgaggcacagatgctaaaagaacatcctccttaccatgatgggagagctcaaggtgaacagaagggcacagtcagtgacactctgtgtcaatgtgtcacctttaaagggacaaaggagagatacagagggccactgattgatacagatgaatacaaccctccctggaaggcttcatccacttctgggctgcattttgttaactatatcccatgggcatcactaatgagatataactgaattaagtttaattcagaggagttcggaatataacaccccaaatatgccattctagagtattgactattttgatttaaaagcacttagaaaacagcaagtacaaaaagaacactctaaccctccttcttctttaaagcaagagatgaaattccgatgtgaaagatgtcctccctataacagaaggaaatcgtaaggagagttgaggctgagggatgtctgtacaaacaaaccttgttgtcttagtccttttgtgatgctataaaggagcacctgagg

SEQ ID NO: 62288 - DNA, 703 bp, Homo sapiens
ccagaaacactccactttagaatagtgacactcagagtggaaggtagggctggcacctacctagcgtgtcccatcagcgtctatgagccactgtcatatgtatcttctcttataagcctctaaactcctctcaaaagtaggcattatcatactcattgaacagatcaggaaagcataagtcagcaggaacaagggactcatcgctcattgcacaactaatcagagacagagccaggatccaatgccaggtccccaggccctggagccagcacctccatccctcagggccgcctgattccaccggggacattcctaggaggtgaaacagagtttctcaaccttggcactgttgacactttggactagataattcttctgtacaggggctgtgctgggcacggtaagatgcatccctggcctctacccattagatggcagtagcacctcccagttatgacaacaaaaaataaaaattgccaaataacccctggtggcaaaatgccccatggatgttcacaatgtaaaggatttgaccccattccagtctcagatcttgcttgcaaataactgaaactgatcctggttcacttaaggggagaaaaaagggatgcattggaaatggtattggatgactcataagatccacggggatgccgtagaataagattcagaaaaaaagaggagggaacagagggggccagat

SEQ ID NO: 62289 - DNA, 1144 bp, Homo sapiens
gagccacattacatgtcaaacccagtagtctgccctgtagcctccttatactgagtcttggcctcctgacagctgtcctgggggtttctgggtgacctatagcttagttgtggaataaccattcatatagcatttgctggcaagatataccagggttggaagccatgaattctccagaacagcatgttcagagtagagaggatcagactgccaacatggctagcccccactatcagcagatattctgactacctgcagaactgtgaggtgaactcagcttctctctagctcccagcatacacctggtcacccctgcctgccaaaatccagcaaagcatgcctcagattacagtaatgaccttcccctgtaaacctccttgtctattccaatcccaactttctaaaaaggtcctggtcactgacctctgtctttcctccctgttcctgtccagctcatttgtccctcttgggattgacagtggactgtgaatttggactttactccctcgtgtcctctttctgttgccagagcaccatcaggcttgaagttcagttctgtcttctatacctagaacacacaatgcgcaaacctttctaaggattcctgcctctttacagtatggcaaggtgctctgtaaggtcctctggaggacacacagtctcttcccttcatgaaatggcagttcagttagtacaaaatataaccgcatgtaatttccattccaatgcacggcagcagtctctgccaaatgccccaaaagcaacagggacaaatactagagaccccagcagggggagagcaaacgctgggtggtcagggaagaattcatggaaaactcaacttgacctggatttttaagatgtgtcagagttgggtctaagtatctttcagaaaccaaaagaaaggtggcaagagctgagtgagggagtagggagtggggagcagtttactcgcttggacagaaggatcaacctgaggagtagcagaagacatgagtgtagagttcaccaggtacaggcatggagatttggggtcaaaggcacagagaccccctagaacacaacagcaaaaaaccaaataacccaattaaaaactgggcaaaagacttaaacaggatgggcacggtggctcatgcttgcaatc

SEQ ID NO: 62290 - DNA, 683 bp, Homo sapiens
ctagctaagaaacattagtaaagttactgaaattctctttgaaacccaatttcttcttcagataaaaataatgctattttagagggactaaataaaggagataaaactctagtaagtgttcaataaattctagctgtattatacttggggatatgaataatgcctatcctccttctgttgactctgaaagttatttcttgagtcataatactaacactacaagagctatcatgcagatttcctatcagcccaaaccatgtgcaagggtgggcctagctctctactgccacctcctgtcagctagaaacatgcagagcggtccgtaagaaactgctcaagccttaggcagagcaggagccgtgatggctcactgaaatacagtctccgaaacacgtgtgataggaaagcattcctctgttagaaatagcctttctctttaaaaggctcctttgaggtgtatctgtttacaaaccaagaaaaatgaagttgctcttttataatttctttcagcacattcagctgtgtgctagacactgtgctaagctctttgcaaacatgacttaatttaatcttcccaacaagatgatgtaatttgcccaaagtcatacagctaggaaatgcaggcctgggaatgtgaatggtagtgtagctctagtgaagtgtggaagctctttgttctttcc

SEQ ID NO: 62291 - DNA, 2750 bp, Homo sapiens
aggaggtggaggttgcactgagctgagataacaccactgcactccagcctggcgacagagcaagactccgtctcaaaaaaaaaaaaaaaaaaaaaaaaatttaagtatagctactttatttcattttaatagaatacacgaggcccaaacagaaatcctgcagttcaatcaaaataagtcttcaaactaatgaagcttttttatgctatactctttacagagatcattaagcacactacaatgaagaaatcccattttctctgatctaattctgtaacattaccaggtaacactgtggagccctatgaccttctggtcttgtagggctcagggatcatgggtgtttaaatagggaaatgtcatgtgagtgatgcaggacaggtgagccccaaaactggggttatgcccaggagggtttttggctttgccgggaaagaattcaggagtgagcctttgactgaacagtactgctccttgcagagtagggctagcgctcaggcagtagcccagagtcagcaaggcaggggctcctggcaactgtatttaacattcaggtaaacccacatttggctatatgtaaattaaggggcaggtcaatgcaaattgaggttatttagaactttctacaaaaggatcgtaatttccaggttgttgccatggaaaggggtagtaacttccaggtcattgccatggcatttgtaaatcgtcatggtgctggtaggagtttcttatgccaatgagcaatgacagcagccagggatcacttttgtcatcgtctgctggtttctgccggtttctccattttatcctgtctggaccacatcctgttttggtcagcagtgtcgtgaccaaaaagcaagtcctgctggtctgttacctcatgagaaaggatgccttttcaccatagggctgtgcacttctgaaagaccttagaggcccagcctagctgaccattagggagaccacagggcttgcaagtaggacgcagtcaacaccacagggcactcagtaaaacctccaggaaacagagtgagaacagcaaaagaggaagctcagggcttcaggacccttcacctttcagtccccatccttctttctgtatccctatctcaatcccattgtgacgcctcctggtgccaggctccagctatagatatatgatgtagtggtttagggctggggtcttaacagccaaagggacctgggtcttaatattatttctgccactcatgagttgtgtgaccatcgataaggtacttcatctgagccttttttctgatctataaaatagaggagcaggatattaatagcacccatgcctctgcagggtatggaaagaatcaaatgaagcaatgcaaaataattgcttagcacagtttctggcaggtagtaagtactcaagaaatttggactgttattacattatgcatctctcccacataccacatccctgaaaaatcagaaatttcctctcctgaacattcccttttgcaatgatggtaagaaatcagtgaaaatcctctctgaaaaaaaaaatactgtatatcaaacaaaatcatccaaagccagccatttcagggatttggaagctgaccaaagactgagtaggaacagcagaagtctctggtcctcttacctggtgaggttcccaggcccccagctcagtcctcaagaatggcagttttaccaatatggggctggctggaaaaaacagcagctctgctgccagaaggggcagacttaacttgtggtagggggctttgtgagctaaacataggaatattacaggaaaaattacagctttacttgccaaggttgtaatcccagttggtgtaagagcataatgggaatgtaatgtggctatactaaaataagaggtccatagaagggctgagataaactcttcctacatacctggctgactagaaactatagggatatgcagggaagatctgagagagcttggcagagagtaacagccaaggacaactagagaagtgctaaaacttgaatgcactctgcaactcacagacagatcaatcagtggagcttcatgcattccagtgtttgaaaacaactactatctaaatcactggctcagaatcacttctagaatggcagagtagaaaactaaaaatctgctccttaataaaaccagcaagaacattgggaaaaatggtcaaaatcaacttttcaaaactctagaaattagtcaaaggcttacaccaatctaaatgtttattctctgtaagaacagtgagctttgtgccttttcaacttgccccattcccatccccctctccccagcttcatggtagacttgaaaatcaacagccttacaactaaaatagctgtgacaaccaccaacagcctggcagccaatggaggggcagaacaggtttggagctcaacaaaagctccatcccagaaaactgtcactaattaatttgtctggcagttccctgaaaaggtgcattgtcaggtcttatctttacttgatctgactcatagctctctccatgcaaaaagccctagccctaggacatttattttaaaaatcaatggcaattgtttaatatcacagctgtctggggcaggaatccagttagtgctaacaagaggctgaccaaaaaacttaaaaggaaaaactggggaagaagatgtcctgaggagcctttgaaaagctccgacatattccagggaatctagaaggctatctcagggctgttccttgctgaaaaaaagaattc

SEQ ID NO: 62292 - DNA, 507 bp, Homo sapiens
tgacaatgttcccatgcatacagttaccaagggtacctgttccatgaataacggttttaatgcagtatgctgtcaagagagagaaaatctaggtagtaaagcaatattaatgaatgaagtgtgaagaaaaatggcacttcaaagggcactggagtggaaaccagaactgggtgacctcgcattatcattaactgcctgtgtgtccttggggaagtgacagcctccctgggttgcagttatcctatctgaaaacaaagaagatgaagcaaggacagtaagggttcactctccctcccacagtgcctaactcaggaggcaatgttctcaattgtccagagagggaggtcacccaaaatgcctacaatggcatgtgcgatgtgcaaaagcacattccaaaattacaattgctttcatttacttttagtcataacttatttcaaaagttcaaatacaattagtgagaacgatttttgttaagctaaagaaacacgtgttaaaggtttggaa

SEQ ID NO: 62293 - DNA, 1065 bp, Homo sapiens
gaaaacaaacttgttctttattgctagcagtaaggatgccatggaacctagagctgctatgggccaccatgtggcaccagtaaatgaaactgatatagatggaagcaaagccaaaaggcagagatagactggctcctaatgccactgatccagccagcccttctgtgaacttttcagtctctgggccaataaaatctcatttttgcttaagcccggttgaatcagactatatacttgcattggaaaaattcctgctctaatctaattgcccaagcagcccttaccttgaggataaacttgggaaagaatccgaccctcgatttcatttagcaatctatttcttttgctacatatataatacaagaatagcccatgggaaatttttgcttaggaacttataattgcaactgaggacacaaaagctcactcttttctaagctctgataatgtgagcaaacaagaaagataaacagacaacaaaagctacaccaacgacagcctgagctctgatcagcttgtcccaaacactgtaaagctagatgtatgcttaagcactgaagttgtcacattttaagttgctgatgcaagtaaaaatccacagtacagagtgtgatgttaggagataacaaacagctgaggctgcctactcaaacatttctataaacaacaacagcgagctttgaccccagactgaagtttcgagaaactgtgggtataatcctctatccctttacaatccagattgcaagtatctgcaaagaaaaatgcatgggggaaaaaagccactggtactacaaatatagcataaataaatactatagaggagaaaaaaaaaatgagcaaccagttgtggggtttttttggtggacgtttttctattcagaaccatattctaaatttctatgtttttaatattcagtatcttttcatttgacacttatatttgacatataatacaggttaggatattctgtttatgttcattttctgtctcatcagctatagtgtgagtcccttcaaatcagggccttatctttccagacctaaaatagtgtctgacacaaa

SEQ ID NO: 62294 - DNA, 4119 bp, Homo sapiens
tatccctactcacactcccctatcccatctttcccttcacctgaaagaattcatcttgttctccgaaattcatctcaaacattttccaatagaaagctttccaatttcccctccccaaggctatgtttccacaacattggtgtttacctttatcatatatctggcttcaatgcaattctttattcatgtctgtttcctcttctaggctctctgctcctttagagcaacaatcatatctttttcatctccacaacccagtatatagccaagtgtgcactacataggtgttcaacatatgtgaatgaattagctaaattttaaacaactagatagtaaggacaagagtctatatcctttacatctactaaaacacccagcaatgcttcctcataatagctaaaataattctgtttgaacgaacgaattaacatctgtatagattccctcatacacacctacatagatgaagagaggggtgaaatgagcatatatgctttactgctttaacccataggcaccttgaatttgagtaaataacggataatagaatagtgaagggtaattaagaaagcctgatggtataactaattccaaggaacatcaagtttccaaatatctggtgtctctgaagcatgatgctgggaagacagatcatcagtttgacttacaacagaattacaaatacgtacttattcaggggacattaaatttttcttcctctggtgtctaacaaaaatgagtccccaaaaactctttagaacatgccttcacaacaggatatgactgccattttattgataagaaaactgacattacatagactaaaaatacatagcagtgcagttggtgaaagtaatgaaacagaggtctgctaaccaacaaacacggaccctcacttattcctctcatttctctcttctgtttcctacgttcttgggaagcctggatatgatagccaagtcttcctttcgttcactcaagaaaaagcatttaatgttgaccaactctgagacaggaaaagcctaggccctggagctactgagacacagccttagccctccatatgcttagtgaagtccagtcaacctctgagttctgccctttggcatctccacaccttttttggtgttccctcgtctaaagcacctgcatctttctctggccattttactaatataaccggagtcttactcgtagctcattaactttaggcctcactgagggaacctgggcactcaggtgttcacccatctcctctaccacaactttctgttctcaccgtgctctcaccacagcaccgtcatccccacggagggttttcgagcaccaaaagagccacccatgcaaacaaactcccctcccagagataaatctgtcaacccctgccgtcctctcgctctttagccccacaactttcactaccgggccctctccccgccatagtgccaagagcgtccagaccacgactagggggcgtgcgcgcgccgggaggggaaacgtgcgcgcgccggggggtgggggggcgcctagcccagcgccagcacggaccatgcacagatcagcaatcgctggccgccaggccttcggagggtctgtccgccgcggcttccgctacgggcggcctcgcaccttctggctcagtacgcgggactggcgtagccgctcctcggcactcatcgcccgcagacgctgcttcagctctccccgcaggctccgcttggcgctgctcaccgctgccgccgccatctcacgcccaagccgagtccagtcccgccctcggcgccctgggcgccctcgggttcggtctccgcccctggccgctcccaggtggatccgcggcctaggggcgggtcggggctcggggaagcgcccccaccccgcttccgggacgcgggcccgcggcgcgccgcgcgcttacctcgcctctggcccttgggacccagccctcgtgcggtccccgtggtccggctcgccctccccggttaggggagcggtggcgaggcgccgtcgctgccctgccgcctgacctccctgagcctgggccctcaccgggaccgcggaggcggcagcgccactggcggggatggtaaagatggccggcagtacccacggtgcctggcatctcttgtactgttcagtagtgggacttcaggggccagaaaagaagggcaaggcaggacatgtagcgaaatcgtcacgagtcgcttaactacagggataggtctgacagatgccccgatttccttcttgtgcaaacatcagagtgtagttacacaaagttactacacacctatgctacacacctgtacagcgtattttgtaccgaatactgtaggcaattgtaagcaccgtgatacttgtgtatctaaacacagaaaaggtaatgtgttggttggctaccacatcagtaggtattaggaatttttcagctccattataatcttaagggaccacagtggttgatggaaatgtccttatgtgatgaatgtatagatgatacataatcgggaacactgctaaagcaataactgtagtgtaaaagccaaattttgcgggtttctagtgtgaatgtattccaggtaatagtgcccacataggtacttcctgttataaccatcagtgactgttcattcccaccactcagctctgattaaaacacaaaaatgaattaaaactaaaagcagttggggggtgggtgaggcacttgcaggaagaggtaaaagaaactgttaagtcttaaactgctcccagtagacaggcgcctcagatggcatagacggttgcctctcagatgtgacttcctaagaaaaccagagctgtctctgccaaaaatacgtccctactgaccgccccagtgtcttaatccccaccgttaagaatcacacctcctaggtaaagcattaattaagtgcccggtgagaatgcacatggcttgagaggggagttctggcttctttatggaatctatcaacagcttccagggaaagctaatgcaagtcccagggggactgtgttgtaagaaaaagggaaggccaggcaggtacagcgtatacatagtgcaattagatttgctgacctaaaagttagaacacgaggtctaacaaactacgtacttttctaatctgttcatttttaccaaaaaataaaaattaaaattaacactagctccacgttgaatcatttaccaattttctttgttcagaatatcccagagtatcctgcatatcaggttgccatatccatcaaccccaaatggcaagccagagagagaaggctggggaggaggcatcaatggaaactcttaagcagccaggggcactggaaactgcagaaagcatgggaaggaaggagggaagagggaagccgacctgagtctgcttctagcctgagtccgcttctcagtctagtctgcagtctagcctagtgacacagaaaaggacttttggggtaatggcacaccttaaaagtctgcctggggcagaaaagacaccgccttcctggtcatcatcccataattaattgcctggatcctgtgttgagcttttaccctttggctgaatttccagccagactccaaaactgaagacaaaaatggcatatagagaaaaatacatacaatttattcattaaatagggacaaaatttctgtaactctggaaggtcaagttacatcatcaaagttgtttatttaaaagtagaagtatgtgttggcaatcgttttcgtaagagtcagaaaaattaggccggtttcacaatatggagtgtcctttctggtcaacagtattgcttcaggacagaagagcatttcacagatctttcctgtaacttctagaaaagtcatccagccagatttaggctcaagcttctttacaaagccattttcctatgagagaataaatttaacattttaaaaatcattggagattaagtatgctggaataaaaagcaaaaatattttcatttaaataatgcaaataatcttctatccctctaaaggagcattgtgtaacagaaacacagtgtggcctacatctgtaattttaatttttggtagccacattttaaaaagtacaaaaataggaaaaattaatttttaagatatatttagtgataatgatt

SEQ ID NO: 62295 - DNA, 2396 bp, Homo sapiens
gaaagtgatattaaggtgtgtgtcacaatttcatcaagaagtggcttatgacaatacagctttggtttaggtattaaaataggactcttttctgcccataggaggacatggaaatgaaggatagatgtgataaatgtcaattcagagctctgcaaaatgccagactcaattcttgttttaaaatatcagagccagggctcttgtttcacccttgattcttcacacaaaacaccaccatcctctgacctcttcacacagagcaagctttaccccactacctaaaggggagtgctgatccacatggtctccccatccacgctagaaattgatcccaaacaccaaccgctgcatagacgtcggcgactttggtctgcaccccccgaacttggtgatacctcatcaagccaaacccctccccaacatccaaaatgcccagaccagcatccgaaagctggtctcctatacaaagcagaatccctgcctacaaagcagtttcccacctccgactcctccccacggcgaacagcccttctggatccaaccaacccaccaaccccaatagggcccagcacccagagggtccacaatccagagaaggagctacaagccctgtacttgcaagcctcgaacccccaactccaactgacctcccctctgccagagcaagaccacgagtacccgccgagagcggacctggctggctacacaaagccaggcgcccgaccagagggatcctccgggacgtcctccgccaccggggcgtccccgcccagccccgcccggcgcccggcgctcaccagctctcctccccctcctcctagcctgacagacgctccaggtcgtctagcaagccgccctcccccgccgccagcaagaaggtggcgtctcgcagctcctcgttattcgtccgcctcgggtccatccggccccgccgcccgactttgcgctgagacccaaggggaagccccgaggggaccccgcgccgtaggagggagtggaggagccggcgaaccgcgatggagccggggcccagcacagcgcgagcggctcctcggctgttcgtgctgcttccccagcttcttcaccggcacctgcagcttccgcacctcctggtccgcgttcacgttagagttaacgtcctccatcccggccccgctgcctccgccgcccgcggccctctcgctctcgcagcaacaagggaagagccggaggaaagaggcgtccacgccgctcactccagccgaggcccccgcatatagcagggccaggccccgtcgccagggttcccccagcgcgggtcccgaagcaccgctggccacagatgaaccgcctcctcagcgcaggtccgggattcggggaggcagcgccaatatccggtctctgcagccatcttccctccgtccctccgcccaccgagggtcggccctgtaggtgacctcagagcgtcggggatgggcgtggccccgtcgggcgctaagaagacctagcgcagagaggaccgccgagctcccgacggggcggggccaggtgtgtgaggggcggggattggacccggaggggcgtgtctggactgccggcggaagtggaacgcggcctgacctgcgacggaaagccactgcaagcccggaggcgaacagaaggcattccgcgagccgggctgagttggtgaacacggtcctcgttcaccccgcctattggtctgggcgtgtggggtattctccacccacttatacggcgtgtgggaccgacgggcccgtcctgcccggctccggtccggatctcgagtaggcgctcaatgggattcggggagacgtagtttactttgttcagcaaatatttaaccgatgcctattttaatgggagattgtttccgctggcgggagcctcagagaccgcctgtgtcctttaagaaacccgaatttcagacagttaagagaggtctaaggtcaaaataataatcataatttcttcttactggccagatactatgctaagccctttttaattttattattattatattttgtcaccgaggctggagtgcaatggcccgatcttggctctgcaacctccgcctcccggtttaaagcgattctcctgcctcagcctcccgagtaactgggattacaggcgggcgccaccacgcctcgctgatttttgtattttagtagagacggggtttcgccattttggccaggctggtctcgaccctgacctcagggtgatccgctcacctcagccactcaaaagtgctgggattactggcgtcagccaccgcgcgcccggtcgtgctaatcactttgaaaggcattatctcatcggttaaaacatagttttccggacttaaaagtttacagcacactggcgcagaagatggaaaaccgctgcttgccttt

SEQ ID NO: 62296 - DNA, 909 bp, Homo sapiens
tctgagtaaatgggattacaggtgcacaccaccacgcccagctaatttttgtatttttagtagagacggggtttcactatattggccaggcttgtcttgaactccagacctcaagggatccacctgcctcagcctcccaaagtgctgagattacaggtgtgagtcaccgtgcctggcccccatttctttttaaacaaaaatattattgaactcttaccaagttctgaactgagctctgaaatgaaatggtaaacaaaaacagccatagttcctgcccgtacagaacttagtatctattggggaaacagatatattgatttaaaaatcacacaaatataaccctgtaattgagacagtgacattttgtaagactataattgcagaatttaacctagtcagggaaggcatccagaagaagtgaactttgagctgaactctgaaaggcaagtaagcattaaccagatgcagaggcagaaggaacagcacaggcaaacatctgtggcagaaggtcctgaaaacagcccagcaaagctgcagaagagacagactccggaggaggacacaactgaaatgaagtgggacaatcacagtagagaacaaaccacgtagggagggcctggtagattgtcagcaaggctctaatttacaatgacaaagtccttttaaatgacaaggcaaacaaaataatggtgcttcaggactttattcatggtattaataactttccagtttaaattagtagttgcagtgatttttatttctctcattttgtattgtttacattgcttctgatgagtgtttattatttttcacaaaaaaccgcttttttcttttcttttcttttttttttttttttttttgagacggagtctcgctctgacaccaggctggagtgcagtggcgcagtct

SEQ ID NO: 62297 - DNA, 1119 bp, Homo sapiens
aagggaaggccaggaaggtctagaacaaggtatggagttcccatatcgcaatcagatttgctgacctaaaaattagaacacaagatctaacaaaccacgtaattcctaatctgttcatttttacaaaacaaaaacaaaaacaaacccatttttttaaacactagctccacattaaattatttacctaattttctttgttcagaatatccccgagtatcctgcatgtcgggttgccatatccatcaaccccaaatgtcaagccagagagagaaggctgcggaggaggcgtcagtggaaactctaagcagccaggggcactggaaactgcagaaagcataggaaagaaggaaggaaggagggaagagggaagccgacctgagtctgcttctagcctgagtctgcttctcagtctagcctagtgacacagagaaggacttttgcgcaatgggcacacctgaaagggtctaccgtggggcagaaaagacaccgccttcctggtcatcatcccataattaattgcctggctcctgtgttgagctttaccctttggctgaatttccagccagacccaagaaattaagacaaaatggcatatagagaaaaatacatacaatttattcattacatggggacaaaatttccataactctggaaggtcaagttacatcatcaaagttgtttatttaaaagtagaagtatgtgttggcaatcgtttccatatcagtcagaaaaattaggccggtttcacaatatggagtgtcctttctggtcaacagtattgcttcaggagagatagcatttcacagatctttcctgtaacttctagaaaagtcatccagccagatttaggttcaaacttctttacaaagccattttcctataaaagaataaatttaacactttaaacatcattggagattaagtatgctggaataaaaagcaaaaatattttcatttaaatagtgcaaatagttaatcttctaccccttctacccctgttaagcagcagcatctaacagaaatacagtgtgacctacgtctgtaatttaaatttttttgtagccatattttacaaagtaaaaaaatagataaaactaacttttaggatagttttagagt

SEQ ID NO: 62298 - DNA, 1484 bp, Homo sapiens
agagtcaagtgagagaggaaggcggcctagatgcacagggtattacagcatttcaaaggggcagccagggggatttgctgatggatggatgtgggctatgagagacaggagtccaggctgactcccaaggttagagaactagcacttaagtgtcatacatttctgcctgacttgagggtcttttatttttcactaaatgattttagagtctcaagtaaaaattcaaaagacatagaaaattttgccccaaaacttatttaatcaaaggatatatatgaacacttgagatagtatcaccttgctgctagatctttataccttttggaaatgcctttgccaaagtgaacacttagttaatcatctatacatgtctctgtgtgcccatttatttggcctcaaattgaccggactattatttagagtaagaggatgacaaagaaaaaaaaaaaaaagaaaaaaaacctcttgacctaactgtatgacccaacctttaaaatggtggttactgggaaagcaccaactctgactgtacatcctacttcagaagggcaaagaattacctatctaaacttcctggaatttcccacgactctcgtagttgcacagtatttgacagcttggaaagcactgttttacaaaaagtgttttataatcctttagctttcctttaaaggtaggtaagattgttttcattaaatattacatatataataaattatcatatgtcatgtcatattattatatacattatataaggaatctgagtctcagagtacctcagtaatttacccaaggttatacctctagtgagtgagaaaaccagagttcaaatattcagtttcagtgttggttcgttgaatcatcccatcagcaaatattgttaccttctatgctaggcatgaggtacacagtgatgcattaagtagacacaatttctcccatgtggagctgagtgccaagcattctttctactcccccagcatatgcagaggagaatgcttcattgaagggggaggaagtaagaagacccatctggttcaaaaggaagggtgatcccaagagaagagacatgagtttcatctcatgaacattctaatggtttttaagaaccatcctttccttatgaatgctggaggcagccaaatggcactagctctcctgtcagatcttgtgagagcacatcctctcagcacttccaattaggagagcggacaggaggaaaccatggtaaatatggaagaggacaaaaagagagatgagaagccacaaacaaaagaaggcaggaaggcaggaaagcaggaaggcaggaaggcaggaaggaaggaaagacaactgacaaaaaggagaaagagaataacgaaagagattatgagtcctattactgatagaccagtctcgtttcttcccattaggggatctgttttacatggtaaacaaaaatcctaaacttgtattgagtactcattttcaggaattgtttcaag

SEQ ID NO: 62299 - DNA, 534 bp, Homo sapiens
ttctttggtcttcaccttccacctactctagaatttctgatagaaaacaaaattctgctttaagcctgacttaattcacatttttaactcaggtaaactatccgatgtgtggattagaaattgcaggaccagaaagagcactggacttacagtcagagggcctggactcagtcccagccaaatctctctttctttactcagtatgtaccttgggtctgtgcttaatttgtaaaatgaggcaatacatgttgacctcagagggttgaggtgaagttcaaagagatgacctatgtaaagcctctatcaccatgcctggtaaaacgtacgtgcctaatcaaagctagttcctcattgttcttttgtggactaatgaggaatttggcctcccaatcatctctttacctatcaaggatataacttcataggtgaaatgcaaatctcatttgatttagctatggcagcaatcctgagaaaaggtttgcagtggatggaagaaaaaggagataactcatggtcgctggagaaattgaattc

SEQ ID NO: 62300 - DNA, 1975 bp, Homo sapiens
acttcagggggagccattctgcctatcacccctagttccagcgcagcagcccagcgtgcaccacgcaggtgggaactgaccccgtgcttttggaacaggctggaactgggggtgcttgtgcctgtgcatgtatgtattgcacacgtgtgcatgcacgcttctcgtcttgcttctatttccaagtcccagttcaggacagggcagagaactgctttccagtatgcgccctgagctcggactttgcgcttgcagactgaggcgccggcctgcatgggaagacagaagctcagaattccttcctgcacaagtggcaggtggagtgcaactctttttggtgcctcagtccaagacagggacacgccattccctgcgaggtggcaaaggtacctgaacctacataaccaagcccttaaagtctccgcggcacctcttaatcgccttcccgtagctattggaggtagagaaaccgcggcgggaagcgccccagagagggcagtggagcaagggacactggaggtgcagaaggcggaggagcatctcctttcgctccgccccgcctcttttcctgcctccggccaattgccgtgcgctccgagccttgaccccgcctctccccgcctcctccggcctgcggccccgcccgcgccggtaataattagcgggcgggcggggcccgcgcgtcagccgcgggagccggccaatccagtggctctcctccgcggtcgcgtcataggccgaacaaccaaacagaaaagtttaataaacagcggacggaggggccggcggtggcggagccggagcaagcaggggttcggcggcattacctgtacccattcaccggcggctaccggcggcggcgcgcagcgtgtcaggcggagagacccgccgccaggtgaggagcgcggcccgcggggcccggcttgcccggcgctgcccctcccccgcctgctcccttcccccacccggctgcagctaggcgaggcccgcccccggcccctcccggcgcccgagagccggaagcggagggcggccggccggcgcagcaggtggtgggcccgcgggggccgcgggcgagagggcgaggactcccggctccgggggtgggggccggagatcggcgggttcacctcagacggcgcgcgggcgcccgcggccgggggccgcttcctgtcagggtggtcgcgctggggtcgggagcctcagttcttcagggccgcggaggccgcgacgcgcgccgccccgagcgggttgcgagcggttggctggcgggggtcggaagggccccgggcacactggggcgcgtcagttccccgcctcctccgagtctcaggtcctcttcgggatgtttttccacctgcggcgtttttcagaaaccagccggaggcagcccggtgtctccaactcctgactggcaccgggaagggaattggtctctttttttcctgcttgggtttagcttgcttaggattctaaattttttgtctgcttttttgaaatagttatatttaagttttagctacctaaaaaagtatgaaagaatattgtgtttgaaatctttttaacttggtttttaagtcacgtgctaactatcctacacagttgggacgctatgatttaccttcacatctcggaagttgtaaccagttgtgaggaagttaggaccttggggttacctaaagataatttatattaagttgttgggccataaaaactgggcagaattggccacgcgcggtgactcaacgcctgtaatcccagcactttgggaggccgacgcggactaatcacgaggtcaggagatcgagaccatcctggccaacatggtgaaaccctgtctttactaaaaatacaaaaattagctgggtgtggtggcgggcgccggtagtcccagctactgggaggctgaggcaggagcatcgcttgaacccgggaggcggaggttgcagtgaaccaagatcgcgctactgcactccag

SEQ ID NO: 62301 - DNA, 699 bp, Homo sapiens
taagtcttagaaaaaaacattggtttgttcctcttagcaacatattgtaatggattttctgttgccgttttacaattttcaggtaaaatgtgaactctattaaaaataatctgtctttaaagcataacttcaccttcattgctccataaaaataaatgatttagattaaaagcattgtattttaaacaattggtcacagctgcttctgtgagattttcatttttgttacttagtttatttttcacctagacaagggtaagcaaacagtatatgatgggaaaactgaaaccttatgtactgtttctttaagaaaccagcttatccaggaggttttagtgtgtctaacctaacctgctagcaaggaaaagttctttaaaataatggatattagccgtatccaatcacaattatcagtttcactaacagggaggagattttactcttcagccactagaattggagaaggtggagcttggtattcaggtttggttgctttggagtacagcttcaagtgaagttaatctgaggtgaagcaaacagaaaattgtggaggttttgttggtaggatttttgttctaatctttttatgatcctttattttataattttgctcctttatgattctgtgtgtgctaggttttgtcactgtttttattttctgatgcaaactgaacactaaaattaagcagggaagcagaa

SEQ ID NO: 62302 - DNA, 3091 bp, Homo sapiens
tctcttctcctatttctcttttatctttcctttcctttatccccctcccctcctttcctctttttccctcccttctctctctttccacacacacataacctgtatatgccaggcactattctaggtgcttcacaaatattaattcattccattcttatatcaactttgtgaagtaggaactattatcatcaacattatacagagaaggaagctgaggtagagaaagtttaagtaacttgtccaaggttgagcatcttgtcaacgtcattttactactggcatgtgaaacaggtgagttatattttttagaatattaattctcattaattgaagccttccaaacaggcctaactgtccccttctctgacatacaagtggaagtgtcatagctggacggagcatcatggtatgaaggcagaaaggacgcgactgggtgttcttctgaagctcagggagcagctcttggggagaaagtgtttccaggaagcggacaagagttctgttgagctgaagagcagggcagcagccggggcgagcgaggctggagtcatgcagggcagagccttaaatgctaagctggggtttgctctcggtaggaccagctagctgccccgagcgggggctggaaccagatctcccccacgtggactcgcggacagggcggggatcaggacgggggcggggccaggggaggggcggggctcggggagtgaggcaagactggagggcctgggactctcgggtacccgggccaggggaggggcggggctcagggagggagggagagactggatgacctggggcttgcaaggcggggcgaggggaggggcggggcgaggggaggggcggggctcagggagggagggtgagactgtggaggacctggggctcgcggggtcggggcaaggggaggggcggggctcagggagggaggagagactggaggacctgaggcccacgggggcggggccaggggcggggcggggctctggaagggcgggcgagactgtggaggacctggagctggcgggggtcagggtaggggggaggggcagggctcggggttcgggggcggggtgttcacggtgagaccaaaagtcaggtaggagcctccggggtccctgctgtgtcacccggacaggccgtgggggcgggcaggggggcggggccgggcctgaccacagcggccgagttcagtcctgctctccgcacgccaccttaggcccgcagccgtgccgggtgctcttcagcatgtccttcatcccggtggccgaggattccgacttccccatccacaacctgccctacggcgtcttctcgaccagaggcgacgtgagcagtggggctttggcgtccgggcgcggggagggagtggagtggagtggagtggagtggagtggagtggagtggaatggagtggaatgaggggcgggatggaggcttgtgccatttttctcttaagattcgttccgtgagagtgcctatgggctcgagtcccgcctcgtaactttctagctgtgcacgttgtttaacttttcagcctcattgtccgcaggtttgctgagaattaaatgcaaaatgaaatgaatcgtgtcactctcccagacaagcagagcaagcaggattctgttaccggaagctgcagcacacaggcatgctgcctactccgaggtggttgcggtgtgtttctctcgcccaagaggccaggtcagggctggtggttcatctcgctggatagcccctaaccctagaacccgggaaatgataacccggtatgcgtagcaggtcagaggggcacgcgcgtttcttggcttagagttgtgagatctaagatggcaagtgtctctgcctatagctgaaattctttcagctcctggtgtgggctccctggcattcccctactgatcagaagaaagagggcagggaaacaaactttgactaagtcagtgtagtctgattggtagaaagaagtatttgaaaactgggggtttatcagcaaatagataataagaggttccctaggttggaaaagcagattcccttggatttgttgatgatatttttggcttagatttctgctcccaactttaaaggtaaactcctgattcatctctgtaagccatagaaccccagaatcaggaaatgtttgctaaacgaggggcctggcagttggcttcttcttggaaagtggggttccctccttcccccatggcttgtcattggatgcaagtggctggccttttgtgggcctgtctgcggtaagtgctttggtctagaagagtcaacttgtggtttcacatctggccgggctgaccagatgttgcaaggatacagaaagtggacactcaatcccctggaggacacaatctgaggcacattaaatcttaacttgtgatggccaacaacctttctgcagacagagccctccctctgccctcctcaaacactttgccctcggcagatgtgtcctccctcacctttcctgggagcacaaatccattagacagaaacatttgtgagaggcaggcacaccccagtagggagctctgacttgctttctcaggggaatcgaattaatatccgttagagtgtggctaggtgttttcagacaccatgtcccgctgtttcaacatcagaatgtgcagggcagccactacagatgtctggaagagagagccccattccgctgtcctctgatacagtgctgggggtggagagttggccctttggccttccagctgaacaagcctcttctgaagctttctctgcaggcattggacattccaaccgtgatggctgccttgccaggcaagactagttgccaaggcaaaacctcccttcccccatgtcagcagtcagcctttcctaatttgagtggaataacaatgaatcctgccatcactttattcatttttttttattcagcgaatgcttatgaaccccaactctggtccagattttgcctgggctccgagttggcatcaaagacacaggagacgccttccttccatttctggttgatggactagtaaggtgtacaggggtgctctctgtgaaggtaggggtggtggcctctgagaacggggttgta

SEQ ID NO: 62303 - DNA, 4267 bp, Homo sapiens
gcaacgtcaagagaggatatgcttttctccaggttgatgaataaatgacaaaactaagagcagaggtcctgagagtttgagttagcgggagagaagtggcaagggctggcaggctggctggccttccattggaaggagggatactccctgggttttcctgtacgtgatcttttttctccctgttttggtcttagcctacactcaacagcttcatgggcctgggtcaggctgcctggaaggaggcgagagtgttcttgcagaacttgctgtctgtgagccaagccaggctcagagatgacaccgaacttcggaagtggtgagaagcacgtggtcataggggggatgaggggatgcagcaggggaggtgaaggctgtgtggttatcagtgccattctgagtcacggcttggcagccttagtgtggccaagtcagacctgccctcatccagcccctgcctgagctgcctattgatgggagggctttgggaggactgggattgccttggcgcctggaatggagctgcccaagctaggccaggccaggcccattggccctctctcttactcaggctgtcctcattagcatcatctgtgacctcatctggtttctagagtaggaaagagtttccacttgtctagtcccatttcctagggtagaatatagaaacggcttcagtgggtggatgtcctctcagctgtgaaaggttcagcatagctctggccccaggccagccagaaggtgcccactggagattgtggataatcttggggatggtctgggctgagcccgtgggtgggaccgcgctttgctgcctacttgactttgaagcccctggttctgtgtttcagtgcattcatctcccaggcttctgccacgatgcaccttccagccaccataggtgagtgcagtctcttcaccaagataagaacggagcagcttcgtgggccaagagggctggccaggtgctttggttctgcatctgtgtggagggtccctgctggtggggggagatggaggaggggctctggggctgttacccgctcctcatcactgacctttcccagcatccaggcccggcattcactcaggctattatcttgcctcaggtagtgagttgcagactgctcaagttcatgactagccgcatggctccctgcacagcaaattgctttccttcccccaaaggctatgggacaaattctctgagctcagtctgtgagtcagcagttttgaggatagaggccagagggctatgaagggccccagtttgagcacgtggcaggatgtctggttggagtgtcattcaggaagttggagctgttgaaactctcaacctgaagcagagagagaggctggctcagcctgcggcccaaagcacagccctcttccttgtgcacaggtctcctctgctgggctacctgggcacctgtgagctgaggggccagttgaccctgcccctggggtacactgcctctctggaacagctcctgctgtccggggagagtcctttgctgctgggctgcttgggctaagctgactggaggatggggttggggacaggggccgagtcacctgcctcctcccagcccctctcactccccactctcatacactcatgggactgtgctatgttttggcaaaccagctgttgtgcaaaccatatgtctttcagggatatcatgtctggttgactgatggtgccctttcttgtttttttttttttttgttatggatttattcttttgaaaaatctctcagctattacttctgtgcaatgggactgaagatgggaagcagcagctaaggctccacctgccctgtggactgttcttcctctcctcacccttcaccatgactgttgctagtctaggctgttggtattgatgaatatccagcattttttttttttgaggagacatttaggaagataaaacaggcagactgtcccaactggtttttctttcagatttttaattctccgaatggtagatatgcctacagcttgctggctagcccattcagttcatcataatcaacaagcactgatatgcatctgcagtgtgcaagcccttgtccttggcactcgggcagagtccaagaaaatgaggactgggctggggctgtcctggaatgtccacagtctagcaaagatgtgcacacacataactggagcaccagtgggaagcgaagcctgccccagaaggattcaggggaggggatttggagggggaagagatcctgctagagagagcagggagggcttcagggaggagcgggcctcaaagagttgccaggatttgaatacacagggacaagggagaagtcaatcagtataggcgtggtgagggagcctgtgggaactcgggaatggcagttgtgtgtgggaaaagtggggagcctgagaagggaggtggtatcagccacttggtgttcacattccactgtcagtttcagaaagtctggactcctgatttcttatttgtttctcagctgagggctctaaaaacaaatcttcagtgaggatattttatattgcatttggtgctgccattgctggctgcaggctgagctctggatgtgtaaacagtattgtgtgcacactcgtggctccagtgcttggaacagtccattcttcctgaggcatgtgggttgctgatgggatctgttgggtctttcctctgcaggagactacacagacttctattcctctcggcagcatgctaccaacgtcggaatcatgttcagggacaaggagaatgcgttgatgccaaattggtatgaactgggccaaatgtctgcataagttcaaagtctttcttttcatttccagcagcatatttgtctcaggagctgccaagttcttcttaaagtaaactggggaggaaaagcagttatgatgttgcaacctctggaagcagtggtctcagcttctggtctcctgctcagcttggcttaggacttgctgtgggatcgaagggcaagtcccttaaacttccttggacagcaggggttggaattagattcccttaatccctatgctccttctggagtctttcatttataagctgtgtattattgtactatgggcaagtcttagactctagcatgctccatacttacattttctgatgaatgagaatcctcaaatgtgcccagtgctgtatattcctcaacatgtgatcggtttcattcatttgtttgatcctcgtagtagttctctgatgtcacaaggccatgattgtaagccccattttacagacaggaaaatgggctcagagaaggatcaacttgcctgagcacaacagggccacagcctgtctcccagcccccagatcaggccattgaccaagctgaggatgcagagctgggatccttgccctttgttctgtgttgtcccctggatgtgatggttccttggaactgaagagggcctggactcagtggcaggcatacactccaggccccagtgccatcagtcacacacaggagctgggttagggacggggctttactctctctcgagtgagtgtctccagtaggctatgccatgaggggagggtctgttagaaccaagatgaggaagaaagaaagggagagagagcagttccaagccagagatgttgaacaacaaggccaaggttgcagaatgaggcaggggtgaatctgagaccagaacccaggctccaggttccaggcttccacgtgagatgcgcaaatatttgagaatcttgcactgtacaggctccaggctgtatttgtccccagccagcttcaacttgtctatctgatgggctgagtgtctatatgagtgtccttggcagtgatgacccagtggactgcccagccccagaagagctggctgtcacctgtgtgccaggatcccagtggccaaagggcaggggcaccaggaagtgagaggagagccgggacctgggaaatgagtgttgactgtgtctgaaaccgagtgtgggggccgcagccatccttgccccatgtccttctgcagaataagagtaaacaggccttctctagccatgtttgatgcaagatggcccacagctgtgactttttagctttatgtacatagtctttattataaaggtaacatatatttactggaattaacccaaacactacagaaaatatgtaaacatttacaattaaaaatgtgtctactctttgacctgcaatgctcactttcatgcatctatcctacagaaataaaagcaccagtgggttgtatccaagagcaaggatgttaattagc

SEQ ID NO: 62304 - DNA, 1392 bp, Homo sapiens
ggagtgccgtggcgtgatctcggcctgctgcagccttgacctccctggctcaagcaatcttcccacataagcctcccaagtagctgggactgcggacatgtgccaccatgcctggctaattttgtttattttttgtagaggtggggtctcactatgttgctcaggcttgtctcaaactccgaggctcaagtgatccttccacctcagcctcccaaagtgctgagattatagacgtgagccacagtgcctggcctggtttttcatgacatgaatacaaaccctgatagtttcagttttacaagcctcatgtggctgtcaagtcttgaaaggcaaaggctgtatgggatgaagaggaaagagcagagtggcctgggatgcactgaagggaggggaggctgctttggagctcaggggagtggaaggaaggccgatggcgggggcagggcacaccactgcactctgctttcctgaggcgtccatctgacctctgacttagaaacacagtggattcatgccaggcccctgtggcagtcctggtccatggctggagtttggaaatacctgacctttgctctctaggtgacaagtgacctgggcggcagatcagctccagattctaatgaactctcccccatgtaaggctttttttgtaggccctggaaacagattgggagagccgatccccatttccaaggcccatgagcacatttttggaatggtccttatgaacgactggagtggtaattactggagctctgctcctgtagagatgacggggaggaggctggggacttggggcaatttcatagaagctgaagatctggtgcaggtcaaaagtggcaggtgatgcagtgactgagagtgggggtctgggtatcaaacagactttcagctctaagaactcgggccactcacttaactcctctgagctccaattttctcgagtggctagggacacggctgacatcataactaatatttactgagcacttatgtgtcaggccctgtgcttaacacccttcgtatattctcccgctgatccctacacggtatgtgcaatattatcttcccattttacagatgaggaactgaggcacagggagatttcagttagttgctgaactaagatttgaagcaaaacagtccagcttctgagcctgagctctcaaccctttgccatacgtgggaggaagatggcaccataagccccagaaagtgtctctctcatagtttgagaatgagcttccagccccttcctgggagatatcctgaccaccgtttggtcatccttctctttgctgtaacctggcacagtgccctcaaaggacctctgtccttggcattgaatgctcttgcccctttgtcctggggcagcctgactggggctgatct

SEQ ID NO: 62305 - DNA, 2240 bp, Homo sapiens
ctgcaggaagctcccaaacccagccctgctgcctctgaggctgcttgcccactgagtggacatgccaggcatgcagaccatcaggagggaagctctgtgcccacggcatgcccacagcagagtgcctgggagttcctggccacgattacttccaggcagccagggcatcattctcccttgtggtttccctggccctggcacagttcttggagaaaacacagaattttgtaaccttaagaatcttgcaagacccgggggatctggccagttggcaggaggagtccctgcaggtaccaacattgcacaacctcccaggtggccatcaaatcttgttctgtgcaaatggcgccacctggaccccaactcatagaatgcagcttggagcccagcaacagggagtccctgcagcctctggttcccggcaccgcttggtctaccactgggtctaggccttgacccctggttccagtcctcccttctcagcctgttgcaatctgccccactccatcactggcaacacctggccagagtcacctgtgacccgatagtcagtgtcatgaccttgtgtccccttcagcatggacttcctgtggcccctcactcttgttggcattccctcaccccttggtttctggcatgtgacctgtcctcgttctccagtgtctctgagtcctcacgatgcccctctccaattctgacctccctgtggggatccaggctgagctcccagccatttgcacatcctcgcttgagcatctcaccacgcatttgctgggggcctctaccaacacccggtgctggtcctgcacccacactgctctcccatgctcctctgcctctggggtcatctcatgtttgctgtgctacaaacaaccctgaggtctttccttgcaagccagttctagtgaagtcctgtggggctttcaccctcatcccttgctctctcctcgctgctccctaccacagcaccccctgcccaccctggtcattttcagtcgccaggacttgactttctctctagctggcagcggccttgtctagtctccctagggctgcaaggccacagcctctctttgcttgtcctccagtcatctgccttcttccgggtcggtcatcacagggttttgcctgccttcctctgtgccagcccttccccaacaccatttaggtacaacactactattccccctctgaactattatttacttaatgttttccttcagagtggctcccagtttaaacttaatatattaagaagggaactttatattcctactggcatcactagctacactgtttcataaccattagtatcaccaaaaacgatctcatgtcccgtgggtgactcatgtaccatgctttggaaaacactgcttttggccggagtgcaggcgttctggcccagccatccaagctgcctccctagctggctccagcaccagccagggctgtctacttctgttgtgacccctctgccttccaggggccctgcaatgcgctttcaggcccagcctttcctcacaggccaggctttgttctccatctcggcctgtctgctgcccaccttccctttctctcccctcctgtggctttcaggaacatctctggtttggctcctgtgacctttgacctgctgatgccccttccttggctgcatttcctagagacccacagtatgatcccccctactgctatccagggacacagtgctgggtccctggagagggaatgctcctgctgtctcagaccctctgcctaggggagcaggtgctgctgggggcctggctggtatgggggcccagccgggtgagctcagcccacctgccagtgacctctgtgctgtgctttgccctctcaggaccccaggcccctgccgtatctgtgccatgacgagccctacacatttgacatcaacctctctgttaacctgaaaggtatgttgtagggggactgacatggccaggagctctgaggcaatgtgtgcctgtgtgccttgtcctgaaggctcctgagctttggcaagggtgagggcacgtgctacagccctggagatgtgtgtggctcgtctaaaggaaagaggaggggaggggaggggacaccctggtgctcactgggaacctaactgggcccatagggcattaaccctgtcactgagctctcagtggtagggctgaaaggatggagtccgggacttccatcttctgcttgaatcccctccccagcctctccaggggctgcct

SEQ ID NO: 62306 - DNA, 1266 bp, Homo sapiens
catttctattgagtgtatatccagtaataggcttgctgggtcatagagtacacatagactcagcctaggggtacttccaaacagttttttgaagtggttataccagtatatactcccactagcagcatgtaagcattttgcctgctccacatcctcgtcagctctggtggtgtttgccttttcgttcaaaccgtgcctgggattgtgacttcagtttgcatttccctaatgactaatgcagctgggcatgttagtcatatgtttatggttcatttgtttcttggccttttgaatatcctctgaatcattgaactatttctagtttccctaatttcccttctaatttaatattattctgggctccttagggctagtaagaagaaattaaggggcctccttgcaggggctcgtgggcaagaatccatcttttgggtttcctatgccgggatgtgtggctgtaggaatggcaatgtgagaagctgtggcctgggacaggcatgggcgtgcattgcatctgagcgtctcggtgggcacgtggtgccttggccccctctgcccacagcctgaccgcccacagctctccctcgctccttggcctgccctgacatcgtgtttgaatcgttcagctccattgcccagtgtccatcccaaggcccggcatgggagaatgggagcgagggctttgctcacgagaagcctctgctgtggtgtggacttagattctcccaatacgggactggagggtgttcccagggcagagtggagtgttgtacacaagggcatgttgcaggctgagggactgagcagtaaggtcagcccttaggggatgctgcttggagaaggtggtcagtgtgggcttgaggtagcagaggagctgaggttggagtttgtgaaggagatggaagagcttgggggaggtctctgggcagctccccaggaggacaatgtgtccttactataagggactggagagagctggctgggggagctggggaccggggaaaggccagggaaggcggtcgtgagcagggcaggctgtgcccagctgcctccgggatgctaggctaagcctgccgctgctcattccacctcgcgtccattgcctgcagtacatgtactggacgatgctgcagcagctcactcaccactctgtcaacggctgcaacctgcggccgggggacctcctggcttctgggaccatcagcgggccggtgagtatctggctgcactgagggctgcccacgcagagcatccctgctccccaca

SEQ ID NO: 62307 - DNA, 520 bp, Homo sapiens
tcacagtgttgacccaactgaacaggatgggaagagagggtccaaggcagtcttgggcagatatgtgtgaaaagacatctttgaaggggccctgggtgtcaagatattcaagagccatctaaatgcctatcagagggcatccactgcagaaaagactctcaacgatcagctggataagatgacccaacctgggggtgtgagcctcttcctctgtctactctggtgtttgctcaatgacatcatgaacagagtgaccatagtggaagggatagaggctatcaacactatgggctttcccttgtgaaggtccattggtttccataacttctggatatgtagccttccaatgaatgagaccaatgccaagcccctgatatggcaccattcccagagatgggtggtaggagacagaccaaccgcttacttggtagcaggttgattacactgaatccctttcatcatagagggcagtaggaatagacacatattccagatatggatttgccattcctgcccctcc

SEQ ID NO: 62308 - DNA, 1158 bp, Homo sapiens
tttccatttgatgctttaaaacaatttccagccctccagtgccattttccaccttgtcactgatatcataatttttttgaagtccttatttgataactccaatatctaggtcatctgtgagtttgcttctattgtttattttttcttttggttcagtttcttgatatacctgataaacatttcagtgagttactgagcactgatgtaaaacattgcagtagctcagggtgatgttatttttctgcagagaggattcaccattttctctggtaagcaactattgtgaagcagatcacctccattcaataaggggctaagcccacttcaggtggggttcacttattgtaaacaaggctgtgtctatctttggtttgacaatattcctagggtgttgcactgtagggttccaagttgagatcctgggatgtttacttgagctgttcctttcttggcatatcttagattctagcttttctccttagtggcttgagatagctgaaaacttcctgggggaaattattcaggattatccagcaactggtttttgattctgcgctgtggaatgcaagttgtgaaacttaagaacattggccattcattaatagccactcacaactatgaggccaggcttgaggatgaggaaataggtgtttggtcaaagttctgctgttcttttgccctgggattttgaaagacgttcactgcagtattgtaacagtgaaaaactgggaacaaaattaacttctgtcaataaggaatggttaaaacagccatggtatatctgtgtcatggaatactcttacttcactggaaacacacgtgtgcacacacacatatgcacatacacacaatagagggctagaaattttgttaagtgaaaaagtaagttgatgagcaatatcacaaatatgatatcatttatgtaaaataaaaagaaactataaattttttatgtacaatctgcacatgctgggggtggaaggtcagtgctctctactcactgctagatcaagacctgatcctgctttaattgcttttttttgtttgagaaatttaagacctagaaaagtacaaacaatactataacaagtacttacatttccatgatgcagaatttgcaattattatgttatcgtttttgcattgtctttttttaaa

SEQ ID NO: 62309 - DNA, 2223 bp, Homo sapiens
ataagtcctatccaactctgctttgaagcaaggacacatatccaggagagaaggcaacactgaactcagctgtggttccctgggagctgagctgctggccttcccggtggccagctcagtgggccccagcataactgcatcatccttcaacactgagcctgtacgagccaagtgctccatctgccatgttcttgcagcagctggaggtggatttgcttcagagtcagggactctgacctaggcgaatgagtgaccctcaaagaaagtggccgctgggctgacccagtgtacttgtcaaagcgtgaaggtgtaaggttgggttgtagcagatccaagtggaaaagagtcctgccaaatgctgtgagaaagccataggacacgatgaagaatccaaacatagacctggaaacaagcatccgaatcaggattttaggaaaaaactagcagcaaggcaatcacaattcaaagggtgcacaaatacaggatttatgtacaaatttgtgtaccacaccagggctgggagtgaggtgctcagggaaggcgcatatatttgaataatctcaccccgttctctgttttacagctatgccttgggcaagcctaatttagactcacatgtatctttggtaatttattaaaatgccaatcagggcaatttttcatttcaaaaatatgacaccttatttgtacttttaaagcatacatgtaactattaatctaaatcaaacaaactcaattttaaaaagttatagaagattagaaacctactcaatgcagataagaaaataatgtcctcagcattttggctacatttgaggaattttgcccctgatcatctggtaatagaaacacaggcctggccaggcagaccttttcttccactggcctctgaatctctccagatccacctgttcgccacctccttaatgttttttctttattctctgggggcaaggtgggcatgagacatagccaggcttgttctagccagtccactgaagtttagtattaagcatggatactaaattaaatattaatactagtaagtattggtactcattaaatattttccccaaaatgtaagactctttccaccttcaatctgctttatttaaaccacagtaagccagaagctgtttctctcttttgtggctttctcttccctctcgcagccagagaacttggcatgggtaggaagagagggacttgccttttctgtcccacatcttgactctgcttctgctgtgtcaccttgttcccctggacctgtatttaatgaaatgatgagacagtagacgctgtatagtgtgcggagctttgttatctgtttggaggatctatgaaaggcaccagcttaaggccatcccttgcctgaacacttcagaatcagcagcctcgctttctatgctgatgtatttccttatttctgtacatgtgtttcttagtccgctcaggctgccatagcaaaatgccacagactgggtggattaaacagtagaaatttatttcctcacagatctggaggctggaattcccaggtcagggtccagtggggttggctgctccccagggctctcttcctggcctgcagacggctgtcttctcactgtgtgcccacaagacctttcctaggtaggtgagtcttcttgtaaagccaccaatttgatttgattgggaccccaccttatgactcatgtaaccttaattacctcctaaaagccctatcttcagatacagtcacatcgggggttagaggttcatgagtttggaggaggagggaacaaaattcggtccatagcaatgagatcctcgaggacagagtctgagtctgctgaggggcactgcctctgtggagccaggccaggcccacacctgttaggccggctcacagtaaatgccagaaggtgagagccagttcctggctggtgcccaccagctcctgaaaataggaagatgaagggactgagagagcacgccacttctcactgtggggataaacagtacgctgcagcgacattataaattcactcagggtaagaagaatccgagttgaccatgtgcaatcatcagctggttctataaatagaagtgcagccattatgaaaggtgacctgtcagaatcacttccccaaactgacaaatgggttaaatggatggcatttgctcaggacagagaagatgttcagtgtcctaacccctcaccaatcacatcgttctgtggga

SEQ ID NO: 62310 - DNA, 644 bp, Homo sapiens
tgtatgaccctgagctgggtaaggctgggaaacaagatcctgccacctgatatccccactcacctggctcctgtttctttcccacaaccctcccgcccggccccgcaccctgactggggctggaagggacaggtttcagggtttctgggtcttttacatcagtgttttatgttcattctggaactgtggttgctggtcataccaaggtaaatacagaattggggaataagtgttaggaaacctttaaagcaatgtgacgctgcagtgtgtctaaatgtgtgagaatggactcccttggagcagggcataggccagttatgtgtgagtcatacgtggtgcttgctgagtgctgaccaggcaaactatggtcaggtccatgacagactggaaatttaggaagaaagccaacaacaggtcattcactgcaaattcacgccctggccaccacaagggttcatgtgtgggcatccattcttacattgaaactctgtgattttgatactctgatgcaaattaaaggatgttaaaatatcctttgttcctacggtattttggctttgaaaagcaatatcgtcttgactaaaaaattctgatatggtccttgctagtcaaaagctgaaaaagccattctttctttttgcagt

SEQ ID NO: 62311 - DNA, 1852 bp, Homo sapiens
agatgtggcttaatgagggtgagggaagtatagaagacttcaactccagaccctcggaactagatcccctagttcactggatacatattttatggaaaagggtaagattgtatcacagtgttaatccagaaactcgaatcctctgattagaatcagaggagaactgagaagaacctgccggcggatgcacgagtgggttagaatggaacttctccccacgaaggcagcacaggcttcgatggagcttttttcctgggtcccgagccacatcctgacaggccactgtggccctattgcacgcctggtgaggcggtgcatcagcttggattttctaacaggttcttttccagaacttttgctgcgggcacggagactcttaccaaattcggctccataatacattccccaaaacattagaacccaggataggtctacgcctccactgatacggaaaaatatatgaaagcgtggattagggtttttgccacagatgagaacaaaatccaacggagacttgacatttctttagaaaggctgccaccagcagaactttccccagaagttacatccgtgctgaccttcatcagttacattgagaaaaaatctgttctatgtgactgtcagccacaggagagggaattttaggcactgaacgtgacgagaaggactttctaactttgattcagtttcaactcacactccccaaacccctcaatggcagagaggccgaggatccccgaatggggaggtgaggctcagaacagcgagggtgcctgagcacagcaccacactctcccggtttctgagccccgagccccgcagtggaactcgggccgctgcgacgcggctcccgtgcggctcccaccgaggctgctgtcccctgccgcgcgggtccggccctccccgccgaccgaggcgcgccccgggcgcagtgccgccgaggaggggatcggtcccagtgtccacgcgggtctcctcgccgccgcggcagggctcggcccgacttcagcgagcagatcctccgcctgcggccggtgacccgcgcgacgccccggcggcaccgacaatgctgtgctccagccccgcaggcgccgcggcagcgggtcccgggatgctcccgcggtccttacctggcgaggcccgtcccgtgcgctcccggggtcctggctgggccggcgccgagcccagggcgaccgcggatcgccggctacggcgtttcccggtgacgggggcgcgggctcgcggggcgcggggggcgctgcccaggcccggctcggcaggagtcagagcccccagcggcgcgggcgagcccgggccagcagccgagagggggctctgagcggagccgcggccgtcctggcattttaaaggcgaggcagctggacgctgttcaagcggaaacgcagagagaaacttcagcccccggggcagagcgttggcagcgaggggagggggcccaagagctccttgcaggcgcacaaaccaatctgggctattccaatatgctcttcaaatgcattttcttcagatattctctttacagttaaaaaaaaaaatccccccaaacaacaacgacagcaaaaccctctcaaagccttctcctgcagtatgcttcatagcaagccaaacatttccattaaagttaggggcaagagcagggggccggtttgggacgtctggtcaatgcaatcagacaagagaaggaaataaggtgtaaaaatactgaagttgtgcctttgttaaaaaaatatatattctatatgtgtgtatatatgtatatatattatatatatgtgaagcgggagaaaaatgattactgtttgcagcggatgtgattgtgtagttggaaagt

SEQ ID NO: 62312 - DNA, 1162 bp, Homo sapiens
cttctctgacctcctctggctcccttgttcatgcttcctcagccaggacagccaatgagtgattctcctggcacacctggttcattccgatcctggcttttacacattctgctgcttctgttcacactgttctttctccagagatctgcaaggactgccttcttccttcttcttgggctcccctatcaagtaacttccatgattgttttgtacaaaacaataactctccccttttcactctgtctcactggctttgctttatctgtttatagcatttagagcctctctcctcccctgccatgtgaggtgcttaattgtggaatcattagtggtctgtttctacctgccagattgcataatcatgagggcatggactttgttttcctggattctgtgtcatgggtagttggccccagttgggggcatggatgctcagatggggtgcctggcacagctgtctcctaaggatggatgggcccctgccttggcatgctgggtggtgggtgctggctcctaggagagggtctccccatgaaagctcagccttgggctcctgccctggttggccagttcctaacctaatcccagcctgagagcctcatagacccagggaaaagagacctaagaccctcagaaaagatctcagaggctacttcaggaggcggcttggaaagggcacactggacagagttcctttggaagtgactttgaggcagccctttgctctctctctctctctctctctctcgcctccttttctccactggaccagggcatggggagccctgagctttctgcccgctttgacatttcctattccatccctagatgggccgaggaggcagcttttgagggaaagctttggaaaattcccagctgttgactgttgtttacatctcagttgctgtttatgcttctcctctgggctccctgcctctgcagatgacacagcatggccactgtggggtcagctcctcctcccaccctttgccctgcacttcagggccacagcctgcaggctgattcatgcccttaagaggctagaaaggtggcagggaagcaagcattggtccctcctctttgcattttggggagggctgatggatgaccccatcctaaatgaagatactcaagggaagaagatgtttcctgccagctggac

SEQ ID NO: 62313 - DNA, 1053 bp, Homo sapiens
cattttctagaacgcaggatctgttaggtctgtctgccactagatggcgtggtcaaataggtacctcagtgatttgcaaacttgacccagggatcaccaggagggcttgtaaaaacacaaagtgctgccccatctcagttttggagtcagtcgttcaggggtgggagtgggctggggtgagatcggcatttctaacaagttccagtgatgctggtactgctggcccagatccccttcaggtccactgaggcaggggctgcactaagccagtactatccaatgccagctaactcacctggttcaggatggctgggctcaatcgcccatttcacaggtgaggaaataaaggtggtcgaactgagccttgaaaggctgatcctaacacacggatttgcctgatcccaagtgtaccttctttccactgtcacactggctttccctgggtgatctggagggagaagggaagataattaatgagtggactgtgctgaagagaaatgaaccagaggtgttaactaggcatccagcagcgtgagagggtaggaagaggaatcagtggcccagtcctggcattgacatggcatggtgccctgggacacccctaccttttctctttgggcttttggttttcttatctataacgtgaatggttggcatgaaagcacctctcatgtggcagggtcctggaaagtcccgggagaaaaagctgaacagacaccatgccggttcttagggaatttccatggtatttggaagataaacacaaatggttttcctgtgcctggcagcaggtcagccttaaacagcagggcatagtttgctttggaacgcagtgtaaggctctcaccagagggtcttaggataaggggtggagcctgaagagccttggaggagatggtggtgggctccgtctgagttggggagcctggggcaatgggaggataggctgccaatggtcacagcacccgcacctccctatgcaaccagccatccacgtatgtctttgagcctctctccacattttatcatctcacaccagaacccacattctgg

SEQ ID NO: 62314 - DNA, 946 bp, Homo sapiens
gcaaccttactcatgtgatcacccttgcaaaggtgcctctcactctagattagctctgattatagaaccatctctgccctgtaagactcatggccatatgtgatacccaccccctatctgtgctattatgacagatatatatttggttttcatcaaggattcccagctctcagccccagtagcccttgttatttcctaagtgactagtacagtaagaatattttttgctaaagtatttggatttttggttttggttcctaaagtagctcctgaaggataaaggtgaaagacaatcttttactatttacaagtcctttcaaatacatctgagcttatgtgaatgaggcaatgtttggaaagtccctgaaaccactggatgggggttggttgccagaggaagcagctttgtgcttaaagggttgggactttcagcctcacccaccaacctccagggaagggacagggccagtggcttcctcaatcatgcctacaaaatgaaacctccagaaaaacccaaaaggacagggtttggagaatttccagatggttgaacatgtggaggttcctggagggtggtgctccagggaagacctagaagctctgttcccttccacacacctgaccctatatgtcacttcatccacattctttgtaatatcctttaaaatgtgaaaggaaaataaatcttgaaacccaaaaatcactaagctaaaagggaaagtcgagctcggaatggcttagggtaaacctgcctcccgttgtattccaaaaaaaaagatagctactaatgtcagaggcgtgtgaaccagagcaactccgtcttaaataggaactaggtaaaatgaggctgagacctactgggctgcattcccagatggttaaggcattctaaagtcacaggatgagataggagctcagcacaagatacaggtcataaagaccttgc

SEQ ID NO: 62315 - DNA, 1564 bp, Homo sapiens
taaacgatacctagtatatacttactaccggaaaatctgccacacgtgggattagaaatgacaacctcaacatggtttgttgctaaatacagtaccctcctgttctaacagctgacttttatagatacagaaatgtactaagggtaaaaccatgcccttagaaaggaaacgctgttgctacctatacagaaacagcctctcctaataagaaacacactgatgaccaccctatcccacaaccccggtaccccttacggtgctgagaacttttggtactgagccagttcagaaagcagcacacacgagagccaaatatttcgggcacattccaactcttgtccaccccttagtttccttttcagtagactcccaagaacctccatccacgggagaaacctggatttgggggagggaatcccagggggaggggaggggagcggtccaccccgggacacatgcaccccctccagggtcccctctgcagatcggcccagctgtccgggcgcagagcccccagccccggcacccagcttctccgggccccggagccgcctggaagcccccgtcggccgcaggtcgagaaggtgcttcccaggccggggaaggtgcccgcgcccttgcccgcagcgccccgccccgatgcccggctctgcgccgcgtcccagcggcggcgccgccgcgcggtaacccggaagtggcggcggcggcggcggcggcggcgggcgtgcgggagcgggaacgggagcggggggcggcgcgcacgagccggccatggacgccgccgccggctttgtgtgccgcgcgcgggcccgggccgcccgcgcctcgcctgggttccggggccgccgctgacccgcccgggctccgagcgccgcgcccgccgggccggccccgcctcctgccctcctccgcctccgcctcctcctgccgccgggcgggcgggctgcagccgccctccgcgctcgcctgccagctccctcgccgcgcgtccgtcctccgtcctcccgggccagccagccagccagccagccgggccggcggcgggcaccaggccgtcccgatgcccgagccaggccccaggatgaacggcttctcgctgggtgagctgtgctggctcttctgctgcccgccctgcccgagccgcatcgccgccaagctggccttcctgccgcccgagcccacctacacggtgctggcgccggagcagcgcggcgccggcgcgtccgccccggccccggcccaggctaccgccgccgccgccgcggcccagccggcaccgcagcagcccgaggagggcgcgggcgcggggcccggtgcgtgcagcctgcacctcagcgagcgcgccgactggcagtactcgcagcgcgagctggacgccgtcgaggtcttcttctcgcgcacggcccgggacaaccggctcggctgcatgttcgtgcgctgcgcgccctccagccgctacacgctgctcttctcgcacggcaacgccgtggacctgggccagatgtgcagcttctacattggcctcggctcccgcatcaactgcaacatcttctcctacgactac

SEQ ID NO: 62316 - DNA, 812 bp, Homo sapiens
gcgcacccggtgagcctgccggggtcgccaggcctgacttccagctgtggggaggcggggtgggggtctcttggggcccctggggcggcctgccaggagaggggcccctcctccggggctgagggccagcggagagccccttggccgccgtaaattcgcttttcttgtcccaccctggcttgctcccaccctctccaaaaaccgcgccagccttcaggttcctggagagctcggactcagagaattttgcctgctttggctcgcctgtgtgtcgccggcccaccggctgggtcttttgtggctccggtcaccgcgagtggcagagtgtgggtgcttaagtaccgggcagaaagaaacaacttggttcgagtttcgtttgtacgagctgaagtgaccttgggcaaggcacatgggtttctagactcagtttccttccctgtaaagtcagtgggcgagacaggatggcctctaaaagactttctggttgtaaagtgcgggcaggacaatgtctgggcaaccttggaaacagctggagcgtcaggtggagcggggagtttgcctcctggtggggcaaagtagtggcactgtggggcaggaagttagctggtagctgtgggcctggcaccttccacacggcctccataacagtccaggataagtttgaaacttgcaggggctgggaaatctctgaccttaaattagcattcacagaaggactgaaaagtgtttagggtgggccatctgtgagccaggcacaaactgggggcatggtttaggggttagacctggttgttttataacaagcaaaccaa

SEQ ID NO: 62317 - DNA, 711 bp, Homo sapiens
atacatacaccgtttacctatgttttagacataaataaaacacaggaaagaagagttctttctctagagtgacggtgagtttgaagaggaagatatagaaatccactttcagagctgggatttgctgtcataagttccagcacaggccttcactcaccagaaaagctgaggacatgtctctcttcagctgggcagcctcttctgtgtccaacaagacaggaatcaacagctctgagagctggaaatctggcctccggatccaggcctgggaatttcccttttctgatgccagcttcaggcccagtgtctaagggcgacccctgttggtgggacttaagtatgctcattattcgtgagctgcttctccaagggtggagatgcccaattcagttttaattttttgtgggtctgctggaaaccttgaggcccacagcccactcacacactaccctaactacatcctgcttcccttttctccttgtcctccacccgtctactccaggttttcctggacaactgggtctggaggcttggcgtatggagccacaggtgtggccaaccttttaaactgtaataaggcaggctgctgtagggtcaggtgctgtctttgctgatcagcaggtggagtgtggaggcccttgttttagggaacagatgtggcatcctgtcagcagactgaggatgccagacttgggcagcttgaggcaacag

SEQ ID NO: 62318 - DNA, 1932 bp, Homo sapiens
cactctgtcgcctaggctggagtgcagtagcgcaatctcagttcaatgcaaccttcaccttccaggttcgagtgattctcatgtctcagcctcccaagtagccgggattacaaacatgtgccaccatgcctagctaatttttttgtatttttagtagcgatagggtttcaccatgttggccaggctggtctcaaactcctggcttcaagtgatcccgccttggccacccaaagtgctgggattacaggtgtgaggcatcacgcccagccatcatcttcttgttattttcccaaggagacatgtcctgtagggtgggtgaggagaagccatgttgtcagggacttggctgctccctaaagttgaaggtgtggagggaagggggttccttttcactgcagtgatccccatggactcagctacagcctggctcagttttctcccaggtctgtcagctcacccccttactcatcagggctctgggattgtcagtgacagaaacccagctccaagccaacagagaaggtgaaggtgcagagaatccaaggtaggattgagaaacgaaattctgaaaacatctttgggggaggcaggctcagggatggctgaaagcagggctgcagggctccagtgccaacagggaacagggcagctgatggggctgctgactggtactgagtaactttcaccacagcaatgagactgacttcagactctctctatctccaagcccaggatcctgggaagcaactcattggtctggcttgagtcaggcattcgcctgtggacctgttggcaggggccagtgccagggtggtgctagccctcatgggagtccctggagtgactatgtgggagggggaggggcagggcatagaggaggggaggcaggcagacaatcctggggtcaccgcaactccacagcagggccagggagcaaacaaagggtgaacaggagacagggacgtggccagtgattggctaacaaatctaatccctctctaggtgaggttctttttagagttaacgtgagtcatttgttcattgatccgttgagcattgattctgtgattcatcccacaagcctttactgaatccctattctaggccaggccctcgatcacagatagaaaagggaagaaaataaggttccctgccctgcagtagttcatgttctagcatgggaaattcacgtaataaaattctataataataagagacctatgctgaatagaggtgggaaataaggaagaaagagtgattcattcttcttggaaatttattaaaggcttgatgggtagtagatttcctccaggcattggtgctggagaagagccttccagcagaaacagcaatgtgataaaaggcacagaccatgagctcacgttggacactgggtgggcagggggtcatctggtggtactagcgtggccagagtgtaagttagaaggtggcgtggggcatgaagcgagagaacaggtgaggttgagtagatatctaggggccacttcttgagggacctcatacagcaacacgggttttggaagggtgtaaaatacaagatttgcctttgagaaagactatcctggcagcagtgtaggcgatggactggaaggaggaggagactggagatgggctgaccatcaggaggccaccgtgaatgtcaggatagagaggtcctcctgcactgaagagatgatgaggaagtagaagactgtgggtagaacttcaagggggacaggttgagttcacgagcaagagtgagaggaggcaaactttgcagggcaggaaggagtgcttgattgagagttcactgctgtcttctgatggaactgtttgttccttggaacagcagagtagtgagaaaatgcagtggcttgaaattctgataactgggaccctggaacagaagtaccacttgctgattatgtgaat

SEQ ID NO: 62319 - DNA, 573 bp, Homo sapiens
cccatcacaatgagccggtggcacccagggcagtaaaacaggcctatgcgttagaaccccacctgccagtggcttcctgtaggtgtatttgaagtagtaggaaaccagagtggtttctacaaataaataacccaggaaaagacaagcctctcagatcaaagaaggactctggcccaaacttgaactaaaatcaagcgtgctctttcgactccactctggctgggcagagggaggagtagagaaagtctatctgctgtgcaaacattccctgtctctgcccttcctgggtttgtgtgagcctgagaacaggagcccgggaggaaggctgcactctctgaactgctgccaggccctgcctcatgacattccagcctggcttccaggcacagcaggtgccaacaaattggcctcttgtgtgtccgagcctaaggggctcattcatgggctgcacgcctgtctcagggctctcatgtaagccctctagggcccccagctctttgaggaaatttcatggcatcctctgtgtttcttggccctactggttaatattaatgcttcccaggggaaaggaag

SEQ ID NO: 62320 - DNA, 1877 bp, Homo sapiens
acataacctgcccaaggttccacagctatgcaagtcaaccaggacgatacaatcaccttaggaaggggaaaaggcagcaatgtggttttggccagtaatctttaccttaaagcgtattacacactccctgtaactgcacactccggtgcgtccaagtgacaaaccagaaaacttactctcctttgaacaaaaagcgtgagtttcacgatacagagccattagccattgatacttctcccctcagtaaaataaatccacccacaaaaagcacaaaattcccagcagggacatataccaaaataggaagtctaaaattatactgatttagaagacagctgagataaccattaaggaagaccatcttcactgcaacccactctcccacccactcaccgcaaaacagaaggaaatgctctttagtagattgggaaaggtcactctccctgtttgcagggctcactgaccacaagaatcaacgcaaagacaaccagggcactgaagggtgaagggagagcaaagctgaacagtgaggggcagatccgtgattgaagtggtttgagaaatggcaggaggaacagggcactggaatgacagagggctggagcgagggtcagcagggcgcgcgggtcagaggaggaatggagggtcaacagtggcttcagtgggtcagtaaggattcaaggcatgagtagaggaggttagggggtcagaaaggtcccaagacagaacaggtaaggggtcatagggaacagggtcccgcacagagaagagccgggagggtgtgcgcgcgccgcggacctcccattgctccagaagacgcgccatgtctgcatcattgtaatcgcgaatatccttcttcttcttccggggaggtggggtagactcgtcgggcgtcccgggcgagccttcggccgcgcaggacccaggcggtggtagcagtagcagcagcagcagcaggtcagaggcacaaagcaggaccacggccttgcgcgcccacctggaagccgccattttcgctgcgccgcgcagcgccctagacgcgcttacccgacctgcgcgggccggaccccgccttgcacacgccttcctgtccgcctttccgaggccccgcctcccggccctcgctagcctaccgggccccgccccgtaccatttcctaacccccgcctctggaagccccgcccctccgccattttggccccgccccactggctcctcctcttggtccggctgaggcgctctgtcccggctgggtgggtccctgagtgctcatttttcgttttccgtcagaggccgacctttttctctggaacgcacaagccaggtccaaaagttccttcagggcctccaggaaccactaaccaacgtccctgttgacctcagtttctcgcctgtgaaataaattggaactggaagttctggaggctgcctcggctctaaaaaagcccatttctggatgtcggacgtttatcctcagtctcttgcaatttcctttgagaacagccagttaaaaagaagtgagtggcaggtagggcaacttttttcagaaagtcataaatagttcgagtccactgctttcctcatcaataaagaggattcagttcaaccagctttcaatatttgttttttttttccaaaaagatcattactattcatccaaaaaaaaaaaagcttgcctttctttgatttcaacctaatactgtaggctctaactaatccttttcaaggctgaatcacgctactttttgtttcttaaaaagattttggccaaagatgctttgagattcttcttgttttaaacggctcatcagctgatgtctttaaaatgtttaattacataagaccttaaaaaacaaaaaacaaaaaaaaccaaaggc

SEQ ID NO: 62321 - DNA, 3094 bp, Homo sapiens
tagttaaaagtaacgtttttaactggctggagaaaggtgacttggggttctaggaagggacagaggaacaaacattctgttggctcagcacgcccagcctgtgttgggctgggcaccttagaggacctgtttcaggactgcgtgactggcgttttgctgggagtagcccaggtgttttaaccacttcctgaagaacaaggttcggtaaaaagaggctggggcgtaggcgtgggttcctgtccctgccatatgctgtcttcctgatcttcggaagtcacttcaagcacctgatcatcagtttccttatctgtaaaactggagtagtaatgtttccctccaaacgccgtcgtatttaattcatttaacagcagccactattattccattatacagacgaataaatagacgttatgagagggcaaagtgcgctgatcagggctcataataattctaacagctactgtttaggaaccaagtactcaagcagcctgtgcacaatctctaatttctagaagagaagacggatacttggaaagagaacttgaacaatgtcatggaactcataaatggcttgagaaaggctgatcctaggaaatctgcttcagaacccgcgctctcactgcataaggcgtatttcaagggaggaacgggcaggcatctagcaccactcttcggactccccatccagtgctcttttcctcttttcgttacactgcactgctggtcggaaacccatcgtggaagtggatcaaacacaacaaagggcagggggcgttggaaaaccgggcgaagtcgcgcagaccgagacgacccaccggccccagcaaatcaccaggggccgaaatccagtgtcctcctcccttcagcccagaagccaggtcaccttttagacttgctctcttggcggggaggaagcgtggagccccctggtccggctaagagcttacgtaaggcccgcgggcggctgcgccccggtctcccatgggtgtgcgcagagcccccgggccggagcaggccttcccctgtccgctcccccagtctctcggcccaggaccacgggggagttcaggaccaccggccccacgccggcagcgtccgcgttgggcggcggcgtcccccgcagccacccagcttcccgggggaggagcagcgcatcgcgcaagcatccgggagcggcggagggggcgggaggaagggcgagaggaggaagcgggatttaaacgaaaggcggtgacgccacacaaaagatttctataggctccagggaggttacggccgaggcggcggcggcggcgagcccgggggcgaggcgcggacgggaacaggaaaagcctccggcagcccctgcgggcggcggcgcagccacggccgcgctccgaggtgaagccgcgcgcggagaggaagcgggtgttttcccctctgcctttcggcccccgcccttcctttcagtttctgcccgctcgctcggaagttggcggttgacaaaaatggcaggagccggggcccgggccggttgccgcagcgccgcggggaccttctgagttggcccggtggcagggagactcgtgcaggggcgtccgatgcgcggggcccggggcctcgggagagctcagctgctgcgggccccagacgaggcgacagggatggacttgcgtagacagccagcgccgggccgccgggcgcgcggtctgggagggcgtgccgccgcggcgccgggccgcgctctgtgaaccggcgaggcgggaaggggccgccgtggtgctcggcacgcccgggcgtgtggcgggcgggcgagagcttgagcgcgatccgggcggccgctgtgcgcaatcagtgcaggctcccgcccgactctgactcggcgcggccgcgacagtgccggccacaccctctgccccgctgccgccggcgccgcttcccaagagctggaggcaggagatgcgcccggggcggccgcgcgtcccagagagccagccccggccgccgtcgcggggaagtgccgcctggtggggtcacggcgcctgaagcccacgtgcgccgccgagcccgaggtggcctcgagcgcggcggctgacagcacagcccgcctgagctgcctcccgcgctcctccccgaggaaaggattttgatttcaaagaaaggaaggaaggaaggacaactcccagcttccccgtcccgccctccccgctccgagggccgcgccaggccatgcccaagaaggcggcggcggcggcgaaccagcagaagggactttcctggcagcccggcgacgaggagcgcggacagtgagtttgctctgccccggttcatggttcctgcaagccctctaggaggccgaaagctgcagcccctccccttgccccgaagagccttccgcgttctctcgccctcgggcccaccccgcgccgcccgggctcccgccgccgcagcccagtgccctctgcccgcggcggtggatggcatgatggtgcggggaaggcaccgcggccttggccagctgagtcgcgacggccgccggggcggcggcagtggccgcggcagcggcggtggtagcgggctccccagcggcatgccagtgccccccgggcgcgatggctagcggcagcgccgggaagcccactggcgaggcggcttctccggctcctgcgagcgccatcggcggggccagctcgcagccgcggaagaggctggtatccgtctgcgaccactgcaagggcaagatgcagctggtggctgacctgctgctgctgtcgagcgaggcgcggcccgtgctcttcgagggccccgcctcctctggtgccggcgccgagtccttcgagcagtgccgggacaccatcatcgcgcgcaccaaggggctctccatcctcacccacgacgtgcagagccagctcaacatgggccgcttcggggaggcgggggacagcctggtggagctgggcgacctggtggtgtcgctgaccgagtgctcggcccacgcggcctatctggccgctgtggccacgccgggcgcccagcccgcgcagccgggcctggtggaccgctaccgcgtgacgcgatgccgccacgaggtggagcagggttgcgccgtgctgcg

SEQ ID NO: 62322 - DNA, 1481 bp, Homo sapiens
ttgtggaggccaataggatagtgaagattgggctttcccaggtcaccctcccagaggccagtgtggcagaagcaaccctgcgtggacacagataaccgtgaacttgctggggctggcgcagcagtgaagatggaatattatggaattgtcaacagcagcactgacagaagcaggagggcacacctgccaagagagcgactcaggatcagactcggggctcatagcaaaccctatcatctccaaatatattggagaaaggagtctctggaatagagaggagggatgaagagagggttgccaggatccagtgttgcatcttatgaattgtgaccttcagcaagttaccatcctttctaaaccttataggaccaacgccacagggttattgtgaggagtagaggagaaaatgcatagaacgcactgagaacatagttaatgctcagcagttattaccactattttggaaatcttaagttctacttcttatccctcattataaacaagggtaagctaagccaaaaggttgtaaagattgttccaaagtacagtgctatgttgccatagtactctaggcatagctccatgtcagcccttatcatattgctcaaaaattgtttttgtaccagtttccaccactggactgttatttggagggcaaggtctgcctaagccagctgacacacctgacacagggcacatgccacagcatgtagtattgctcaactaatgtttgtggagctgaagtgtgacacagccaacctctccacactctcattccacacgcactacctcccttaccaatgtgacctctccccaacctctaacttctcctctggccgtttggagtgtcctggaaaaccttgagcaggcgttttcattcaacaaggacttccaagggacaaccaccctttcccttcctgtccgttcttgggcaaggcagaaactctcagttcacaacaggaaaccaatagctttgtgctatcagaagacatttccttcacagcacaaaatgtctgagtaataatttcaagctgggcttcacccatttcctgtgaaagaaggcaaatttgcctatccttgtcctacagagccctggctttccaggcctgcagtggtgcaaagccttctgcactgggaagatgagtctatcttctccctttcacataccagatccagcatcctgtgtagcagacactcttgggatggcttctcaacatttatccagaacacagtcactgcgactaatttgtgccctgttctgagtatatttcacaggcagctttgagagtacaaaactcctgggtaatgaaagtcatagctttttctgaaaatcaagagtcaatttggctaccagtaattaacagaggttggggccatgaaaagtctgcggggctgattttcagtagctcctctgtaactgatttttgtctgtacagaaaaatgaccataaaattgtttttccatggaccatatggtcattc

SEQ ID NO: 62323 - DNA, 617 bp, Homo sapiens
aagtaataaaaggagaatttaaaaaatcccttgcatatttattattttattatcacctggcttttaaattcatctgcgttgtaagttgtgagatgattctttatgttactttgtttatcttgttaagattcatttggggagtcaagggactctgctcatgcccaagtctgtgccctctaatgagtaacaccagagactgcacagtgtccaggaaatagacttcagcaaactagtctagccaaggtcactggagtgttttccaacactaacaaccaattattgattctccagacaccaactgggtgtccaacaattaaattccactctgacattaactacctggagttagtgtcagatttcacaggctaaaagcgttcggttttacaagactgccttcacttcagatgccaagtgcaagtcctgggccacccatacttctggctgtaaaatcaggagttcccatggccccctcctcaagttcaattatttgctagaatgactcatagagccaggaaagtactctgcgtttactgatttattacaaaggatgttataaaggatacaactcagtaacagccaaatggaagagatgcatagggtaaggagtgaggaaaggg

SEQ ID NO: 62324 - DNA, 827 bp, Homo sapiens
ctttccctttccatccaagatcctgtctcagttgctgggatccgttaacaccccctctccttcattctccctgtccttcctaacccacaaccatagggaaaccaggttcaatgcttccaacccttgtaacggatgagtctgataaacatttgctaggagcctactgaatcctagggtctaggaatacagatagaaacaatcaggcatgattcctgaagagctcatgatctgccacagggaccctctcttccactccccacccacctttcttccatcaacccaccccctctcaactctttcatatcctcacaagacagaagcctcatccatcctgggagtgaggggccagggaaacagagctgcctgtcttcttgtcctgtagagtcagggttccccccacccccacctccaccctaaagtcattcatggattattgagcaacaggtttggcccaaagaaattgccaggtttcaactcaggaggcaaagttcaggggctggaagtcacagggcagagagtacccactgcaggccaaggactgggccatacaccagaggtctgaagagaagtgacttcatagcattttcactcttctctgtcagctcgctttctataagctatgctgggagcctaaccacctttaatcatctaacttgcttagggcagggtaggcacactacagtctgtgggccaaatctggcccaccgcctgttttcaatgtctcatgaacaaagaaaggttattacatttctaaatggttgaaaatttaaaagtgtttttgattattttatgatatgtggaaatgaaatgaaatccaaattttagta

SEQ ID NO: 62325 - DNA, 1714 bp, Homo sapiens
gcatagtgtggagtggttgcagctcacaaaggttaaaacttttaccatctgggtctttacagaaaaagtttatcaacccgagcactatgcagaattacacatacagattttagggtgtgggcaatggcgagcctttgaaggtttttatactatgggagggacctgctgtgaccagggttttcagaggcttcaggaagcagagtgtaggatgaagtgggccattgtgagccccaggctccagctccaaggactgcacagaggcggtaaccctgggaggagaagggagcagatgagagaagtgacagagcctgagcagaggtcgcaaagggcggggcgggtcagagagaactggaaggtttctggtcttagtaaactagagaaagacattgccttatatagagtaagaggcactggaggaggaggaggaaaaggaaggcaaaccaggatgtgtaggtttgagtggcagaagggagagcgatgtccctggatgaccacgagatggcgctgtccagcagggaaatgacatccgttctctctccgttcagggagttagaagtgaatgcagacatttggggagcatggacattagaaaaacagctgaagttaccaagcagttgacgggggaggaggggggggaggggaggggaggggaggggaggggaggggagggcccagatgccgttctaggggaatagctaaatcaagagggtggtggagaggaaatgtcaaagagaggaaaaaagaacagtgggatcagaattgggagtgtgccatcatgtgttttattatcttttgtacttttctgtgtttaaacaaaggggtgggggaagggttgaagtggcaagaaaagagaatattgtgttttgttctctttcctgaatgtaagcctgcccaagccaaactttttattttttctgagcatttgcctcccttaattaacagcaatcataaaaattgaagatttcaatgagtcaagactctcagctagtatatgatccctgattctagcctcaaacattgaccaaatcatcttttgtaacttcttttaaaagtaaatatttgaatcttgaattcagggcaaatacattagttgcaacaaaagtttggtgtacagatcaaggctactaatgttttacttttattccccttccaagaaactattgtgtaagatttatttggcaaaacctaatcagccagcttttaccagatatagccaaataaggacaggacattccaaaaagcccagagctgggctgtgtggccccagtaagatggacattctaataacttaaagagaagtctagccccttaggtaattaagaatggacattctgaatttttgttgtctatccttctttcagcacacatgtaattatattctgatgttttaaatgtatctattttccttcccagacttggagtctcacaatgacaaggactggttccttttatttttcactttggctccagcaacctaacagacggaactgatctgaatactctccccaccctgcctccagcccctgtttccaatacgtagacttgtgaaataatatagcacatccaaaatcaaaataaagacgtggaaatgcccagctgctaagaaacaaagaaacaactttaaatctaagaatggcagactcaggggttgatgatgtggcggggagggctgctggatgcttatagaccttaagggctggaactcagatttgaa

SEQ ID NO: 62326 - DNA, 820 bp, Homo sapiens
aagcttactgttcatttctgcaggcctgaagggaggtggggctagtaagtctcagccccttctctgcaagcctgctctaaacagcagtgacagacatggcatggtccaccttctagtcattagatataatgccaagataaacaagtttgattgataccctggggtgaaattcctttttgcactccaggtactgaggagaaggcattgtgtatgggacactggaagaggtatgggactgtgtgaagccggctgttgggcatggtccaccttctagtccttagatataattcctttttgggctccaagtactgaggagaaggcattgtatatgggacactggaagaggtgtgggactgtgtgaagccggctgttgggcatggtccaccttctagtccttagatataatgccaagataaacaagtttgagtgataccctggggtcaaattcccttttgtgctccaggtactgaggagaaggcattgtatatgggacaccagaagaggtgtgggactgtgtgaacccggctgtcaggggcctgtgagagaagggggatgagaatgtgattggttttgaaatgatctaaaatagaaactccacagatggcctctgagaaattgagactccattctgtaaaaaggcacagagtcatagaactgtagcgctagaaagactctggtcacctggctcaatcccctgttctacaaaagacgggtcagaggcctcaagagatacgactctccaaggctgtccaacccataggtaggaaaactgggactttttgaagtgtttctgtgagaatgaaaataaatagctgtaaaa

SEQ ID NO: 62327 - DNA, 938 bp, Homo sapiens
gtaccttatcactaaccaaatccatgtaggaatactaactatttgaattccttagctcagtatctgagtctgaatatgcatagattaatatttcccaaataatctgattccattagcgataatttgagaaatatcttgggacagttggaaagacttcagaccttttccttagtcaaactgcaatgctttcaaaagttttctagcacagtttggcctgcaaacaaatttagttcatttcagtaggaggtaacaaagctttctgtacctgccttcttctggtgtagttcttgtttgcactttatttctctgcaatgtcatggggggaagccaggtaataaatagagacagatagtaaacagactcctaagtatttaatggggttggtcggatttacggctccagtgtcgtaacacagaattacccaattccttcagctgcttagtaagtttcacattatcacacaaatcaagggtgactctcttaaagttgtggtgatcatctgaatgcttttcttcattagatgtcaaagtaggagaaagacaactattttggaaggttctcagacgtgaaacactggaagatatctgtgaatctacctcccactctctatcaccatgcccaggaatgtatttcctttgttatattgacactggcaactcccagatctgattgccttgatgtagcctggagctacgagaggtccttagaatctgttcttgccagtggcccctttgcagaattaataaaaaatcttatgcacagtaatagcaaagctttgctccctctacttgacttttgggaaagcttggctcattggtaaacatgtaatgttctttatattaaaacagagttctgatactctcagagttggggcaaattgttagcctttcaccaaaacttgaaaggctttctacgttaagatccaagctcctgcctta

SEQ ID NO: 62328 - DNA, 2147 bp, Homo sapiens
tcgaggcagtggcctgagaccctacaccacccccacccacctccccatccctcctcgacctaccttgccgccccacgatctcggcgacatgctcagaactgggtactggcacgcactcggtcatgttcacgctcttcttgcgcggctcgctgtcgtacagagaggcgccctcgtcactgtccagccccagcagggagagctggtcgagcgcgagctgcagggctctttggtcatccagggtctctccccctccgctgctgccgccgccgccgccgccgctgccgttgcgctccaggtctgcgaacagcgagctgggcatcgctcggccgtgcgcgccgcgcccccgccggccctcggctcggcggcgagaagctgcggccacaaaggcagccgggaagcgggtggtcaggggcggggaggccggtcgcctgctgagggctccgttgcttcttcctcggtgctgggaggagtgggtcgctccgtgcggtccgcaccgggcagtggctgcaggagcccccacctgggtccccaccccagacctgctggcgggtggggtgggggcagagctctagcggtggccgcgcgtgccccccgagtgcccggctggctggccgcaatgccgagcgaaaagcgagcaggcgagcgacagaagcgtttctttaaggagcccctccccggctcctccactccctccctcccgcccgcccgcccgccctcactcagcgctttttcctcctctcctccccgcctcttgactgagcctctgcagccagacgactccggagggggacgagggaggcgcaacgtcacaggcgggagctgacaccacaatgctactgacactatcgctgggggaggcgattggcgcgcgccaggccgggggcgggaggaggccgcgggttgagcgagcggagagagagcgccaccccccacccccgcgctcgccgcagcccgccccgtcctcctcccggccgcgcccctcccccgccgccgctaacgcctctctttgttgtctaatgcgggactggcaggctcgggacacttggatgtacctatcagccgaggacaatcattgtccctaagtctcctccctcgcctgactgagaaaagaaaacgcgcccaactctgatgcctggagccgggctctaaaagagcggtcctcaggaagtcccgttagtggctccaaataaaccatccgtggagccaaagcttcctctgtgagaagagtctgtagtccgcccaaaagggcgacccgagccctccgacacggaaaacgggactccaggtcttggggcgcacgggcagagtgactcccggcgcgggttgtccacctgcgcgggagcgcacgagacacaaaagcacacgcccgcccacactggcaaccgcgcgcgcgcgcgcccgcgcctgcatttctgtctccttgggcagcacttcgcccaactggccctgaaactgaggatgggaaagctaaaagctggctgccgcgcgagctcggcccgcccggccgctggcgacctctggaatgcatggcaccagtgtccagcacacgcccggcgcccgggccgagaccctgcgggttctgacacgcgcacgagcgccgcgccgccaccgcggggacgcaggccacagcgccagcgggcggcgcgggcgtgcgcgcccgctgttcccatccctcccctccgtgccccgcggccgagcatgcgcagtgcgcgcgaggagcgggcgggccctttaaggcgggcgctgcggagcgcgcgccggccccgcccgcggccccgccccgacgggaggtgagcgctccctgcccggccgctctttgtgcgcttctcggggtgggggtggcggcagagggaggttgcgacggcacttgccggcgaggacggcgagctgcgccccctcccggatctcccagggaccgtctccgagtgcgagagagaaggaaggaggatttgaggggcgggccggggcggtgcgcgctggtcctctccgcgcgcatccccctccgccgcccactagggcggacgccccttcgggccccgcgcgctctgctgtcctttgttccgggagccgccgggctcgccgcgccctttgcgtcccgctgcggatcgttccgcagagcggctgggcccgcggttcatagagtcgcc

SEQ ID NO: 62329 - DNA, 377 bp, Homo sapiens
tatctgtaaatcatgaagtagttaaacatttcaaaaaggaaatatattatgtaaatgtcaactgaaatctcagcactggttctcagactggagcatgtgtcagagttacttggaaggcttgttaaaacacagcttgctgggcccacacccagaatttgatctgggaggtctgaggtgaaggctgagaatctgcatgactcacaggctcccagatgatgccgatgttgctggtcaggggattgcactttgagaatcctgctttataacttgtccagactactcagacttttccctcagtaagcgtgacatactgggagaagcactggaatgggagccaggagacctgtgtttttgatgtacttttacctgactacatg

SEQ ID NO: 62330 - DNA, 1723 bp, Homo sapiens
taatgaatttttttctagctcagaaagtgtataatgttctttgccttaataagaaaggaagagtttgactacttgacaacagaagaccttctaattcccagatttgataatctgttcacctgaagggctttgactcctgggacaagctcaccatagctctgagccttatttggctgttctaaggtagaataaaagagatcttttacatctaggtccctattctcagctccaagtacaaaggttaacctaatttctgaattccattatttttctaaacttactggtcaataaaactgagtcagtccagataatgattttgtaccttggacactggtagctttacctaagttcaaggcagaatagaaataaagatgcccccaagtcctcctctaccatagtgaatattcagcatctactgataacttctctgatcctaacatgtatcaggcaataatcatgggaatccttgtgtgatgcactacagcagagcttgccaagaggtatgacggaatgaaaaatgggaccgtgggctgtaaacttaactttcgccaggctctaatgaatttccttgcccatttcatacaacaagtgtgaggatcaaatacatataaaaagtccctcacctggagttcgagaccagcctggacagcatggtaaaaccttgtctctactaaaaagacaaaaaattagctgggcatggtggcgcgcacctataatcccagctactcaggaggctgaggcagaagaactgccctctccggtgccaggcattcttcacaaaagtcccaatagaagggaatttcccttccagtctgtggaaaatctgatacaggaaaacaggctcttcacagcctcccaatcagagggcaatggtgatggtctccatgctacttgcagctcatcctccagtgggggctggagcccaggcccttcccagcctctcctcccctcacccaccgactccaggatgtctgggaaaaggcattatgttggtgttgcctatgcctgtcccctgagcagaaggatagctgcctctggacctcaatacaaataattctccaggagtgagagccgtggttttgtggcttcctcaacctagccttcctcactgtctctgaagcctatctataaatgagtgtacaaagccagcccctctgtaagaacaggaacactctcacttctacttgtggactgacaacattttgcttggcttctactgaattcaacaaacagaggctagggtttggacatggcattgggcacagtacaaacgtagtcttactatgctgtcacagaaggggacagggtttcaatgactgaggtctcgtcatgaattacacaataaggtagattatttagatggtagattggctctatcccttggtctgcctctttgtggccactttcctgctcattattacctctctcaaacatggagaaggaagacagacaatctatcaactcgacatgtcacttcccccacactggcacatctgtcagggcccaacagactgcagaaagtgcaactttttctccaactttttctgggttatgcctcttttctctattaaatgcaaaatgtgctgatctaagtatacattttatagcacatctggcagtttgaatgatgttatttacaaatgctataaatcgaagtgctagtttttcctatgttatcaaagttttcaaataaaccaatagatgatataactctcctaaacta

SEQ ID NO: 62331 - DNA, 1299 bp, Homo sapiens
ttttgaccatatgcaagtctatccatttataggatttcttgttttaataatctatgtagaaaaaactaacttttaaaaaaagactaaggaaattcattttgctaaataaaaaagacctgaaatcaacttgtgccgattcttggagaatcaaaacaacagtcagcaaagtctgaagtcttctcagaagatctctaaatatccagacaggaagcaaaaggccttaggaacacagaagttcttttcatttctttccaattgaaggtgttgatttagaaagaaaaaggaaaacacaagtgaacagctgactgcattgatagaccctggacactagaaattggttatcaatataaaagagtccctcaaaagcaaagagaaaacaggcttcagaggacattctccagtctaagcaagaggacttcaaatcaattcgagaaaaaaaaaaaaaaaaagccagactgactctaaatgtaacttcttttaaggcagtggatgtggtagttggttggtctcaggggcaaagtattaagaaagttgaccagtgacaatggtagagactgcataccaacccacatacacacagttgccgcacgcagggtaaataaatggggcttcatagaaggcagtgaggcccaatacagtgacatttgtacctgggtgaggaaagtcaaaatgatcctttgctccagagagaggtgacaaagaaccctgagggttaaaatatatatttcttcctggaaagtggcagaactgactgatggccaagtggggagtgccaggataaaaatataaggataggatgacaaatgatattttgaggtattatcctagggtggcctggtcacatgccgtgtccaggtggtgattttctaatagaaatgagaaaatgaacacagaggggtgactcaacaggggtgactcaacactatgctaggaattcagtctgataaacaccaacagctgattctggcttcacgtgttgtgctgaaaattcatcttcccagaaaacaaaggacaaatgccactccaaatgaataatgtagaagagatggcaatctggggagaaaacaggtgctcccattattttgggaggaaatacatgttcccattatcttgagagcacggataggcacagacctatgcgggccctggacttcagaaaggatcattttggccagatgtggtgactcacgcctgtaatcccagcattttgggaggccgaggcgggcggatcacttgaggccaggagtttgagagcagccttgctaaaatagcaaaaccccatctctactaaaaataaca

SEQ ID NO: 62332 - DNA, 1262 bp, Homo sapiens
gcaacccatatcacattttctttcatctgtagctttctgtcctcccagccagaccatattcccattcccgtccaggcagcagttctttgggatccgcctgactgaaaagtcagtaagtagtccctaccctgaaatctagaatccaactgtgagtcctgcctaacaaccttccatcacctgtaaacacagtcctctccttcctcagcttcactattgacccagggattagatcattatttgctaagtaaatatgaacgttgtcaatccctggtgtatttgtaatcccattcaaagaaaacacctacatgttgatggaaagcagtttttttaatagtctcataataaacacagttcataattatatatagattaaaatatcaacaaattaactttgggtgtatgaatcctcagactggtgtgcaggagaaaatttttacttttctcctaatttatattcaacgcaagttcctttctcattcaactgtaaggaaattcagtcttcattatgttgagggccaccattggaatggcgtgattttacttcttgtttgtttgttttgggctgtggttgttagttttgtctttttaagggtttatttttattttttgacaatgcaataaatacacaagaagtatcataaaaatctaagcaaaaatatctataatattgtaaaacgccttcataattctatcttccacagataacaaatgttctttaagacttgttttacatatgcattgatttttttttttttttttttttgagacagagtctggctctcttgccaggctggagtgcagtggcgcaatctcggctcactgcaatctccgcctcccgggttcaagcaattctcctgcctcagcctctctgagtagctgggattacaggctcgtgcgaccacacccagctaatttttgtatttttagtagagacggggtttcaccatgttggcctccatctcctgacctcatgatctgcctgcctcggcttcccaaagtgctgggattacaggcgtgagccactgcgcctggcctgcattgatttttttttttttttaacaaaaaaagagaatattctgagcatactattctacaatccggttttttactatttacaatctcaccaacttccaatgatcatgcataaagaccaccctcattctcttaaataactgtatactattagcttatatgatatattggtcaaggttcttagttgtggataacgtaatctcctctggttagtctaggcaaaaaggaat

SEQ ID NO: 62333 - DNA, 650 bp, Homo sapiens
ggaagggaacccctaacgcaacgccgcaaaccggagaaacacctggaaccggagggtttctcctctcgaaactgagctggcccatcccccgccagcccctatctgcccccctccgcgtcctaggccggcccctggagccggggtgccagcgctgcccgcgctgggccggggctccaggccgcaggagggggccgggcgggcttccggtcggcgcggccggggcggggccggcgctggggccgggcgctgtccatggtgcccgcgcgcctcgcccggtccccggccccaaccctcccgcgagcttcctggcgggctccctcaccgcttgtagtcggaggagaagatgccgccgctcgcggggtcgtggccgtactcgggctccccggggccagcggagccgcccttgtcttcgctgtaggcgggggcggccgacatggggcggccagggagacttcgccgaggaggaggttgcggggccggaggccggctggagcggaggaagggaaggcgggccggtccggtccgggctggcgaaggcggcggcgcggcaggggttcagcagaggctgcagtgtgcagcggcggaggctgcgcgcggatttctcaatcagggccgcgcgctgaggtcttaaaggcaccggcgccagccga

SEQ ID NO: 62334 - DNA, 2033 bp, Homo sapiens
gggactacaggcgtgagccaccacgcccggcccctacccatcctttaaagggatactccgaatgtctatgaacactcagataaaactgaactaaatttgaatccacttgtactacatttatttgtcaactcttcgtttgtctacttcttgagaactttaacagctgtactgggttggttagtgtcgcccccaaaattcatgtccttcctggaacctcaaaatgtgaccttatttggaaagagtgtcattgcagatgtgattagtcatgatcaggtcatactggagtaaggtgagccttttacctaacaggactggtgtccttataaaacacacagagacagagacacacagggagtataccatttgataacagaggaagagaatggagtaatgcagctacaagcgaaagtacaccaatgattgctggctcccactagaagctaggaagaggcaggaaggattctatccagagtctcagaagaagcaagaccccactgacatcttgatttctgacttccagactccagaaagcgagaaaatatatctgttgttttaagctatccagtgtgaggtacttggttatggcagcttcagaaaactaatacaacagcaatttcaatttctactttatcttcctagccccaagagtaccatgtggctattagagtacaggattatgtaggctctcaaatcccttccatggtaaaagaatgattgggcttccagcagtggccaagaattgccagacgcttatgagcgcctgctgcgagatgcttgtacagtgaatgctcaataaagtggtggccattataaccgcaagcaatgagactacataaatagtaagaaacgaaatagaacaaggggcagcgggagcaaagagagaaacaagggcagctgaggaaggaagcctcaattccccggaggacatccgcgggcggaggaaatgtgaatctgcaagtcgttctcccagaccccgcttaacgattcccggccctttctccactccctacagccctcggacccagcaacaaccggatcctgtgcaggtcttccctgagtccaacgcgattctcctggataacgtcaaccagctgagcgattctgagcctgcgcgaagctcctcggcgcttccagtaatgtcacgctggtgcgtggggcgggacttcctctcacgcgcaggaaacgagaagggcttttccgccggaaagagagtggatttactaggaaggtgggacgttggaggggtggccgcatggagtgagtactgtctctggccaccgagcagagccagtgacagcagcgtcctggtaggcaggcaggcgtatcaggtttcagaggatgcggctgggaacgggagtagaggtgaggggtcgttgcatctgtcgcggtgtgtatcttttgggggttcagcgccaccagcgacttgggcctcattcatcgcgcttacatttctccacctcatttgaagaacgagcttcgtagcccacggagctgaggttagtataaatgtggaagggagaagtatgcactcaccagactaaagtttacagttttcacataggttgtgctgttctgtgtcccataagggcctgcgagaacccagacattctgaatcggtgacgcctgctggaggcagcaacacctgttgcattaattttagaacacacacacacggagttggtaattcttaagcttcctgaatctgctggcggtcatttggtgtcagaagcagagcaaagccatcttggtcatctccctccttttagcttaaaccgaagcatgatgggggagataggccgaaagttatacagcttgttaataacagagccgagagtgaaagcgcgatttcttcatttttagcccggaattatttgttgtacaccatactgtttctttgcattgctagacaattcgtctttttttacgaggttgacggggagttgcaaggaggagtgaaaagggtggtaatgtacatctacatacagtataaatccatgaaaggcaaaatccgtgtgtgttaggagttagaactg

SEQ ID NO: 62335 - DNA, 2127 bp, Homo sapiens
cgagtttatatttcatctccccaacgcatttgtgacattcttaagggcgtgaaccatgtactcaatagggccctgatgatagaaaagaaaatcagcttggtccctgttctcaagttcatagtttagtgtgggagactaatacaataactcgccgattcaacagatatttttccaacgtccgtatgtattgggtggaaaaggtgaggcaagagttgtatttcccagactcctgaacaggttgcgagatgattgactcctgagggagaccttctcaccttttcattggttgtcgctggccctctcgtctatcacccaaccaaccccgaatgcctcttgtaagccccacctccggcagccagccaatcagaagtgccgggggccagggtgctgctggggcactgacgcggtttcgattctagcgaaaaatgatttggctcggactgtcccgtgacaggcggtgcgaggaggccaggcccgcgcccgccgagccctagggccgctgctgccgacagccatggaggacgagcagcctgacagcctggagggctgggtgccggtccgggagggcctcttcgccgagcccgagaggcaccggctgcgcttcctggtggcctggaacggcgcggagggcaagttcgctgtgacttgtcacgaccgtaccgcgcagcagcggcggctgcgcgagggggcccggttggggcccgagcccgagcccaagcctgaggccgccgtctccccgtccagctgggccggcctgctctcggccgcggggctccgcggcgcgcaccggcagttggcggcgctgtggccgcctctggagcgctgcttcccgcggctgccgccggagctggacgtgggcggcggcggggcctggggtctggggctcgggctgtgggcgctgctgtggccgacgcgcgcgggtcccggcgaggcggcgctgcaggagctgtgcgggcagctggaacgctatctgggcgcggcggccgacggctgcggcggcgccacagtgcgcgacgcactcttcccggctgagggcggcgcggccgactgcgaaagcccgcgcgagttccgggagcgggccttgcgcgcgcggtgggtcgaggcggacgcgcggctgcgccaggtaagcgaggcccggtcgccggcgttcgtccgcgcttccatggcctgggacactgtgggaggctcccccggcgccgagagccctggctgacggctgacggggaggagccggcgggcggagaaggccgcgggctccccagtgccgtcacctgcgcgggaccgctgcgggaaaccggcgggagctgcgggagggtctgcagagaggacaagcgaagttagagcctagtgtacttgcagctgggagctgggctaggcccccaacttttgccctgaagatgctggcagagcaggatgttgtaacaggaaatgccagaaatattgcaagcaagactgaaaacaacccatccatgtaggaaagaataacacggactaaatgtaagcaattcctgtgtatgaggggacgtcgcaaatgggataaaatggtttagaggaagaaatggcttttaggagatagggtgttttgttttaagtaatatatacttggtcaaatggaaagccggcagaaggtgaactttattcatcagtttggaatgaccgcattagtgcccttttaagcttgaaagaggtagtttgagagagagtaattatttgagtggtaaacttactgaacctaaggggaggggaagtacaagttcacagaagggtttaggagaaaatatgccttctaagtccacacccacagtttattaaggagagccaggctggagtctcggctcactgctgttattaacctgaatgatttttttctgtgcattcttctgaggaaggggaagtgaagagaagaattcagcctaagctaaatgtagaataagctttccaaattaaaatggttttataaaaggagctcgttagtggggtcatttttgtactgtgggttttatgtgtaaatatctacacacccacttctcgtgttgatttcactttagaatatgaggaaaccacaggggagtttcaggccagtcagcgtttgatcttcaactttatcgtcttcaccttaggatatga

SEQ ID NO: 62336 - DNA, 493 bp, Homo sapiens
ctgtaaaacatagacctgctttcattccccagccccttcacaaagacccaagtttattgtagcccccaaaaacaacccactttatcccagaaaagattctggaataggtatcagatgccttctgtataccaggcaccatgctaggcacttcacattcactctcacttagttcttgaaacagccttgtgagatagtttcatcaccactttacaaatgagtaaccaaggttcagaatggttggttacacaacttagttcaaggttaaacagcaggaattgaagccaggtcttactccagagccacacagggcttctcagcctgggcaacacatccacatcccctggagagcttcttctaagtactaaggcccagccccacccatagaaattctgatgtgattgccctggatcggggcctgggtgtgaactgcagcaggaagcatgaattgaaggagctgcatgaataccagatgaacacagagccagtgaggtag

SEQ ID NO: 62337 - DNA, 1365 bp, Homo sapiens
aggcgataaaagatttttaccctctcaggggtctccaggtgccagagtgaaaaatagcttctcctcaccaatgccttgaagctctgatctaattgtgttttgacagcatttcacatcctcaaaaataaagtatgtaagccacctcagggtaatgtaggtggaattaaacacattatatacagaaaaatgtgccagcaccacccctccggtggcggttcattgagttgccggttaaagttttattttaagccttttcatgtgtagaaacctactcacttcattgtcatagaatgagtcatcactgactaatacccaagactgaagttaaattgagcaggataaattttttttaaaagatttcttttagctggacagggtaatgaaggagatacagcttcagaggtatccaggtcacgcacagtgggtgagactattccaccccaggcctccgtaacactcttcaggatgggagggacagatcacatttgtcttgaaaaaccgtcattctaacaaaagtgcatgtctgttcctgtcagttgctatggatttgaagaagttagcagaaaggaagtggttaagctaaaacatgagctattcagctgtcctggattcaaccagggagcttatcgttagcacgtaatcaaggcatttgcttaatgaagtgattatttgtttaaatcatggtgttaactgataggagatttcacaatttcatagcagtaatgtcctgggaagggaaagtgttttattgatagtactagctctgcttattcaatttcaggatctatggatgaagtgttggcctccttaaggcatggcagagctcctctccggaaggtggaagtgccggcggtgcgccctccccacgcctcaatcaatgagcacattctggctgccataaggcaaggggtcaaactgaagaaagttcaccctgatcttggcccaaaccccagcagcaaaccaaccagcaacagacgcaccagtgaccttgagaggagcatcaaggctgcgctccagagaatcaagagggtgtctgctgactctgaggaggacagtgatgagcaggaccctggccagtgggatggttaggctcaagtttgacaaaggcacctgccacagtaggcttgaataaagtgggtgagtcttagacctatcgaaaagcatactaacagggtgctgatagatgggccacataacaccccggaagatcagcagggccttgtgtaggctgctgcagcattttttttttttttcttttttgagatggagtctcactctgtcgcccaggctggggtgcagtggcgccatctcggctcaccgcaagctccgcttcccaggctggggtgcagtggtgcgatcttggct

SEQ ID NO: 62338 - DNA, 691 bp, Homo sapiens
cagcctgggcaacatagcaagacctcatctctacaaaaataaaaataaaaatcagccaggtgtggtagcgtgcacctgtggtcccagctacttgggaggctgaggcggggggatcagtcgagcccaggagttcaaggctgtagtaagctatgatgacaccactgcactacagctgggatcacagagactctgcctcaaaaaacaaataaataaataaataaataaagctctcacaattgtctgatgagtaagaaaagagactggtcacagttctgtcctttgaagtacctgacaaagagtcacagtccaaaggcagggggttggatctaagggtcacatgtgctttctggaattcctaggtcagatcacagccgggccagctgagttggagagctgggggccaactctgtggcggctctggctgtggaaggggacaggctgcctctggtaggctcctgaagagactgtgagtgcagccttgagtggaacacgggccatgtgaggtgatggaaggtttactagccatgtgaccttgggcaaggagtcactttgtcacttggaattcagtttcctcatctgtaaaatggggggaagttcaaaatgacagcttctcttatggacccaatgcttgagacctccctaaattcatacgttgaaaccctacccctaatgtgatggtcttaggaggcgg

SEQ ID NO: 62339 - DNA, 1479 bp, Homo sapiens
tgaggctgggtggtctggtgggggctcattcccttagttcttctccatggggtttcccctccacactcacctccacagctttgaggacatgtctatgtgatgacacctgaatgtgtacctccagcccaggtgtctctcctgaaccccatgcttgcaccttacctccctgctgctgttctccctgcacccctatttcagtgactcacaccactggatctgtcactatggcagaaacctgggaatctcacacccagcacacagcaggaacatctccctcgctgtcctctcctcagcagcccaggctgtcagcctcctacctagtagtgtcctccaatgggccacaggtgtgttgaactcggccccgtaaatggctgtgcagggcacaactctgagtgtcaatcatgaaagacacgcagactcattacatcaactgcctggcagatcacagatttccagaaggtgtcttaaagaagcgtttttttctaatttgtacaaagatgtcacttgtcctgggaagaagtagcctgctgagaaggggatctcaaccctcagggtgcagagcagggcctgggccacaggagtcccagggctgggcactgttttgtccatttgcctaggtgctgtaaacatattttccatgtgtccgtgacactaaaaagattgggaaacactgacctagattacaccaatagcccctctgtgcttctggatctcttctgttggcaaaaacaagctcaggtctctcccatttataccagacatgtaagttaacatgcctgctctacccaacacctctctctgccttcaggccttactcagggaagtcacaacgggttgctcgtccatacaggatcaaggacaggttggcctgttggccagacgcccagcacaaacagctcagcccagtgagggagagtcattaggtaagccatcaaccacctccctgcagaattcagtcatcattgttgcatgtggagtcccttctcatacataatcatacattactagtataataatccaattatccaactctcccaacaaagaggcttcacagatcaaactgacctcaggtttgagcattatttacaaaaaggtcaaccagaaattaattggaacgtccagtaccaggaagaatcaagtcaataaattaacacaatagagtactatgtaacccttttaaaaaagaacattcttatgactatataaatattgttccctgcagaggcaaaaaatgtgccaggattatagttctttctgtacagttccaatgtcaacagcagagtgctactcacaggaaaacattcctagtatcaaggtcagagagaagcttctcctttctagcactctcccagttgttcaaaagcaggcggtatctttcgtgcacttcatatttgaaacatgacatgcttgtgataatttttaatttttgtgatgttttcctattgccttctctatcgaggaaagaaacacagcccgtct

SEQ ID NO: 62340 - DNA, 2451 bp, Homo sapiens
tcctctgtgaccttctcagcctcagccagcaaccactttgacctggagaccttcgatgggtctccttgcttccttcaactgttgtccccttccactgcatcccccacagagcagaagtgtgctcttcttaaatctgaagaaggatcatgctgcagccctgctaaaacctttcacttttattgaatcatactgcccatcaaataaaaccgccagtccatgcctcagctcaatttcgtcctcgcatacgtctttctccaatctgagacagggtgccctcccctcacttgctgcaatcctgccctgctggtctgacttcagtctctcaaacattccagacatccccctcctacttgcagtctttgcacctgctctttcctccacctagaacgctctgctccctttctgcacatgcggtagcagcctaaatgtcaccacctcttcagaggggcatctcacaaccacacattctaaagtcggtctcagcccttgcttttttccctctggcactaagcacaacctgcagttattttatttgtggatccatttacaggttgtgttttcaggggaggggccagggacaggtggagctgtctccctcactagaatgtaaattccacacagagagggatggtgtctgttttgctcaccattgattacatgttgaaatgatactatttttggtatattggattaaaattttaatttcacttgtttcttgtcaatcttttaatgtggatactggaaaacttaaaattacatacatggttctcctatttcttttttttgtttgtttttgagacagactcttgctctgtcacccagactggactgcagtggcgtgatctcagctcgctgcaacctccgtctcccaggttcaagcgatcctcccacctcaacctcacaagtagctgggactgtaggtgcatgccaccatgcctagctaatttttgtatttttttttttttgagatggggtttctccatgaactcctgagctcaagtgatctgcctgcctctgcctcccaaagtgtgtgaggtgtgagccaccatgcctggccagctctcctatttctattagacagagctggtctggaaggcaagggtgggggagtcacagattataacagattataacttcatattataattaaatgttttatgtgctaaacaatatagaggggcctggaccaaaaatattcagggtacacacaagactattaggttgggttaggttatagcaggcttgaaatatccaagtaatgaggatgaagtcatgaatcatcactacttagctcatgtcaaatatccatgacatgtgcacatttgaaggccaacactgggatgacagaggatgtgtttcaacatagtcatacagcaaatatcctgctgcccctcccaacgccaatgggttcccaggccactgtgaatgacatacagtctagacattcttctctgcataagacttcatgctctcaccttcagctttccccttctcaaacttagtgaatgagactcagtgacagaaacttggattttgttatggtttggtttctctgactctgggctgctgctggactgagtgggctgagggacagtgatgtgcagaagcaatcagcccatattccctgagttccatgagacacacgttaagtcagagagttgggagggacacagataagctgccctcacactgcctctgccctccaggtcagcacattaatgttcgttccctccaagacattatccgctcccatggagcaagaaaatccacttctcacagaggttaataaacttacagatctcattactcaaagaggtcatgctggtgagaattttaatgcatttttcagaaagggtctggaagaattaacaacagaacaatgactggcaactcagagaagtgagggcaaagaggtgaccaatggagacagagcaggctccccctcctcccacatggtgtgcccagggctgtggatggcaaagcactccgagtccgatcagggtggctgtccctgtgcacccaccttctgggtctgggactgcttgcatctgttcttactccctggttgcttggcatgttggcacaccatctaccagtggccactggcagctttacaaagtcacagtcttcaatcttcaaccggtccctgaaggctgttctctagtcagtatttgcttcagctcactcctcgccccaaccctacaaccagctttatcaacccattttccttcttgatctaccctccggttctcagatcaatcccttatctcacacagagaagaaaatgccagctcagctgggcatggtggctcatgcctgtaatcccagcactttgggaggctgaggtgggtggatcacctgaagtcaggagtttgagaccagcctggccaacatggcgaaaccccgtctctactgaaaaaacacaaaaattaaccgggcgtggtggtacac

SEQ ID NO: 62341 - DNA, 2130 bp, Homo sapiens
ctgacctccagcctcacctatggctggctccctgccactcacaggattaactcccaacaccttagcccaaagctctctccttcatgcctataccttcccaagcctttctccacattcaccttctactccacattcttttccatctccatgcctattattaatagctaatgtaaatcaacatgtgtgtttcattcaatccttacaacaaccctacaacattggtataatactattattattctcatttcacagatgaagaaatggaagctcaaagaaggtcagcacattgctccagtcacacaggcagtgaatggccaggcaaagactgggtccaaggtccctgttcttgacccgcatacttcactacttcccttaggcaacactctctgcctaaatgccctgttcctcattttgtctgcctgagaaacccctctttatccttcaagatttagcttggatgtcacctccttcaggaagccttctctaacttcgtacagagttaagcatctatctacgttcatatttcaataacaggcttatttcattgccctaattacctgctcaccagccatctccctcaggaaggcagggactctgtcttacgacctgtcttcctggtgtctagcccagagaaggtactcaacattcaggtgatggtcattggccaaaggatcaagaaaggtaaaagagctgacgaactgatgaagggtgatcagaaaggaattcagatccatacgagtaaggatgggagtccagagacatacagggaccctgaaactactgactagtccacatggcccctggtacaacatcctccaatgcccatccattgggcagtgtttacgtgatgtccaacttctccactagcctgtaagcatcctagagccaccgatgtccatcactgtgttccgagcacccacgacaatgcctgacacaggtaggtcactgctgaatgaatgagcgaatgcatatacaaataatcaatgaggagctccctgaccagcaacacaaatccctagtctgatgccacaatggggagaaaccacttaactttgtccacacttgcacctccctgtaaaagcaacgagttggcagaccggttttcttgttgatatacatgggtcagctcattctcccggccttcccgatcctctggctggcgacattcctccacccacaccacctgagaggcttagcaatatgaggcaacatttcacagggtaagcctcggattgcctgagtcacctgatgactggaagccaactctggcactgctcaggactgggagcagagtgactgggtcgtctggaaggcagccacacagtggctgaagactcagagagtgcccaaggggattaaggatgagggaatggaagcacatgtcatccccaaccacctaactccagacggtgcccaaagggccaacttcccacccaaagaagaaatgatggcagtggtaatgataatgatgataaacttggccatcatttactatttatgtgtccggcattgtgctaaatgctctatacacattttctatttaatcacctcaatcatttaatagatgaggacagtaaagcttagagagagaaaatatgtcatctaagctcacacagccagtgagggtgaggagggctggggcttgagctgtatgtgcttaaccagccttcccagctcccacaaccaacggtgctccatgacaatgcagctgagacagctgagtctacgctcagtccacttggaggagttagagagctcttcctcataccaagtgagctgaaatatgtcttgatgccacctccactgggagctccttttccttgtctttggagcatcctggaagaggctccattccttttccccatgaggactctctctgtcaccagctcccacaggacacaagctaaaacaactcttcgtttttccatttatctaaaaactccaattaaaagctttcccaattagagatcccaaaaaggatccattgcccaggcagtggggtctgcaatattcctcactcatcaggtccctgtggataccgcccaccccataacccacagacaagattacccgcagaacaaaaggaggactaaaggcagactggacttggcctgcccctcactggtgatc

SEQ ID NO: 62342 - DNA, 2318 bp, Homo sapiens
tgatcccctcacacactctgcagctcccatggctaagactcaccaggcaaaatgactccagaaacttaacctggagtacggtgcaagaaagccactgacccaggggggctgagccagggcaccaggacaatcttgctccttccactgcactcttgccttcccaggccccacccatcccaaacaggaaagcaagatctctagacccttggagcagaagcatttgagtcctgcgaagggctgttggaagaatgctgggttcagcagcagggaacagagagatttaggaattctggttcacttacccgcctccatgcccacgtcaggcagtggcaaggccacccctgctacacaaatgctcatcaactacacagcctgggggaagtcaccgaaccactttgtgcctcagtttcctcatctgtaaagtggacataagtgtcccctgaatacgtatggcaaaccgtcaacgtgtgcccaaatagagtgagcagatgtaaggagttattgtgctattagcacagtggctcccagactcacagagcctactgctcagagagacgccgaggggaaagcttaaattactttatatactcagaagcattagtcacttcgacagagtatttcaacttccctcctgagcatctactcagttgtttcaaagactgaagcctcacctaggttccttatagacttccatcatcttcagcatctcaaagcagatccaaagtccactattcctacgctggaggtttattattatttgattatttccaggaaaacttcgatttccattttgcttgtaataaatccaaacgtggagaacgacaaactgcttagactcacacaggccctggagttgactgcgcccaggggcgaagagaccgcggaatggccgaggcaggaggccggccagggcaccggtccccgtcaggtgcccccgtgcccgggctgtatgggaggggaagggccacgggctccgcgcccaggccagggtgcccctgctgggtgtccgcgtgccccggcggagggcgcgggtcaggtggccccagactcccgggcgcagagtgtgcgctcgctccggcttggggaggcgggggccggcccgccgggaggctccgagcccggttacgccagccgcggccccgcagtccctccggaggggcgcgcggagagcgcgcggcgcgggctcactcaccccatctccggcgctgctccggcggccgctccgacggggcctctcgcgctcgctctccgcccgctcggcagccgctccccgcgcggcacatgcggcggcccgtgcgcgcccggctcagccccggcgccgctccattccgcggggctgcgcggctgccactgctgccactgccgccaccgccgccaggcgcgggcgggcgggggctgggcggccgcgctggggcggtgcccgccccgccctccccagccgctacccccgcccggctccttacgtaacctcgtggcccccgggccgcggcagcgagccaagaggcggggggcgcagcactgtgtgcaccgtcccccgcgcagccgcgcagtcgccgcttttctcccgggccacccagtcctcggtgccggccccgcgttggcgcgcccccgccccacgccgacccggggccctggcgcagtgccatcaacatcctgcctgatggacttaaagtcccattcacacctggcggggactttagggctacctttactttgcagataagggaaccgaggcctggggagggtaagtgatttgcccaaggtcacacattcagattagagttcgttcgggtctccagagtctgagatgggcatagctgtgctcctccttaaagcccaccttcatcttcctgccagttgcccggccgagtggccttaaggtacccgccaccgtgaaatttcggaagccagcctggcagagaagagcctacaggccgcggcagatgctctgggctctttcctggataaaaatgagatgagggctcccacttgaaggggcagttttaaggcggcttcatcaagcttggttttatccttagagcgaggggaattaggatggcaaaagtagaacttgaagaagagcaggctctcttcgtcgcctttctacctatcaggtcctgagtttctaccaaaggctggcactgggactaacctaaccttcatcccccgggacttccacgggatcatcttctgctgggaacacaccgcccacataagcctggcatctcaggacagtaaaaaagtcaagggacaggtcgggcgcggtggctcacgcctgtaatcccagcactttgggaggccgaggcgggcgaatcacg

SEQ ID NO: 62343 - DNA, 792 bp, Homo sapiens
aggccatgacttaaacaggaaacgacaagaatgtccatgtgcttggctcaacagtgtggtaggaagtggccaggaacaagaggtaagttgggaccactctgtgaaagacctccgggtcatgttaggagtttggacttgattctgaggcctcagggagttagtggagattttgaagtaggagggtggcatgatcagacttgtgtcttagcttctctggcagcagatgggagaaggttgtggaaaggcaggctggaggcaggagaagcttgtcaggaggatcttagcaagactccaagattggggaaggacaggaaatgtcttaatcagcccccagtgaggctgggagcctgattagagagaagagccagggagctctggcaatgcaagggcctgggaagctgcagctgctgggaacgggtggggagtcaatcatcaaacaatccaacaaccttgaggagaggactttggacctcactggctgcctcccagcagaattcaattccaagaggcaaaaatagaaatgaccagatgaatagcccagccagctgcaagtgcccccaggggcatcctgattatgctgccccatgctctgagctatcacactcattgtcacccttacccctatcaaaaggtgtctcctccactagactatggtcttcaagggcagggtccctcctgggtttttcttgttctgtttggctccatcctcaggtaagctctcttctggactcccaactcacattcaagtctagcaaattcccaaacaggtcaagccaaagtctccgaactaag

SEQ ID NO: 62344 - DNA, 2024 bp, Homo sapiens
ctggtttaccactgactgagggagaatggaaggggaacagcagaaaataaaaaaagttttgaatccaagttaataaacttgacctttaatctacaggcaacagagagccattggatcagctattttggatcacggtggtgcttgaagatggctacacctatagcaggtatatgtaagataggctagtagcagagtgatgctagaggcaggacatcaatgagaaaggtactgcactgacaccgtgcaggggatggtaatgagaacgttgattaggtgggggcagtgggtaagaagatgcaagaattactgtaggggtacaatcgacaggacttggcaagtgattggagcatggaaaggcaagaaagggcatcaaatctgacatcaaagtttccaagttggttgtattaacaaaaacgggtgcatagcctgggaagtaatttgggagggaagaggccaagctttgtcgggatattaagtgtttatacatttgctgaacatcccacaagacatgggcaagactcttggaagtagctggatactgacgactgaagctggagcagagagggggtatgtttctgcaaaaccacatacaaaacggactacggaaatcttactaccgaggcttgcccaggcaggagagaaaggtgtagcatccctgaagtcatcagtcgtgtctactcttcaccgcctgctctcacctcacgttccccacgaagactccgggagcaggcggccggaaggagcccttccctcccttctccggtgattcccagaacttccgtctctacccgtcacctgctcccaatcaaaggagcttaatagacggcgacgttttcgactgcccagccaccaggcaggctgaaagtgcatggagggcatcatccacctttagacagctacttgcccacacctcatcgagctctgggcgttgtgccagcatttgaagaagcgatctgttgcaaagcgatccacacggagagccttagttatcgcgagacttgacaggcaccctcaactttagcccgccggaagcggaagtcaggtggttgtcggattttagaggaaggcgctcggttacattggagaactggagtggtctggagttccacggtgtagtggaccagaggccacctctcctgggcttctcagtgtctcgccggcggggttcggcctgagctggattgacatagcccttggcgggtgagtcgccccggacgcccgggaggagggagcggggcggccgagctgggtggccagcgaggtgtcctccccctgtgcggtgatctgtactctttgctagaccgaagcccgtttacttctcacggcccataatttccctcacttctggaggtataaggtgcttcggaagggagcaaatctgccagaaccttggtaagcaagctgtgatgtgccttgaggacggactggaaaacgcagttgttttcagtctgcatcttcgtctgttccccgggctcacctcccagggcagcgaaaccccattctggttggttatttccagggttagtcgcccgcagccaaagttctttgtggttttatttgtggtgaataaattagcagtattcaagtacaaatctgaaaggcttaccctaaaagaacatacatactttatgaagtttgtattcatacttgaactattttgcttttgaaggcccagaggacaaatcttgtagcttcttgctcttgagaaccagttccctctttggaatattagctttggaagtctttagagcgtttttttggtttgttttttgttttttttttgagacggagtctcgctctgtcgcccaggctggagtgcagtggcgcgatctccgcctcccaagttcaagcgattctcctgcctcagcctcccgagtagctgggactacaggcacatgccaccacgcctggctaattttttctatttttaggagagacgaggtttcaccgtgttagccaggctggtctcgatctcttgacttcgtgatctgcccgcctcggcctcccaaagtgttgggattaca

SEQ ID NO: 62345 - DNA, 1710 bp, Homo sapiens
aggggctgtgctaggaactttcgttcaacaaatatgtaggcaatggatatgtaaagatgaaaaggtacatggtccttgctctcaaggagctcggactgctgcgagggagaaagaacatacaaaattataatacactgtgctaagtgcaccgatgagataggcacagaacattaccccacaggcaaatcagcattggggcactggagaatgctgccagcaggaggcagtgcttgagctgagtctgagaaacggactggggttggccaaacaaagatggtggaaatgggagtgctgtattcttgacagaaggggtgcgatcagccaaagcaagggaggagaaagcagaatacagcctcctggggaaacgcaggtcatgccgctgcgggaacatgaattgctggactgggagtgcgggtaggaggccaaaggtcagcacacgcagcccaaggagagctcggctgccgccgggcccagcgctcagaaatcaccaggtggacggcagcgcagcctactgaggcggggcgacggcagcaggccgcagctctgggggtggcggcggctgtcctgagccccggaactgagagacggcaagccgctggcagtgcctccactcactcccgggccccgcttctcccgcgctcttcaacaagtacccctgaggcccacccctctgccgccacgggacctgctactggccttggtcgtcgcaccagccttcttaggcatctcggcgcaaagaagccgagcggagccccgagtattgggtgttgcccgaaggtgcctcagcccgctgcggagccgcagcatccccgcctgggaaggcgccggaagagccctctgcgcttgcgcaggtagccggcaggagcggccccaccgcccggcgcatccgctctggccagagggcgacaccttaaggccggcgggagcgagtctcgtggccgcagaacatgcgcgagtctcttttgttctggaacgggccgagccccaggaagtggagctgcggagctgaggcctcaccgtgtcttggcccaccctgctcagctgataggaaggtgtgtcacctctttcctaatcggggaaagaaaggtattgtcacttctcagaattggagagcgcggcaaggagtgcacagggccaggtgtcttctcgctcccacagccaagcagcagatgcagagtcccacgcgctgcctgtggccatcaagtcgatatagagcctcgtggcggcttggcccttgtgaatcttccacgtatcgatggcgcacctaccttgtgccaggcgcagcggatcccacaatgtaaaagaagaggaaatacactgcgacatgtgatatggagagacatgaaacaaatcagcagaggcaagatcatggagtcactgaaggctttcaagcaagggattattagcagcccaatttgctgggttttagaaagacaccggctgcactgtggccgacagaggaaaagccagagacagggagatccgccccctaaatgggagagggtggcctgaactagagtaaccgcagggagggtggagcgctgatcatttcaaggatcttcaggaactgaaatgatcagaacttgggaatgactgcatgtgcgaataagggggaaaagtcaaggaaatgcccaggtttggggcccaaggaacaggtttgggaggccgaggtgaggagttcagctttggacataatgagtttgagatgcc

SEQ ID NO: 62346 - DNA, 1788 bp, Homo sapiens
agtccgagaccagcctgggcaacatagtgaaaccctctctctaccaaaaataaaaataaaaaaaattagccgggcgtggtggcgcgtgcctgtagtcccaaatactcgggaggctgaggtcggagcatcacctgagcccggagaggtcgaggctgcagtgagccatgatcgcgctacagcattccagcctgggcaacagagcaagaccttgtctcaaaaaaagcggggggaagggggtgacaataaccccaaaacatcagtcctgcaagatttttcaactactctcttcccccaaacaaaaacataaaacttcgcaaatgggcaatcaggacaacctgatctgcccctctatccttgccacttgtctaattctgaagtctgagcgacaatccataattggaatgcgaaacgcctttcaatggtaaaacgcacgcttgcctaatgaagacactaacgtttagttggcgactgagccgtcctggttcacagatttcgatttcgaccctccggagcatcaacggctcgggaggaaactgaggccccgggcgggtcagaagagcccagcccaaggtcatccgggagtccgggtaggccgggccccggggatctcccagcccggcccggcccggcccggcccggcccggcccggcccgcgctgccgctcacctcagcagcgccaggaaggctgcgggctccacgtccggcagctcgatctcggccgacgtggtggccatgccgccgttgaacatggcgtcaaagacggcgctgccggccgccagcacgaagcggtgggcggggatgcgctgcgggcccccagcggcggcggcgccgcgacccttgcccagtacgaagcgcacatcgctcagcagctccgagttgaagaggaaggcgaagcgctccttcagcgacgccttggtcgcctgccagttgtagagaggttcccgctgcagggggagcaggggccccagagaggacggtgagggcggcggcggcggccccgcggggcccggctccgcctcagcccccgacgcctgctccccagctgcggcaggcccgagtgaggccatcctccagctgcgcggttgcccacgttatggacaaaactccgccgccatcgcccaggccgcctccggaggccggcgctgcctccctgccttccgggaaaggcgcttccgggggcctcgcgcctccgcaggcccctccctgaccgcgcgcgcccccgcacgcccgggttgccgctgtgcgcggccgcgggaggtgtaacaggactggactcccggcagccccagggcaggggcgtggggagctggtcctagctcagcgctcccggaggtggagcttctgcaggctgggtgctgccgggcctacgggcacccaccccctggctcagtgccctgggtattctgactcagtaggtctggggtagggcctgagaatttgtaattttaagatgcatcgtggatctgcaggcggctctcacggctgcctttttcttcctgcaggccccttatcaccaagtccagcgcccccattgtgtatctgggacatgtcccaaggcctgtcccgaggagtgttttgcctggaagtggaggggcaggaaagtatggccaagggaacacgtgagggaggggatgacatgacttcccacaaccctgtaccccaagcgtggccaagtcgccgctccagaaggccgcgaaacccgtggaaattccggaagcagaggtggaaggcttagaaccccagtgacctctccccaggtccgcaggtccctttcccttctaattgacc

SEQ ID NO: 62347 - DNA, 2567 bp, Homo sapiens
gcctttaagatcaatctcctggcccttggcttatcctgctgggactaggacaaggacagggacaaacatttccttttacttctcctcacctccagaagtacacaggcaactcaccccagtctcttgtccgcgacactcttccccccaaccccaaatcccaggcctggacacggcatgattctggcacctgtggagctctcagttccccaagcccggctcagacaaggaggcgccaggtacccagttaagaggcgctcctgcaagatcctcgtggtccctggctgccaaaggtcccaggcctctgggcagtgagcgctccacagtcccttgtgtggcgtctatgctgcgcggaggaggcgcaggccaggagagggccattggtctccactatggtcctgcctggccaggagtgcctatggctcttaggcacgagccagcggttccgggcaaacctctgtgtggctgctgggcctgactttgcagagctggcgcccgggtctgggcggggtgggtggaggctatgggaggtggggccgggggtgggctcggggggagcgacggcatccctgctccggctccggctgaggcggggcggccaggctggcttgcggcgcagcggccgcctttccccagtgcgcctgccggcggcggcggtggcggcgtcggcaatcccggctcttggcacaacgcctggcggccggcccagggcgaggagtggcttccaggaagcgggcggaggagcgttccagccgagtcccgccgtcgccgcggccccgcgcgctccgagcggcccgggcctggccccacacggcgtctcttcgcgcccccggcgcctccagctcaagccgagggcgcggtgccggcgcgcaggctgacgggcgcctgggcgcgccgtgcacttgccgggcggtgcaggtggcggcgcgcgccctccgcctctgggccggggccagcgcagcgctctgcgcgcccggagggggcgggagaggcggggcagcccccgtcccagccccatttaacttcgcggcggcggcggcgactgcggcgccgcgggctggaggccggcgtcggggaaggtcctggtgccggattccgcacgaggtgttgacgggcggcttctgccaacttctccccagcgcgcgccgagcccgcgcggccccggggctgcacgtcccagatacttctgcggcgcaaggtgggtgcaccgagctcggcgcagggcggcccctcaggggtcgggggaaggcgctccccagagggagtaagacttggagcagtggcctctctaagcaagttgggggtctccaagcagagtcggggcgtgccacgcgggccccagggggcctcaggactggggtgctcctcactgctgggcacctcgggtcgggcgcgcttcgtgccgtcccggaaggttcagggagagtctttcggcggcagttcgcgggctgaggggcgttcttgattatgggggaactccacagggttggagtttttcaggattgggagttactaagcagaaacctcgcgggtccgaaggtccggccggttgaccactgggtagcgagcgcccagaacgccgggggttgaggcgacgcgcgatcgtggaaagtgggcgtgggggtgaccgggacgcggcggaggcactggaggagcgacttcgaggcagcgggtagtcggaggagtgtgcactcggaaggctggtgcgagcaggcgagggtggcgcagagtcccagggccccgcactggccgcctcccttcagccaggagtcgccgcctcaggtcggaaacagcagcacatttgcggatcacattagaccaggcccttaatgccttctccagatggagagaagccaccgacccgcccccggacaccagctccgccaaggcgcccgcgaggcgaagcgggagtcgagtgtgacctcggcttttccagtctcgactcatactgatttccctgtaaattgacaggaaaagtaagggaaaaagtccccgcttccctcctggtttcagctgacctctgctggctggccctcacctacttttaggagattgtgttaggctggctcaggggctgtgtcctccaaacctccctgaacttagctctcaggcgtctctctgggtgtgggtcccggacctcgagggcgcacggtgtcatctagcgaggaaagccttgaactatcagaagatctgcgtttcagccctaaaatgtcactatcttgctgtgtgaccttaggcaggtcctttccctctctgggcggctttgttgtcttagactcatttttgccgcgagcagcagaagctagcctaaaccttggctctgtgctggcttcctgagtcaaatgccaatagcgacaccctgctgctgacagataggcttgggcagggatatctcagcttctgaagagctggaggtatgagatgcccactggagacaggtccagccctcgcctgactttgttgtggaccttctaaagggagcccagttagcctgcaccctgcagtaggcagcggcaacctgggccaacacaaacctttccaaaatagtatatgggcttcagggtccctcc

SEQ ID NO: 62348 - DNA, 1500 bp, Homo sapiens
ctagctccatacagtgtcttatgaattagaacaaggcaatccctccctgcagacatagcttctcaaatacatggcttggtggcctgtgtaccctcagggtctcggaagggacttgtcacttaagggcttaaatgtctgttaaataaacatgcatccatgaatgaagatatataccctgggataaattaatcagactcctctgcctcttgtttcactttcttggacttagtgcctctaaagcctcttttggctccaatgccctgtgaattctgtgatgcacaaagaactggtcagcaaggtacatcttctccccactatcccattttatcgatactatcccataatcatattaatagagctcttttgttagaacaaaagttaagtcttttcaggatgatgttagggttctctggccagcgagatgactgttgaggtaaaagcgtggagacttacgtttctgtctcatcagcggatctgaaacaggctttgagagcttcagagatttgttcctggtcaaatggggctgaggcttcaaggcacagtgttcattttgccttctttcaccttataaaatttaaatatgctttgaggcagtctgttgacctttggccaagggcagtgtttgcccagcttgaatcactcactgacctcttttggatttttccatatctgtgtgcctgtggcagtgctgtttccatgtatccaggcagtgtgcatagaaggtcataaaaggagatttcagaccagcagtcttcatcattcacgccactcactgttcggatcccagctctaccacttcattactgtgtcacgcaaacgtctctgcatcgcatctcagttttcacatctatacagaggagataatattagtatagacctcagaattgtttggaagagttaatccattgtgaagtggaaaaaagtgaaaaaccaaaccaaacaatgtctggcacatagtaagtgtacaataaatgtcagcattctgctgttgctgctgcttgtcagcattagaagcttgaagcaagcgcagtgcctgtattttctggtgtagagcctgtagggggcactcaagaggtatcagctgtggagggcctgatcttcagggagtgtgggtgggcatggctaggtctgtctcaccagaggccctgagaaaaggttctaatgaagggtggtaggtcagccctgtgtccctgtccgtgggttggatgctctgttttttccgtagggtcagcctgggtttgactcaaggccgccctttctgaagtatcttgtgattttggtgtttgggtggggcttaaggtgttccctggcgtctacccttgcttcgtatgtgctgccaccaaggtggttgttagaaaactgctagatgtgtgaggctgagctgtgaggagcaagggatgtgccaactaattaataacaaatagagtttcctttcttttcttttcttttgagacatggtttcacactgttgctcaggctagaatgcagtggcatgatctc

SEQ ID NO: 62349 - DNA, 1674 bp, Homo sapiens
gataaagatgaatgcccagatgaagagatacgtagggtgaggtctggaaggaggtcccaagtgcaggagttggggtgtgccacctccaggcacacagatatgttcaccaactcagaaactccctgaacccaatccttctgagttttcatggaggcttcattacccaggcatggttgatgacctcattggccattagtatcagctcaactttcagcacctctcccttcaccagaggttgggggtgaggactgaaagttccaaccctctaatcacttgattggttcccctggcaaccagcccccatcctgaggctatccaggggtccaccaagagtaacctcattagaacaaaagatgcttctagcacccaggaaattccaaggaatttaggggctgagtcagatgcccctgtcactcaggaaatcacaaagccttaggagctctgtgtcaggaactgcagtcaaagaccaaatagtagaacaaaagattctcctatggcccctattgctcacaaaattacaaggattttaggagctctatgtcaagaaccttagtcagaggccacatatatatttctattatatcataatatcacaatcaagcagaactttcacccagctttcatagttattcttgaccctttacaatgtgtagatcaaggtctagaatgctcaactcttgtccttgactagccatcccatatacacttcctcctgctcaagtcaaatccttcagctggatggggatgtggagacacagctgtatccccacgtctcatattcatagtccctggaggtgctgtctggattcctcctgaccttgtccctggtgactcagcagctgtggacagtggctggtggagatgatgcattttggcagcttctctcctaggcctggctcagtgccctgggaagatcgcacacttcctgatccaggcttgttcctcctgctttccctccaacttttgctacttaagggccctgacccctttggtcaccccatcctgtgagggccacatgccactgagtcttcctgacatttaggaagtcaacttccatctggctggaaatgtccaacgcatgtttggtatgatgcttgctttctgaagccgtgtgtgaactcagccatttctcctaagggaaggcccaatttttctaagaaaaactgcaccataactacccttgtcaaagtcaacgttgacttccctgttgctagatccaagggatacttctctggcctcatcttcctcagtttcttagcagcattcaagacacttgactattctgtttgacgctaaatcttcccatgacctaatatagggtgttttcctttttattctactctaattgatgttcatttttagtctcttctgcttgctcctcctcttctacttaatttcaaatattagaattgagggtgtcaggcaaagccctcttgcctgccaaactctttctctagggagtggcttttctggtataatggttgtaaatatatgtaaatatacatacatacatacatacattatgaaaatgttaagtgatgacttccaaatccctatctccagcgtcagatttcctttctgagctctggacttgcatattgaatggcaaactcaagctcttcacatggatgttttatggacacctccaacttaacatgactcaaacagaactgt

SEQ ID NO: 62350 - DNA, 1942 bp, Homo sapiens
aaggaacagcttggaatgaatggtattccttaaaattttgattttcccagaaaattcaattctggtcaaataatgatgggcaataatatataccagggctattgctttgacatttattaatgaatttggattacaagaaatactctagaaatctattagaaactatataaacaatattcagctccgtcttaactagttgattacattccataaaaccattatttttattctgttaacatttcatggaaatggaatttattgaatttgcctcatttgtgctagattatctttctacctcatacacagagttgaattttcatcagaaagtcacacatacctgtttatcttttttttgtgttaaaggggtatgtttctttagaaaccaccagcttaggatatggtgtcattccgaatgtgattcctgtcagactacagtgagcacaggtaatggatattgtcataaatgacatttggttcattagaatctgtcaaaatgggctgggtaaattatggctgttggaaagagcacaatactgcattgtattggggaaacacacttgtaaggaattcctgagctggtatttattacaacctgccacatcatttccattttctgcgtttcattaaatttaccgtctgggtgtaatcacaagagtgaaatggaaaatgtaatgtaaaatatctccttaaaccctccgaaacaaaaatgaactgaatcatccattcaatcaagacaagttgaacacctactatacaccaaccctctgcaataaagtgaggaacaagacagtttctgttttcaactaggccagagcccagcaggggaaatgaatggacaaaactaatcctaatgtgatactatcgtagaggtgttgacagagactatagaagtggagaggaaggttctcttcctgggggtgagagacttagtcatgggtgtctacaaattaggtactgaccctgttgggtagagactgtgagtcacagcttctcaatgtgattggaattctggggctggtgctaggttcattgtcctttggcatttttgtgggctgtgtgcattacatgggtggaatttaatgtcattttaactcaccagagaaagtttgtgggtctagaggtttggaaaacaactcgctctgtaatatgctgcattttagtgcaaatctttcaaatgatcgcaccgtacttgctaatctttgaaggaagctctctcattgtctgaagaaaatggtgctgattaaatttacagggaaatgactttatttaaaaatctcctctagtttgttgacagcactcatgtttcataaaataggggacatgatcctgaatttcttatgaataaaaaattattaattttgacatctactttgaatgacttagataatttatttggcgtagtgcccagtaaaagcatggaagtgacttggacatcaaccacaaaatggcccagggaccccttcccactggatagacatctggagtggcgtataaggaatagacaatgcaggcggacatttaattaaagattggtattcagacaggagggaagcgtggtgagtctctcagcgtaaaaggaatagtgagtctctgagacaaaagtaattttttgtgttttataatgatgctttgcagcttgaaacattttagctataaaatatagactatgaactcataatggcattaagtccagatagtaatttttatggtaacaatttatgatgtatttttgtgggttttttaaaggggaaaagtctttagcatttaacattttgcaatttaaaagatccctctcttgagccttcagaaccagagtgaacacaaaaattgtaagattttattgagttacctattatgtgaatctggatttgtagacattattttgatagttaatgacactggcaagaatcatgatctaaaacaaaaccatgttaactttttt

SEQ ID NO: 62351 - DNA, 1409 bp, Homo sapiens
atggggctgcctcacagtgtaattcttaagattttttcccttcatccactgttcatttctcctttgactgtcactcccaaaaaccatttacaaatttaacttattccatagcaaggaagattgtgtaggatataaagggtctgctaacatggtaacatgaattggttttcattctcctgtcttcccacatcatctctttctacctccacattcgtctttctagggtgagattctggctggtcatactcttctatcagaactgcgattgagaaaggaatattcaaaccaaagaccctgttccttttaatggaattaaaagtttcaccctcctccatttaattcagcaagggagagtgtggcctggaaggaagactctgtgactagaaataaagactcctgggttctagtccttgcctagctcttttgcatggttttgtttgtcttctggccctgtgcatgaagagagataatggaaaaatagcatgtagactgtgttgcaaaggaatgtcatagattgtattttacatggagaagcagacagactgtgaactccctggcctcttcatgaatcaccttacacctatgatgaaatccgcgtccctctccaaagcctttaaagcctgtatcatctggcccctgtgttacatcatgtgctgccatctgctcctcattccctaatccccagttacactggctttctgggagattccagaatgtcaggtgcccattcccccgatgggcctttgcaccgacccatccctgaacctggaccatgtgtctccctgctcttcaacgtagttacctctttctcaacgttgagcacaagtgtcgcctcctcagagaggctttctttgaccactctacgtaaagtaggcccttctcttttctgtttagttcttgcttagcctttagggaaagaagtggttatttcatttatttgtctagtttgcctctcccactagtaagctttgcaagagcaggcaccatgtctatgatgtccaccattttattcctagtgctagtgcagtactgaacacatcctaggagctcagttaatgttgaacaaatgaatacatggccttcgctggagatgattctgcttcctgttatgatttcagtgggactaaatgatattgtgcaatagaactggactggaagccaaagactggggtaataacctcagtttggcctctgacaatctatcttcttaggcaagatgcttcacttactgcgacctcaactttttcatctgcacagtgagcatggacaatttataagaaatcttctagctctgaaaatctattaagtgtgtgtaatttgttcattgttaaaaaaaaatagatcttaggattgaatggagtttagagaaagaagtcccaggaacttatatgaagcaattttccaaactt

SEQ ID NO: 62352 - DNA, 711 bp, Homo sapiens
tgcaggttctataaatgtaacatgaaaaatactcgacagaaaattttgttcagaaaaaaaaacccaaccaactaaaaaaacacacaccaaaaaaataaaaaaataaacaaaacaaaaatagaaagtggggatgaggttgtcaaagtgagagtcactaagacatccttttccttgttttaccttggaatgtatatatttaggttgatgtagttccggttgaactttatagtgaaaataaatgatctgatataaattacagtgcttctgggctgaaactgatgtttattgattagttaatattgtgtggacaatttatttcctgtacatcttgctacttagcaaagctgtgatatccagcaggaaatgagacatagaaaaaatatgatggaacagctggacttgagcatttatgtgtgggagggaaagtcagtgaatcttaggtcagtccagtgattgcaaaatcaaacaagtgaaacccataaaatgaaactctgtgtgatgagtgaatttgagtttatacagcatcacttggtctcatagtagaaggatttaaaagtgtagttttgggtccttaccctggttctaatgcttaggagcaccgtgatcttgggcaagtcactttaaccttataaaattttaattgtcttaattatagaaatgagttttcattagaatgaatgaggtaacttatctcaagtttcttagcatgtt

SEQ ID NO: 62353 - DNA, 696 bp, Homo sapiens
cacagagcttccaagctaggaataatagagcagacaacatgtcttggccactttgcaaaattaagagtctgtttttatgtgaaaggaaatactattcctcatttcaaagttgcaaatttaataaacttttcaaaggttgagagttatattggaaaaaaaccagcagagacaaagatttgatgccaaaataaaggtaagtttacaaaaatgttttaggttctagaaactagtggtgtaggaataacaggaacagtgtgttgcataatattttccatacaaatatttactgactccaagggcaatagcagtaaaatattaccccagggtgaaacttaccactgagattgggttgaacagccagtggatctttatttacccaaaggcaaatgtatttgatgtattagcctgggctctccaaggtggggtgttggatgtttatttgcttttatggggttactccccctgatctatcctataactgctgagtgcctgctatttatggagtttgctttttccaggagagagccagcagcttgtagaagcatgctgggttacataatggtcctgctagtctgaggagagccttcttctctaacaggattcaacactgctagggaagaaaggaggaaagcaagaggcaatagtgatgtgtttctgtaccagcttgttacctatttcttgatataaaaaacaatt

SEQ ID NO: 62354 - DNA, 1672 bp, Homo sapiens
agagatgggtcatttgaggtcaggagttcgagaccagcctggccaacatggtgaaaccctgtctctactaaacaacacaaaagttagccaggcgtggtgtcaggagcctgtaatcctagctactcgggaggctgaggcaggagaatcgcttgaacccatggactgtcaagagacggaggctgcagtaagccgagatcaccccactgcactccagcctgggcgacagagtgagactccatctcaacaagtgcctgccaccatgcccggctaatttttgtatttttagtagagacagggttttaccatgttggccgggctagtctagaactcctgacctcaggcgatccagctgcgtcagcctcccaaagtactgggattacaggaacgagcactgcgcccggccaaaaccccgaaaatcttgaaggcctttccccttccccgcccgggctcaaacaacagccggagacgccctgccacgccccgtcgcggtcccggggagcaggctggctgactgagggcgaccatgggccccgaaagggctgcgggcgacgcgggctcccacctcggggcgcggtgactggggcgagaggtgccggcagcccccaagccagccccgcagcaaggagccagagagacgcgccctccccctcctcccacccaagcctcccgcagtcccggcgatcggggccaggccagtcgcgggagaaaggtgcgcgctcacccggcccggggaaccggggcctctcctgggcaggttcccctttgtcccgggactccgggctcttcctctccgccctcgccctgccgtgtgaagccgccgctgggcgcctcaccgtgatgttgcagtggagcctgagctgccgcggcggctcctggttcttgtggaaaatagaggacaacaacttcagcttggccttgaaccctgacacggacattttactctcacctctggcgggaggggcgcggaaggtgagccggtcgggagccgctgtcatggccgcgaccacccgcgggacctctcggcggcgctctcgcggctccgcctctccccgctgcctcaactctagtcggagtagggctggaaaatggcaaggggcaccgaggcctctgcggggagctgtgtggcggcctgggcggctgctccccttgtaacagactccaccgacaggaggcgctcctcctgtcaagccacagcttaaaaggacaacagcaccaccgcccccgctaccgcctgggaaagggctgcccctaccccgctcccgtccctctcgtccctcacccctcacccctcacctctcacccccgcgcgcccggtgcgcacccgtttcggcgggtgcacgagtccagagcatgtgcgcgcttccggctgccccctcctggctttgacccagcactgctggacccatctagtccgttcctcacactcgcggactggaagctccaggctgcacaaccaccaactggtgtgtgtgtatttaggggcggggggaggtacaaaaccaccaactcgtgtgtgtgtgtgtgtgtgtgtgtgtgtgtgtgtgtgtgtgtctcccaagggaacagcactgctgagttcaggctatcagctcatggactgtcagcaaaatacagtcacaagaaggctatgtgctgttttgtcttttgcagtgatgtcatgttgctcatgttt

SEQ ID NO: 62355 - DNA, 2083 bp, Homo sapiens
tgcctccagtaattgctcagtgcaaacatacataactattctatcacagaccattaagggtgtctctctccatttttagattttccgcttgagtttccaggtagtttctcacctgttttcaagcagggttggggcagccgtttcttcaacagcgccagccgtaaaacacaaagatggaggccaacctcccacacccgggcaccctcccttcccccatactgagattgacaagtaagcaacccggtgatcagtactaaaatggagacgtcagccaggtgcggtggctcacacctgtaattccagcactttgggaggctgaggaggaaggatcgcttgagcccaggggttcgaggtcagcctgggcaacatatggaaaccctgtctctatgaaatgtagatcctgtctgtgagtgtgtgtgtataaataaatatatatatatatatacaaatacatacatatatatatttaaaaaataaaatggggacgtccaacacgtgtactaggggcggtgtctctgcctggggaggtggtgatgacagggcaggctccacccaggagaagctggaagaatgggagttccgcggcagaggaggcggggcagggcgttcctccaaacacaggaataccacgtgcgaaaacaaaggggtgtgcgaagaccgggtgcatgtgtacagctgcaaactgggggaaaggcgccaggcttgggcgatgaggatttgttcccccatggattcccttcctgcccagggtccgctctcgccggtcgagggtgcctaacaatactccttgccacaaggttcgcagccgaaaaggtccttcaagtccggccatccaactttcactttttatagacaaatatacagaggccttagataagtgaaacggcttgtctcgggttacagctctagccaacacagggtttctgacggtcagtctgcggattttcctgcctctggtccgcaggcactgcccaggctgtcagccccaaaccctactccggggaccgcggtcaggttcgtctccgggcggactacatctcccacaatgccttgggcccagcctccctcctgccgcccggctgggtgccgtctccaccaacagaaaggcagaatttccagggccgttctcggcagccaatgagcgcggcggtgggcgggcctctcccgtccattgttctcggtgccccacgggcttgagccggggtgaatctggaggggccgggccgagcccgggggcgctttcgcacgcgaagcaaccgctagagcaggacctggtctcccgagaggtgagccggagaggcaggcctggagccacgcggaccccgggcagtagcccgaggtgagggaatagtgggcctggagccagctgccggcagctctgctgggggaggggcgtcggggtcgcgctccgtatcctgcgggccctgcagccccgatttacgcgccggctccgctcagcgaaccgtcccggacgcgtctccctggcggagagctccttgcctctcctaccgagaagcgcaggctttggacgggaaggggcattcgacgacatcccgcgcagcgtacacgttttacagatggggaaactgaggttcagagggggcgtgtcgtgccccaagtcagaccgcaaattagctgacctggcacacttttcccaggctcccaagtaggaagagttctcttacaccatatgccagtatttcttctagtcatttgagtaaatacacgttgagagcttcggttttcccactagcttttattttttgtccttttttttttaagcttttgtcagcttttctccccttttcattgagggagggttgttagttgagtctttatgatgtagtaatgattttttaaaaaatttttttatttttgtagagactgggtctcactctgttgcccaggttggtcatgaactcccggcctcaagccatcttccctcctcggcctcccaaagtgctggaattacaggcgtgagctacagcgcttgggctaaaaataattttgtattgcttttataatattttaagtcgtttgcaattccactgctttcaatattttgtaggtgccgtcccgttct

SEQ ID NO: 62356 - DNA, 1760 bp, Homo sapiens
gtgactacagagcatctggcctggaggattcagaggactgggaagagaagagaaggaaactgaaggggatttggggcagagactatcacaaactccagggactgggtgaatgagtagagctgtcctctggagaaagggactgacgccgaaggtctgcagtgacccagccctgccctgggcaccttcatgcttgtctcactaagaatcctgtgagtggctggcattgtcatttcacagataggaaatataagtgcaggaaactcacatggctgttgagtggtggagccaggattcaaacccagacctgtctctttctgcatggagatctcagttttgcttgaagcaaagtgcttgattttctttggccctgaaaaaataactgcattttattccttctattaaaataagcaaacctgtctccctattttacagctgtagctgtcgttgcttcccttccggtggaggtgaccagtttgtaatgaacttctggatctccagtcagatactatggaggagagagtgatggagggctgaggagaggcctcaggttgttatttggttggggaggcacagagcagaggttcaggtctcagcaggtgtcagaggtgattacagcccttcccatccaccttgcagcaggggctttgtgcctttcatctttaactgggcacctgagatgggaaccaatggggaccatcccagacacatgggtttgtctgtccctgacttctgcctctgagattgtctttgttggtctttgtttaataaacgccccgaccttcctcatgattgctcacaggagtccctgcgtttgtcttcatcccttctcaaacatttactcgacataaggccgcgtgacctctattctgtttgtccagcttatgacctttggacacattcacccagcacaggatatttccaggcctggttagtcagtggcggtttaatgtttttctgacaggaacctctgggcactcaaaattcaagtaccttctaattctaatgaagatcggacctatattaatagattaagtggcagagcttatgtctctctgtgactgtttccagaggacattttactctccatacccagccctaatccagatgcgtggagtttctcacctgaattcttggagcagctgccaaactgaacctgtcttcagcttctgccccttcatcccagctcttccacttctaccagagtgatggggcactcctgcttaaaaaccttcatgagcttcccagtatctaccaaatcaagcatgacctccttgttctgcttggaatccgtggctctgtgggacctggcccaaacctcccctgcagtcttttcccacccctgaccccccatgctctatccccactccattcagaccagatcttgctctttcttgaacacagcctgtgcttttgtttttgtttttgtttttttgagacggtctttctacgttccccaggctggagtgcagtggtgccatctgggctcactgcaacctccacctcctgggttcaagtgattctcctgcctcagcctcccaagtagctgggattacaggtgcgtgctaccgtgcccagctaatttttgtatttttagtagagacagagtttcaccacgttggtcagactggtctcgaactcctgacctcaggtgatccacccaccttggcttcccaaagtgctgggattacaggcgtgagccaccacgcctggcccttgctcctggatttttggcttggaatagccttgtcccatctctgtga

SEQ ID NO: 62357 - DNA, 1445 bp, Homo sapiens
ccactgcactccagcctgggcgacagagcgagactccgcttcaaaataaataaataaataaaaaataaaaaacaaaacaaaacaaaaaatttttgtaaagacccctctcgctcataccaccagggccgcgcagggcgagagatctccacctcccctgggaggcaagacccacaccctcccaggtgcgcgagttgtggctgcggttcgcgaccccgccccacttacccagctggtagaaaagtcatcaatgattcgtctgaaacgaataggcgcctgagatattctcccattttatgggctaacgctgctgtctgtcttcgggcggcggcctctgggaaatgtagttccggagaacacggagtccttctggggctaggttttccgcttccggtgctcagtggctagccgaatagccgtgtttgggacctgggctcgggcttcttgcgtccccgctaagaacatgtcacggggccgaatcgtccgtattctctcagcttcaagctcctctacttttcaaccaggtcactagcccttgactcctcttatcaaacttccggaactgccaccccaccagtgactccacaggcaccagggcatgcaacagggctgggacaggaaggctctcttcttcacctcaagcctgctgggctaacacttgcgatttttactagagttaactttgtaatgtatgtctctgactctagaatttcaagagaagttccacttagtgactcctaagtggaagttctaagatggcttcccagtgaggtgatgaagaggtttgagctttagagtgcggttgcaaagctcttctctgacctgaacaatggctgtagctgtggaccaacaaatccagactccttcagtacaagatctccaaatagttaaactggaagaagattcccactgggagcaggaaatttcccttcaagggaattaccctggaccagagacatcctgccagagcttttggcatttccgttaccaagaagcatcacgaccccgagaggccctcctccagctccagaagctctgttgtcagtggctaaggccagagaagtgtacaaaagagcagatcctggagttgctggtcctagaacagttcccgactgtccttctccaggagatccagatctgggtcagacagcagcatccggagagtggagaggaggcagtggccctggtggaagacttgcagaaagaacctggaagacagaggctggaggtgagctataaaaacatagttccgaacagttaaaatagaggtatgtgagagacagagctgccttgggttactagcagtgtgggcatacttcactattgatgttaaactggaatttgcttatttcgtggtcatggtatctgcaactttccttccaagttcaggctgactcttcagagaatgcacaacattggctgctctgagtgtccgtccctgccattaa

SEQ ID NO: 62358 - DNA, 1210 bp, Homo sapiens
gagggacaggatgtgctctcaaagaaggagccctcaggatcagtactgagttctctaaacatccatccgaagcaagcacagacagaatctgtctgttccaggcaatggtgaagttcacagcagaaccagaggaacagttgaagcacagccccaaaatagaacgaactctagcccgtccgcaagagtgataagaaatcgcagtgtgggcccacgcgcgccgcacggccgggtcgccgccgtaccgtggtgtacgtgcagaatgcgcagagcgagcggcacccgcttaccctgcgctcctccgcagcctgggccgggccgcccgggacgctgaggcggtggcggcagccgagggggccggtcttgcgctccgcaggctcgcgcgcccgagcccgggttgccgttcgccgcacaggccgcgttctctcagcccacggcggcgattaggcgctgaggcggccgcctgcgctgcgccggagcctaggactcggaagcgacccggccgagggccctgggtgccagcctccttgagtcaagggtagcgggtgcatggcgcagtgacggcccctatctctctctccgctccccagcctcgggcgaggccgtccggccgcacccctcctgctcagctgcggtcgccatggccaatgacagctgcgggcccggcgagccgagctcgagcgagcgagaccggcagtactgcgagctgtgcgggaagatggagaacctgctgcgctgcagccgcagctccttctgctgcaaggagcgccagcgccaggactggaagaagcacaagctcgtgtgccagggcagcgagggcgccctcggccacggagggggccctcaccaggactccggccccgcgccgcccgctgcagcgccgccgtccagggaccgggccctggaggccaggaaggcagcgaggcgccgggacagcgcctccggggacgcagccaaggcaaaggccaagtccgcggccgaccccgcggcggccgcgtccccgcctcgcgcgtccccgggccggacaaaagccatggctgcttgttatccggtcaatggaacgggttatgtacgtcatgttgataatccaaatggagacggaagacgtgtgaaatgtattacattacgttaaagaacgggatgccaaggtaagtggaggtatacttcgaatttttctagaaggtaaagcctagtttgctgacattgaacccaa

SEQ ID NO: 62359 - DNA, 584 bp, Homo sapiens
tgaagccaagcgttcgagaccagcctggccaacacagtgaaacctcatctctacaaaaaaatttaacaattagccaagcatggtggcacatgcctgtagtcccagctacttgggaggctgaggcgggaggatcacttgagcctgggaggtttagactgtagtgagccagggatcgcgccactgcactccagcctgggtgacagagcaagcccttgtctcaaaacaaaaaggaattcaggagcaaacactcaaattcctgcccccacatggcccttcaaggtcatctgcctgcatgcctcactcctcccttgtcctctgatgactaataccatcccctggactcctgatctatcctcaccttctattcctggaagcaggagcgtgttccctgtgatattccctcattttcaccctctccctcttcaagggttactttcccatagcttctaactctgctcaagcctctgtgtttaggaaaccttccctcagatctgtgtttccgactagttgctgctttagcttcttccctccctacatttcgtgactctgcttcctcttcatttttagtctttgggcctgaccac

SEQ ID NO: 62360 - DNA, 1887 bp, Homo sapiens
ctgggattacaggcgtgaaccactgctcccggtcagagatcttaataagaggaatattagtgctgatggggcatcaaattgctacaagtgactctcaggtgcccagaagagtgggttgggtccctctaggcttagctcctgaaacccagctcaggagtgagattccctctccttcagggctagaaaggtataccacctttgtcatcaatccattcaaggactcgagtggctcctgacaggtcgaatgcatagaaatcctggtacctgcacaaaagggacacagaatcacacgatgcacagcacttcacagctcaaagaactccaagatggcagccgcatggttcagtggcccaaactctggagtcaggcagacgtgggactgagtttacttcccattttactccctgtttctgggaccaggccagtcccttgatgtccctgagcctcggtcctcatgtgtggacgtcccagggtacccagatttcccaaggttgacgtgaggaatcaatgagatcatctgtgttctgagctgaactcagaggctggcgcaaactaactgggcactgcgtcttcacaagcgcggctcttactagtaatctcacaacgcgcgcacgcaggaaggagccatttcctagagatgggggcctaggcccaggcggagtcctccacggtggcgagccccgaggccacagctggcccactctgcaccaggatccccaacgtgcctccacccacacccatccgcccgccaggcaagctccaggcccagctcccatgtcccagccccgtacgatttacaagcgcaaggattccaccagccagtcgtccccaggatccatggcaacgaccgcttccggcgtctcacttccgcctgcgagccttcgggggccgcgcggctctcgcgagatgtgggcagggcctcccgttaggggcggggttaacaggctgagctgcggcccggcatgggtgggttacgggttttctccgcgaaagctccgggaaaagtgacctgaaatcgggactttcccgctgtcagctccaagcaggacctgaggaccaaatgatcgcccgttttagggccaggtgtttgcagcccaagagaggggcaatgaatgctccaaggccagaaataatacaggaccgcccggttaaattcgaatttcagaaaaacggtgaataatttctttcttacgagtatgttcatgcaatatttggtacattttattagataaaattattgtttatctgaaattcgaatttaactgggtgtccagtatttttatttgctaacgctggcaacccttctgacggccagagaagagaggaagcggccggcagggtctggatcccaactcggcgctcccctccaagtccggcgggggtattgagtaaagcccggcagtgtagtgtctgcagcccccttttactagcgaggaaactagtgacacttgcctgcgccagtaggtggcagagatgagagtagaaccccgcgcctggcacgaagcctggcatgcaacaggcgttatttgcttgctgaatgaatgggtaggaggccagagtcagtgccaggctggtgccatggcatggggtattctggactttttgagccagccccatctcactgaacactctgccctccagcccccttttcctcccatcccctaaaagacgggtgaaaggagaggaccaggcattgtatgtaaagagcaaggttttattcaccaattcaacagggaagcaggaaatacagcaggaacataatctgtgtctgcatcagcgatatttctggtgacccagccagaaatcacagtaatggagtaacagagatttgagctcaggatttacatccagatggggccatcaacagggtcccattcagcaccttcc

SEQ ID NO: 62361 - DNA, 1393 bp, Homo sapiens
ggagaaactctgctagttgtgtgggctgcttggacaagggacgaaaaagggcagggtaggaagtggagagtgaagaggcgcctggaaagtggaggtgcagcaaaaacacaccagcggttagaagattcggttaagtctcgcctaaggtaaggggcaccggctggcagtgggatttaggatctagcccagccctgtcttaaactggctgcgcgaccttagccaagtcactgacctgtccgggtctcaagtacatatctattaaattagatgagccccagggttttccacctgctccgacactagtgtccgtggctgaggagcggccagagggttgagaaggaaatggggtctgaactggatgaggggcgcttgcttgctccgtccccaaagacttaccggtggcccagaggttgcctcgcgagtgcactcggatcttgctggctcggctgcggggctccgggagatcccagctgagcggggcgacgccggcagcgagcagggcgaagagcaggaggctgccgaacatccgagcgccccccgcccgccgggccatggctgtgcccgggccgcggcttcgttcgggcgcgcttcccggccgctgggctccggggctgccttcgatccttttaaatccgcgcccctgggggcggagcctgccctgagcagcggagccgtgccccgcgcccgccgccctccccgccgtccccaccctcccgctaggttaccaggcaggggcaccccctttgggccgcccagagacctgcacacccacactctggcccgcacgcgggcaccgcttccgccaggggcttctggcggaagcccgccaccttcaggctaaggaccgggcaccggccaaacaggggcccggccccggcggcggagccgcttcccctggccctgccttgccactctgccacggctttcggccaaataggcacttcagccctctgagcctctcttcatgagggtagaggtcgggcgaggagctctcctcccgggtaacaggcttttttttttttttttttttttttttctgagacaggatctggcagtatcgcgcaggttggagtgcggtggcgcgatcacggctcactgcaaactcaacctccagggctgggctcaagcctcagcctccccagaagctgggaccacaggcacacgccttcatgcctggctttttttttttttctttccaagagactggatgtcgctaggtttcccaggctaacagaggcatttttacagtgtccagccaagtgctaggcaccaaaggacttccataaactaatccccatcacctccgccctttgggggaatctgacccgtgttcaccttgctctctgccctctcacagccagcatcacagtctggaaatgttctggcacacagt

SEQ ID NO: 62362 - DNA, 798 bp, Homo sapiens
ctcaaactaagcaaaaccacctgttaaattatcttacagcacctgatacatttcctttgaggtctttataataattatcatacttttacttaaataattagttgtacaacagattcgatacatgtgtgtctcccctaccaaactagaagctctataaaggcaacaatgatgcctatcttgttccccctgtatcctcaaggtcaacatagtgccttacacataggagatatccagtacatcctgcctgattgaatgtctgaatgtccgggccttttctttttgctttctcttggggaaatcctattttctcccagggcttaaattcctctccatgcaaaagactactttgacatcataagcattcacggcagaaagagaaaattagcagggtaccatcgatgtgggcggaataggtggttagcaaatgtaaaactttcttctttatcctcctcttctatcgctggactccagagcggactggcaatattgtactaagctagagcctgtcatagggacgctgagctgaagtggaggctgacctttgcacactttaaaacagcccagaccatgccaaagacagcacaaacagaaattacctcccacataatatctacaccatcaaagcctcaggcaaacttgaagaacacacattttgtttttgacacatttcacttccctttaagaactcgcctctgcctctgcctctgcccctgaccatgcccctgcccctgcctctgcctctccccacggtctccctctccctctctttccacggtctccctctgatgccgagtcgaa

SEQ ID NO: 62363 - DNA, 814 bp, Homo sapiens
gggtctgttatctacacaggcctgcaagttgaaggtatctcaagagtctgaaataaatcaccaaaaaccccagattacaagtaccatatttaaaatcatcagaattctgtacaaaattattttaaaaatttaaggattttccaattaatatattctctgtctatgaatctgcccagaagcagttttaaacttaagtctatgactcattcaatttctttttcttttcttttttctttttttgagatacagtctcactctgttgcccaggatagaataaagtggcatgatctcggctcactgcagcctcaacctcctgggctcaagtgatcctcctacctcagcctcttgagcagctgggactacaagtgcacaccaccgtgcctgactcattttttttttttttttttatttgtagagacagggtttcaccatctggtctagacgcccaggctggtctagagctcctgcgctcaagcactccacccgcctcagcctcccaaagggctgggattacaggcatgagtcaccacacccagccaaactcactcaatttcaaaggatcacaaattaaaatggagaaattttcctccagcttaaacaaggcctgagcttaatttgattctctctgatatatttaggggaaagttggttcagctttgttcacaacaggcattgctgagaatgaacaacacaaatccactttcagaatctggaaaacactatccatgctgaataaacctctgtaattccaaaataaatttctttttttttttttttttttttttgagatggagtctcactctgtcattcaggc

SEQ ID NO: 62364 - DNA, 2302 bp, Homo sapiens
aaaaaaaaagtccgatgcagcaaaactaggctctacagacacactaggcgcaaaagataaaacagaacaaccttttctaaggactaaataattacaacaatattctcagtactatttggcatacgatctagaagatcaaagtaaagtgtaaggacaaaatcaggagacctacatttccagatccccgtggcactgatattggactgtaaaaccatagattccgagggctgccgccttagtgctaagcggacgcaagggcaagtagtgtaactgttccaactcggagcccagagtggtccaagtcaaagtcggtgcagcccgctacggttcagctctactaaagggttgcaaggagctgaaagcagcaaaacggtttttgtggggcctccaatcgccttcctgagcgccccagaaaccggctaaacctcgtctctcccgaaaccacctggagtcgctccgactggagaaatcaagagtccgccgccttaaaatgactaaaacaataagcaaccccaactcccacttcaagcgcgtacggtttccatttgctcccctgcctcagtgggaggaatggaacgtgaagacaccgcttcccgccccgcccccggtaggccctgaatcagttcggggttaaaaataatgaggcggacaaggcggcctctggccacagtctccaaagaaagcgaatgacccgggtatcagaccagctcagaccctcacaccagaaccctggggtccgccgggccccgcagcagcagcctcgaagggacaagaagagccaggagaaaaagaggacggacaagctcacctgccgcttgttcatccgccgcacatcgtccaaaaagtctagagacagcatggcggggacggcgagcaggacaccggcaggggaaagggcgcgatgaccagcgggcggaactactggagctcgggtcgggctcacactggacaggaccccgcagtgcttgcacttccgcttccggggcgggagctggcacggtcgggcacggtccccgccccccgcgccccttcgctgcggagagctgacagagagactcacgaccttgctagtccagtctcagggcttggcctcgccgtgggagggttctcacgctctggctctcgcctgccaaaaaccgactggacgccacttcccgcgctcggccccgcggcccttcaccgaggcggcgacccaggcttagttggggaggctgctctgccaccttcggaaggcgggcctctgtgcccgcccggccaatcgcgagcaacctctccggtgtgggcgggtagaagcggttccgcgtcccggcttgggtatgggtgtggcagtggatgtgtcgtctgaccgtaggttctctggtcgagcaagtctcctgcgctatgggaagctgaggaggtgctttctttctttctgtctctgtctctctttctttacgtctctgtctctgttgaggtgcttgcttgcttgcttgcttactttctgtctgtctgtctctttctctttttctttctctttctctctttcctttctttctcactgtgtcgcccaggctggagtgcagtggcgcaatctcagctcactgcaacctccgcctcgcgggttcaggcgattctcctgcctcaggctcccaagtagctgggactacaggcgcgcgccaccaaacctggctaatttttgtatttttagtagagacagggtttcactatgttggccaggctggtctcgaactcttgagctcaggtgatccgcccgccttggcgtcccaaagtgctgggattacagtcgtgagccaccgcgcccggccatcgaggtgctttcaataagtgcttttcgcgtaaggttggaccgtgtgagagaccttccgagcactgcctgagcctgccaggagtttacagtccaattggagagaaaacagcccgggagaattagaaaacatccaaatggtgcaacagcgtgatgagaccaccagtggtgtgggtcgttaggaagtggcttcctttctgaccttgactttgctgacaggatttgacatggtctccttgaattctacctcctggttttcttaacttggacaccttgaagtgactatcttttcgctaccttttgctttgactggccaaagctcctaatacgcacttcagtcaacaaagactaaagctggattacttggtatcatttctctctcttttttttttttttttttttttttcaaaataatccttctctcccattagggaaagatgaatgaaggatatactggaactctttgtagtatcctcgaaattctttaaatggaaagtc

SEQ ID NO: 62365 - DNA, 2826 bp, Homo sapiens
atcaacttttccctttactcttttgcagagagggagggtctcgctatgttgcccaggctgaactcaaacttctcggcttaagggatgcttttgcctcagcttccacagtaggacccaactttctcctttactcttggtacttcttgagctccaggcctacttttctctctctcactgccaaacatttgaaatcatcaccctttattaactccattgcttcattggctaacatactctttagacaagctcttcaactcagttctgtgcctggtgcacagcaggctccggctgcatgttagttccagccatcttgcacatttgcatctccttcctggagaaggaatttctccatggttagcagtgtgtgctcactcctagtcaccagggcctcatctccgtgttcccacaccctgaccttgctgccgccctaatgctgcggacccagtttccaggtacgccgggttcttggaaggtcctgccggtcaccctcccagccttctgccagactcactgagttctcaccctgcacagtcatcgtttccccagtaaccctgagagatctcccagtctacctcttcgaggcacccgttgccagtcctccatctctgtttgccgcgcgtccctcggttaccccagaggcaacacgtcaggctgccccgcacctccaagcctgcgcgaatgtccttgtagccagctatgaccaaacatttagggcgcacctgagcgccaggcccacgccacccctgcttgctttcacttaacagcctcgactaggccccctatgcgccaggtctcagtgaagaggacgcagtcccgggtcctgggcgctctttgccgggcgagacagctgcgtaggcagatcctgttcctctagtgggcggcctcggcccctgcccctgccccgaggcgcgtcagaggacaagaggcccaggtcgctggcagcggctgcctgcccgaccgcacagggtgcctagcacgggtggcggggactggagccgggcgggggccggccggggtcgggggtccagccctgagcggcgccgtccccgccccgccccgtcccgtcgcgtcccgccccgccctacccgccgccgccgtcgtcgccgtcgccgggcctgcgccgcgcagcccgcctcgggcgggaggcgggaggcgggaggccgggcccaggccggggcagcccctccaccgcaccgtcctgggccggtgcccaggtccgagtcgccttccgcctgcccccccccccccccaatcccccgccgcggcagccccagccaggtcccgccgccaggccggctcccgcccccgctccgcccccggagccgcagccccgcccgccatcgccgtcgccatgttgtggctcccgcagccggcgctggggacgcgcgcggccgagactctggcctgcagtcgccgccgccgccgccaggtaagcgccccccgcgggccgggccgagcggggcctgcgggccggggcagccccagcctgggcccgggaggatcgcagccgggaccgagtccgagcccgagccggggcccggccctgcagcctggcggaccctggccgccgccagaggcggcagccacttcccccgaccgccgcctggcgggcccgggccgccaccccaccccgcccccggccgtcgggcgccggccccttccgccgctgcgaccgccgctgcgaccgccgctccttggcaggccgggcacgctgctgtcctccgcgctgggcgggacgtgcggccgccctcggcgatagccggcggcccccagcccgggcacggataacggtgccactttctccctctgggacggcctgtcagcccgaccgtccccgccgcccgaagagctgtcgccgtcacagggcagacacttcggggaacgaccctctttggcgctcctcagtactcccctcccctgagcccaagttctgaccctgaggaaggtttctcccggagcagacaggtattcctagagctccagagttggggtcctcaggggtgaccaggcctgttgatcagggtgaaaattgtctctctgcaagggctcttcctgccaacgagggggttggcgggaggctcagtgtgacctgagggaggacaggagagcgtctgctggacagatggcctcctggccttggatcagcgtttgtgagggggaggggtccgtatgaccttaggtatgcctgctcctgagtactgcaggattattgaagctgtttagggattttaaaccattttttgagtaggccaaaggtggcattaaaggtcctggattggaataagtccacaggcccacccagggaagcatgtttggcatccaggactagtctagaataggactggcagtagaagaatgggacttggggagtaagacggtatttggcttatggtttgcccacttgagttcaggcctgtgctcatggagggcctgtagggtgcttctgtcgcgggtgcagtgtggtgcacagtgtggcagagtgcggaggatgtggacagacagattcctggcctggtggatgcttggtggtattttagtagtctgtttcctcaacctcactgttacgttacacagtgaaaggggcagaagtgtggtgctagtgcgtccattttgatcattttccaatttttcaactagttgtggctttgattcattaaataaatttttactgagcacttactctgtgccaggcactgagctaggtgttgggagtacattggtaagccagaaagataccatgttttagttcttagccattgggaaagtctaataattaatagtcgtggccgggcgcggtggctcgcgcctgtaatcccagcactttgg

SEQ ID NO: 62366 - DNA, 696 bp, Homo sapiens
ggcacagacccgtattcagtcccagctacttgggaggctgaggtgggagaatcacccaaggctgggaagtctaggatgtagtgagccgtgattatgcctctgcactccagtctaggtgacagagtgggactttgtctctaactaactaaataagtaaaattttctggaacctttttgcaacagcattctactcttttttgccaattcagttacagtagatacctaccttaaagcctcttcttatggtctccctatgccctttgccttgctaaaggaacaacctcaagattttaaatataagtaaacattctaattaagaacagtattccacagttgcttataaaagcaactgtggacccaatccagagttggtgctctgtagagcataaaagaatcatgtgagatgaacttcgccctccaggatttcccccactgaaagcaattagagaacaatttgctttcagaccagaagtgtcttaagggggcttttctttctgagggtggtggttattggcacacaggtcaccctctgagatggctgggattacctctagggaacattctctagtacccaaaatgtactgaatggccatttgggaggagagaggtggtggccatgaagtattctgatctttcattacttgtctccccttgacgctgcttcctaagtgctgtgccctttaggagaagctggcc

SEQ ID NO: 62367 - DNA, 1316 bp, Homo sapiens
gtaactgtgagtaggagacttcagctgctctgatgggaagggcaagcaagggccccctgaccttgccaggaataacaggaatcttccacagtaataaaaactcttcagtttatgtcccttttcttatttgattacctcacctctctgggcctcagtttccttgcttgtagagtaagtggtttaaatttaatggttttctagaatctctttggctccgatagtcctgaatctttctagtgttggaagaagctctaatctagaacagtgttctagagcaatgttgtctaatcttggtcttataacactctaagttgtgtcatcattatggcaagggctgtggtgaatgtctcaataccaaattgaaggaaaatttgtgccctattcagtagcaccttgggaagatgagtgtgttgggaaacttgaaatgtgaaaactgacctgctggtttggagtccaaagtacaggggcagcttggtccttgggggcaggcaggagcctgagtgccagtcttagttcactcactggtgagttccttgtgcagtgtgaagagtgtgttataaactgtaagattcctacacatccaagcatgcgtgtgtgattagggtgacctgggagaagcagccagcctggaagtgaagcctgacactcaggtttgttagccattctgcatccaaactgcatgattgcgcatgtgagagagactgtctggataacccaacagaaactggtggccagaggaaccaaggttaatctggagtaaataacctagtatactcattggagcacctcccaatttatttactattggacagcagacctaagacaccccttggcccctgatctctaacttttgtcctcatttggacagcacagtgtctgcttgttagtttatgttttgaaatgtgaaagcccaaataagaaaaggaaaaacttcaggaaagttttctctagtttctttctgtagaattgagataattagtttctttcccttcccttctacatttttacattaatattgtctgtattactatttagaatccaaactaaatgttggtctgtcaaaactggacaaaaatgaagtcaagcgagggaatgcaggattagagtgagaatgggcagaacgagaaattcagggaatgagtccttttattaggtaacttgtgggtatatgtagttgatgggccgttaaccagtgtttctcaacgctagtcaattaaatctgaatcttagaggggtagtggccaagtattagtagcttccaaagttctcaaggtgattctcatgtttggctacagttagggatcacctagttttta

SEQ ID NO: 62368 - DNA, 1613 bp, Homo sapiens
gcccaggactgcacagcccatcagtcacgaagcatcctgaggtttaagaggaggggtggtgatgtgagcatgcacccctggggccgagaggcttctgcaccatctgcctgtgccttggggtggccccaggccctttcactgtgactactagcctagcacttgggtctctgggcggtgacatcaggtagtgttcagtgagattgtggctgagtgccaggtgtcaagagtgcaagtattctgacgtgctattgtctgctaccttggctggcctgctggctggatctctctggggttcccagcactagccagcccaggagtctgctccagactccctccttcctggccttggtgtgaatagcactgagggagcctgcggcccgggcacttacctgacctctccgctgtgcttctgcaggtactgcacagaggacagccccagctttcctcggccctcccttctggagagccacatcagccttatgcatggcatcagaaaccctgatttgagccagacgtccaaagtgaaacctccgggtggacattcccctcaggtgagtgtgggctccctgcctattggagctggctgctcagtgaggcttggagctggaagggcattaggaaggctactgttgtggccatggaacaaccagagtgacagcttccctcaatgtgggtcactctctagtcctgtgtgacccgcctggcactggacacaagtaggggataaggacaaagacccataaggtggcctgtcagccttttgttactgttgcttccctgtcaccacggccccctctgtaggggtgtgctgtgctctgtggacattggtgcattttcacacataccattctctttctgcttcacagcagtcctgaggcgggagcacacaggactaccttgtcagatgaggataatgatgtttggccaactcaccccccaaccttctcactagttataggaagagccaggcctagaaccttctatcctggccccttgccctatgacctcatccctgttccatgccctattctgatttctggtgaactttggagcagcctggtttttcctcctcactccagcctctctccataccatggtaggggggtgctgttccacagaagggtcaggtgtgtctgggaagtcctaagagctgcctggagtttcaaggcattcttaaaaacgttcttgcctaatcagatggtgtcagtagttggcaaagcacctttcatgcgtagtagctgggggtatcgattgatgtttttggcaacacctgtccaattgtaaaatgtacatcctcccttcccccaaaatgcacataccctttgatccagcaattctgcttctaggatttgtctattagagagatcttttgccttgggcataaagaagtctgctaaaggatgtttgctgcagcactgtgtgcagtaacaaagacggaactcagctaaatgtctgccgttggggacttctcatccccacattgggttagtgtgctgcctttagaagaatgaagcctctgtatgttctcccatggaaacatgctccaatgtatgttgttaagtaaaacaaaaacaaaaacaagaaaaacacagggtgaagaaaagcatgcatat

SEQ ID NO: 62369 - DNA, 3371 bp, Homo sapiens
cactgcactccagcctgggcgacagagccagactctgtctcaaaaaaaaaaaaagtctgtggggacttccaatatttagaccaggtttcggcagtgcttggcactagttcttggaaattgttgcatgatttgattatttttctgggtatcaggactcagcccatttccccctctggtgctgagaaatggaggccgaaggagtgatctagaagtgttaattgagcccctaatctatgctagttactgggggtgttgggggagacaggagagagatcccacggggttccggcctcccagggactcaggtcactaatggaggtggcttggcttgtctatgtgctgggccaacagccactggcgaggcaaggcgagggtcagtcacggctggtgccaggaagagggctggttctttggctccctggtctcccgcggtctagcccaagctggccagcggttgacctggctcccctggccccggccaggcctcgtggacccctcatatgccacacgggacatgagcaggccggccgggagccgggtcccgggagctccacgaaggggcctgtcctccatgaccaggacacccgctgcgccttcctcccgaggcctcccgggcctctccagacgcggcgctactgcagacaccagggccgccaagggagcggactcggagccggccctggggcgggcacatgggccccggcgccccccggcgtctccaagccgcgctgcccgggtcgggccaggccaggggagggacagcagcaggtgacgacggcccggccaccggctataaataggggcgcgcgtcagccgcgggcgggagcggcggcggcgggcaggggcccgggggccggggcctggaggacaggcgaggcagcggcgagtgcggggccggcggtcggggagggcggtgccatggggtcgcggagggcccccagccggggctggggcgcgggtgggcggtcgggggcggggggcgacggtgaggacgacggccccgtgtggatccccagcccagccagccggagctacctgctcagcgtgcggcccgagaccaggtaagtggcaccaaggggcagggcggcgtcgggccggcgatgccctgggatcagtccctgtgagggcggcctggcccctggaggcctgggctgggcctgcgccctcgagccctctcagccccaaggcccagggcctggggacatggccgggctggaatggctttcatagccccttgtgacccctcctgatccatgcgcctcaggcctctggcaattcgaggctcaagagaggacaaaggctccactttggagtgatttcatggggtctgaaggctttccttatctcccctgccccctaccctgctactccctggcttgggattccacagctagcgataaggaaagccagagtggctgaaattcctccctggcaggaagggagggggagagcactggtggggacagggagagggtgctggggggctgcccagagtaggagctgcttagctcagggtggggaggttctccaggaagaaataaacctttgtaaataaggttcctctactgggccgaggacttgggtcctccccaggacctgagtgggggctggtgagatagggggtgggatgaggtactgtctggagatgttgggaattaaggacttgcagctctgagggagccaagtgccctgtccagtttggggaagtgaaatgccaagggaggtgtggaactgatgagcccttcactggtcttccaagagttcaagaggtgtggaagctttgttttagcagctaggccacccacagatataaagacacaaagacaatagacaggcatccaggaaatcaaaggcacacaggcacacgtggacaggcgcattgccatggagacagacacttcctgccccctgtgggcagctcagtttcccttcacttctggagtctgttttccaaagggaaatgtgttgagatagtggttgtttcatagcctgagaacttgacttgtgtattatgcagaaaacggccattcctccaagaggctgtccagagacctcttgttctccattcctaaaacagcataaaaacaggcatcgaggacattcaggaaaagtcctgggcacttcctcgtgaattggctgagtcctactgaccttggagttgggaaagttcaaatgtaaccggaaccggtttctgcataaaactcgtcaaatggtgtcacatgtctggggcagggctgaggactgatgttagtgactgagtcagactcaacaaggcccctggctgccaggaaagaatacccctttttcttactcctggctctacagataaaccagaatgaaatttggacatttattccagtccttagagaagctgactcccttgtgggagcctcacatttgtcacagtgacttgtctgggctttgcctcctgtgtttggcctttgtcaataccagtggaacaaacagaagaggcggaaccagggtccttcttggagacagcagcaatgaaggaagggaggaaagagtgccttgaaaaccaggcagaatggggagggcaggggatctgggcttttaggaaaagggctggagaatggacatagtgctgctgcctggctgagcagttgtatgatagataaatgttaattgtacacctcatgagcacaaagcttgtgccagcctgagagctagaggcaggatagaagtggctggcttaagtccctttggacctaaatgggaatgttcttaaaaggagtctctttcatcaagtatctggagggggcaggacagcaggagtgggagaaagctttggactttgggctgtgttttgcccctgcagagttttttactgctcctgctggctagccacagacccctagaggttctgagagacaaggacagccagatttatcaggcatctggaaaagcctttggccaaagtggggagaatgtgactggggctgcagtggggagtggaggaggcgaggcagttcctgcttctctagtaaggcctgacctgtgttggagggagccaccgtactgtctgctgtccctcagaacagcctcactgcctgtgggggtggggagagctccctagagatagggagaaagacagtccctcgagaattttgccagctatgttggctccagcccagctgagccctgactatgccagagtcctgactgagaggcaagttctgtccccactcactcttggctccaacatcttctgggtctaccttcacaaagatgtgtcatggagctctccaggcatcattctcatggacccttgtgaggaggggctacccctgggaactgatggacagctgagctgatggacaccagaggccttggtggatggcccagaacctatc

SEQ ID NO: 62370 - DNA, 726 bp, Homo sapiens
actgccttttaaaatttttttctgcagtcatttaagttctccttttacctcctctttctctgaattttcctttcctttggttcctccccatccctgaagactgtgaactctgtgagatcagagaataccacgttaatgtattcctgcatagcttattctctgaatctgctgcagagtcagggcaaggtctgggcaggctcatggtccaggtttgctgggtgaatgactgtcttcttgcctcctgaactgaggacagctctttacccttggctgaactgactgttacaatcaaaatgggaacatttcctggctacttcccaccacttgggcctcatcccagactctgatagttttggggagagctagctacagtttcttcacacagaaaaagatttcagaatagctaactggtttctaaatagctaatgtttacagacatgattagcaactactatgtccatggtccttgatggggatgaacactgaggagactttgttctgtgtggctcatgggtggaactgaggatatcacaactaattccaagtggagtgtggtaagcgttgacaggagacgacctgggcaaaccaaaccttacctaagggcgaggttaggttccactgaacatcatgaaaaccaatgattctggtgttctttagagacatatgattagtctgtgatatccttgtgaagtcatggagttggaaggacttgtcagggttggacaa

SEQ ID NO: 62371 - DNA, 1189 bp, Homo sapiens
tgtgaactgggaatggttgggacaaggctgcaagtttccaagctgggttcttgagtcaggtctgctggctgtgaaacagaggccacagggtgtgaaggggctgagggaaggccacaggctcaagtgccgccatgggctgtcctggccagggccagaagtgtgtgcacacctgcctgtggacatgcacaaatgcacagctgggagtgaaggacccggagccctcctgcttttatgcattttaggatatagttcacattattcagggctcaaggcaatgtgttctcccaaataaatttgcttccaaagctcattgtggctatgaagccctaagctgtcgggttggcccccactgtgtagaggcagcaccagagggtggcatggaggctgaggccccagccctggggctgtggggtccattcagctcctccctccttgccccacccctgccctcttgcccaagcatttgactggactcagatgccctggagactgaggctgtgctgggcaggtcatggggcagggaggctctgagctgggtccttgtagggatgagatcatctcacaggatggtgaggacacctgtgctggctctggtcacacacacagtgatgtaaccagggggtttagctcacagtggaaacatggggctcgctttacagccagggctgcccagagtttgttcctggccgacgctgctgcagcctcgcctcccctgctccctgctcctgtacacagttccccagcatgccctttgcttgtcaccctccccctctcatgttggggttcccttgtcaggcatgcccttcccatccaccttgtgtgttcaccctacttactcatttacttatcgtcccacagatttcttttaagtaattaccacaccacagtgtcaggcactgtcttaggtggtggggatatagcagtgaacaagatacagtttctacccacatgggacctaagtctagcaggagagataggcaaggaaatagtcaatgacagtattgtgattagtgctgtgaaggggaagtgcaggtgacgttagagctgaggggaagcgggagatcagagggactgaacccatctttcctgaaatcctgcccaccctccaagttgagttcaggtgccactcactacaaaagctttcctgagtccctagccagaggtgattgctcccttctctgcagcccta

SEQ ID NO: 62372 - DNA, 4162 bp, Homo sapiens
taaactcctgacctcaggtgatctgcctgcctcagcctcccaaagtgctgggattacaggcgtgagccaccgtgcccggcctcttcccattattttggaactggccttgctgtaacccagtctcctgcttctttctcaggatacccagagccagaggtgacctggtacaaggatgatacggagctggaccgctactgtggcttgccaaaatatgagatcactcatcagggcaaccgccacacactgcagctgtacaggtgagggagaagggcctgttttgctctctctgccctcccgagggccctctggctggggtcctgccctcagaaatggagcagtctggatggagatgcccaggcactctctggggatggagggcaggattctgctgtgtggttgaaccacctggtgaaccacatctgccttccggtgtctgggagctcctaaggccagagtgggagtattcctgacagtcaaagagctggtgcagccagcagaggtcctgacctacagaaatattttccatgaggtcagcggccaaaaaaagcaactgtatcatcatgacttcacgaggggctgtgttggtcacctgcttctgaagggagctctcctgggccccaagtctaatccctcctgggacagtatggccttggtcagccgccacctttttgccagcctcagttccctcagctgtaatggagggtgttgtatgttgtgacgtgtgagatggggcgtagcacacggcagggcttgctgtagggagggggaagtgtgcccggctctgaacggctctggctggggggtgtgggggctctcacctcccaggaggggagaggtggcacctcccgctcctacctctaggtgtcgagaagaagatgccgccatctaccaggcctctgcccagaacagcaagggcattgtgtcctgctcaggggtcctggaggtgggcaccatgactgagtacaagatccaccagcgctggttcgccaagttgaagcgcaaggctgcggcaaagctgcgcgagatcgagcagagctggaagcacgagaaggcggtgcctggggaggtcgacactctgcgcaagctcagccccgaccgcttccagcgaaagcggcgattgagcggggctcaagcgccgggcccctcggtccctaccagggagcctgagggtgggaccctggcggcttggcaggagggagagactgagactgctcagcactcaggtttgggcctgatcaacagttttgcttctggagaagtgaccaccaacggggaggctgcccccgagaatggagaggacggagagcatggcttgctgacatacatctgtgacgccatggagctggggcctcagagagccctcaaagaggagagtggggccaagaagaaaaagaaagatgaggaatccaagcaaggcctgcggaagccagagttagagaaggcagcccaaagccgccgttcttcagaaaactgcatccccagctcagacgagcctgactcctgtgggactcaggggcccgtgggcgtggagcaggttcagacccagcccagaggcagggctgcacgggggcctgggtcctctggcacagatagtaccaggaagccagcctctgctgtgggcactccagacaaggcccagaaggcccctggcccaggcccaggccaggaagtgtatttctccttgaaggacatgtacctggagaacacccaggcagtcaggcctcttggggaagagggaccccagaccctgagtgtccgggcgcctggggagagtcccaaggggaaggcacccctcagggctagaagcgagggggtgcctggcgctcctggccagcccacacactccttgaccccccagccgactaggcctttcaacagaaagagatttgcccctccaaagcccaaaggagaggccaccactgacagcaagcccatttcttctctgagtcaagctccagaatgcggggcccagagcttaggaaaggccccacctcaggcctctgtgcaggtgccgacgccccctgcccggcggagacatggcacccgggacagcacgttgcaggggcaagcaggccacaggactccaggagaggtaagtgtgggtgttgggtgcctggaggccgctctgggaagctgacctcatggaaactcttgctgcaactgctgggcagccagtgagcagtgggctatttatagaaaggggtggggagggactggagtgccagctacagggaccacaggcatgccctttgccccagccagtttccagatgccaggcatgtgggcagcacagcctgactgtgaccctcttctgggagtgtaggagttcacagccaaggggactgtgccccggagggagatggaagaagataatgttctctggggtgggaaagggggccagtggagagctttctgtgggctttgctgaggcaacagtgtttcatgggggagacggaggagcaggtgtgcgctgtagtgtacagcaggtggcaacttggctactcattcgatttttaacaaagctgaatgtccaggaaatgctggttaaatctgggtttatctaaggttctggagtcaggcatacctatatgcaaatctgactgccttaacatggcgtgatctagagcaagttgtaaaactggaagaataatcataacaatacctacttcgtagggctgttgtaagaatctggtgccctctaagaactaagtaagtggcagttgggatcagatatgactatggtgggaaacagaggcaaagtgtttttacttggtaacaggagtgccatcatcttctagggaacaggtagctgacagagaaaagattatgttttgtgtggagacaggggtagtggagtgtccactccccaaagaggcagatgggtggcagcgttaaggagcttgaggggtgggattgagagggcaggaaggaaacaattcgtcccttttggttatttctttatgtttcaggggcttggggggcattatttcacagtggttttgggagacagagtgttttatagtgggacagaaagaagacagtgtttcttatgagtggcagaaggaaaagtatttcaagagtggggctggggtggataaaatagatagaacatatttacactgagacaaatactggttatttatttgaagtcccaatttaactgggtgtcggtatttctttctttctttggtttgtttatttgtttgtttgttttttgagatggagttgcccaggctggagtgcagtacagtggtgcgatctcagctcactgcagcctccggctcccgggttcaagcagttcttgtgtctcagcctccaaagtagttggaattacaggtgtgaggcaccatgctcagctaatttttgtatttttagtagagacagggttttgctgtgttgaccaggctgatcttgaactcttgacctcaagtgatctgtccacctcagcctcccaaaatgttgggattacaggcgtgagccgccgtgcccagcccagtatttctttttgctaaatctgataaccttaagtggagacatcctctggttttggtgagaactaagatgagactgtttcttaggatagaggaagcagttatagatcgggaatggcttcatgggggaacaggaggaaagcagtgtttcccaggggtagggacagaggacaggtggtttctcggagcagtgaagggaagcacatgagggacaagctgatacagcacctggcagagggcaaaggggaaaggatgctttgtggagaacaggaggggctttcccatggagagaactttcatggtgggaaggagggaaagactagttttaagggtgaccatgggaaatggttttatttcatgggtgctaaggttagactgtaggaacagtagttcagagggctttggagtggaacaaacctcaaggacctaaaaccagactttctggaacctgttcctgactcttgtccccctcatgcctggtctcctgtagttttggccactggaatggtaagttcacagtggcccggggaaggctttgtggggctgctgcacatgcctgacagcccacaggctggacagcagggacttttggaagagatggctctcataggccctcatagctcatttaggaagggaccaggctggtggccaagtgagtgtgcaaatctggc

SEQ ID NO: 62373 - DNA, 1242 bp, Homo sapiens
ctgaaaaatacaataactaatattatttattctggttatggcagttttatttctggataagatggagtaaatacacttgattctgtatctcccactgaatgcagcctaaaatttaggcaaaatgtataatacacctacttgacaactttgaaaagcaaatagtcgcagacagattggggatgaagaccagaactcaaagtaccactgaacctacggtgtttactttttttttttttcccttctggcatttcctggcctggtcttaatgctgtttgaaacccagatgtaaacattaacttgggcagagagagttccagaagccctctagatcagccttcaggaatggaaaagagatttcttggcagtgacagtggtagcaacagaggccacaggtgcctaaaactttgagagaagagaatcttcccctctattcagaggagctgtgatcctaagagtgggacaagtccctgttcctttttttttctcctgggtctcttccttggtccagatcacaggctcatgtgtgaaacaatgtggcagagaggggtaaaggaagctccagctatttggccagaagactgaaaaagggggccctatgggggaaaccgtggaaagggaaaagcttgggaaaatgacctctgagaatcattaatgacctctgggtttataaactctttataaatttctgggctcatccccagattgttcctgcatggatctgattctgaagagcatataaaaaactttgagaatgaaatacttgggagaataaaaaacttcgagaataaaaacactaatgaaccatcatgtaagtcccacactggccactgggtggcacacacacagggcagatccaaatagcactgcaggccgggtgtggtggctcatgcctgtaatcccagcactttgggaagccgaagcaggcagatcacttgaggtcaggagttcgagaccagcgtggccaaaatagtgaaacactttctctactaaaaatagaaaaaattagccaggcatagtggcacatgcctgtagtcccacctactcgggaggctgaggtgggagaattgcttgaacccgggaacctgggaggcagaggttgcagtgagctgagatcatgccattgcactccagcctgggtgacagagtaaagcttcgtctcaaaaataaaacaacaacaataaaaaaaccccaaacagcattggaaatgcttggaaaatggaaccgagattgaaactataacct

SEQ ID NO: 62374 - DNA, 2150 bp, Homo sapiens
cctcagcctcctgagtagctgggattacaggtgcacgccaccacacctgtctaattttttctattttttgtagagacagggtctccctgtgttgcccaggctggtcttgaagtcctgggctcaagcgatctacctgccttggcctcccaaagtgctaggattattgctactttccaatatttctactacagactacgggaagtccatttttcaatgccaaatgcagaagaaaaagttgtatggatgccctttctgccaatcatcccaggtttaggagagaagaatgatgaggtcatgttcatggaacttgacgagtgataagcctctttatttgtccagtgcttggatacacgaatcgatgcaatgaaagagacctcgcctgtgaagagctaagaaatgagtgtgggcagaatcatgagaagaaaataaagagattgctgagcaactcttctgacagttcttgtgctttttgaatgtttcactcactacttataaaataacctattatgtcagagcctggcgagaagggatcctctccaactctttgactaataattccctaaaacaggaggtggcctgcagaagaactaaaaccagaaaagttaggtggttgcctctgaggaatgggatagagttggaggggtggagcagcccctttactgtcaacccttctgagctctgctggatggtgagggaaattatctatgtatatttatgtggtcctctccccactctgccctggcctggctcagctctaggtctcactcagcgggcgtctgcgggtgtgccgggcctcagaggctgtctccttaggaaacaggccaccaagaagcccaaggacatgctgaggtcccacagctggaggggcacagccgggacacctgaggtcctccagctgttggtctttccctggggtctccaccccaatctatccagcctcccaactccccagcctgtggctttttgccacattccacctgaaaagaccgcttggcttctggggtctgggatccctgctggccatgcctccttgagaggaggagcaggggagaagcccggagtctcctggcctggaggaggggagcagtgtgtcaggacaccccggatgggacctgtgacagcaatgacacctgccagcctgatgccgcttgactccctgccaggtacttcctaagcaggagcacgctgactcctcatgtgctctattacccaccaccagatgaggcagcaagttaactttggcagtcaggagtggagacctttgggctccaagctcaaggtccaccccaagacacacagcccattaaatccttgttgtagagattagggcccacaacgatgtgaaggttataagctgcactgcatggttgctgctggatgtgttgtgttcctggcttccctctggatgctgacagaaacaagggtgagagaaaaggacagtaggagaggagggaaggcgggactgaagaaaggaggggaagggggtagcacagggcaaagtggaaaagcaggtagcgtcctttttttcttcactagggcttggcgaagaccccttcgaggacagctccaggcccatccctgtggtggccacccatggagacagtagtgctgctcagaggcatttagtttttgtttcttttctgtttttgaggtagagtctcgctctgttgccgaggctggagtgcagtggtgtgatctctgctcactgcagcctccacctctcgggttcaagcaattctcctgcctcagcctcccgagtagctgggactacaggcacctgccaccatgcctggctaatttttgtatttttagtagagacggggtttcaccatgttggccaggctggtctcgaactcctggcttcaagtgatctgcccaccttggcctcccaaagtgctgggagtgcaggcatgagccaccgtgccccccctcttttttttttttaaaggtagagtcttgctctgtggctagttttcaatcaaggtaacacatgggctctcaacagtgtgcggaactctgctagaaaaatcaaattatgagaacactgttactgtgtgatcccctattggaaaatgaataacataaaataacatacatttaggaaaaaaaaagtggagaaaaggccaggcgcggtggctcatgcctgtaat

SEQ ID NO: 62375 - DNA, 1429 bp, Homo sapiens
tcattctgtatatttctctaatgtttaaatgtttaatgatacacttgtaatgctttggtaattcaaatgacagatgaagaaaaaatgttttcaaaaagagggggtgtccatccaccatcctctccaaacttccaaaacaaccaggaggtgccggtactagcaagtatttatgcatcatagaggattttgtcctgagcgcgtaccattaattattaaagagatgttgtgaatcccgtcagatgagtttaatgtttagtgtgaggactggaaaactaaagcattcagcccttcgctttgcacaccgttggcttaggtattcatttaacaaagatgaaatgaaggggaaatggtgtgatttggttttgttttcttgacagacctgaaacacttttactatttctcacagctacactgctttcctcattttccagcacaggaaaattggttgctgttataataaatccccatctagtgagaaagggagatagagaaagatgcaaaatgaaagataaaatgcaaaaagctaacagcctggctggggaaaggaggccatgggaaggaaggagggggagggaaataatcacataggtggcttcctggaagaagcggccctaataggcctggaagaggtcagtttgggaactggggagagggcagaggagggcatctctgatggagaagcagcagccagtgggcaggagctgcagggagccaggttgcaagtgggcctgcttcctgtatccctgagaccgtgttggggtccccaccctggctgtggccctggcctctggggaggcgctgggcagaactgggtggcaggcccaacctactccgaccctggactctgcccaggaatttctgctgaagtgacaaggcaagccagagccaaagcaggttggacccagcttgtccccacagagacgtgtgcttccctctctctctgagagcgacctgttaaccgcaaatacgtgagtagaaacagggccccgcttctgtgtgcgctgctgtgcgtctgtgtgtgagccagggcattcccaggctctgcctgtgtgtgtgcacgcacatgcacgggtctctgagtatgtcagcctaactgggctggcatttggatggagtagggcaccacccaaggggagaaaaaggagcgggaacaagagaagggagagaggaggtgttagttaccactcttatttacagatgagcttaagcctacgaactgagcttcagcaaaaaatgaactatattgattcttgcaatggaaagtccaggagtaggattggtttcaggtatagttggatccaggaactggaatgatgcctttaaggatgttgcacctccatctttcagagatggaaaagtagaatacactgaagatctcacttaatggtaatagttttaaccagttgtagggagtgatgaaagctaggtc

SEQ ID NO: 62376 - DNA, 3532 bp, Homo sapiens
ctgaggcaggcggatcacttgaggttgggagtttgagaccagcctgaccaacatggagaaaccccatctctactaaaaatacaaaattagccaagtgtggtggtgcatgcctgtaatcccagctacttgggaggctgaggcaggagaatcgcttgaacccaggaggcagaggttgcagtgagctgagatcatgccattgcactccagcctgggcaacaagagcgaaactgcatctcaacaaaacaaaacaaaacaaaacaaaaacacacacacccgacactctgcagttcaacctccccaggcagctgcgttcaagtgcagtaacggaggggcctgaggagtgcgtataaggagagattcttctaataagagaccgtgagggagactccttgaggaggcagcatttgacatggagtttaggacagaagagatttggacagactgagctaggcaggaagaggaaatggcatgggcaaagcatggaggtgagaatgtgctggcgtgtccacagtgcagggcagagttcagtggataggcaggtaagctgtttcccaaagggaaattaaagcctcgttagccaaaaagcaggggaagaggtgcccggcgggccacgcagctgctgtccgccagagcgccttcccccgcccaccactggcccgcgtctctcctgcgtcattgctgggcttgcctctgtgtctgccccctggccacattagctatgtctcctcccagcctgcctccctctctggaaggatgtgtacacacctgctgcttgcatctctccctgaatcaccctttagaatcatggattccttgaccattggtaccaggagggagctcagtggtgttgcggcctcccttttgtattactgatggtccagccaagctccagacaggagcagtgtgttggccgcaatggcacagtgagttggcgcagagccagagctagaacccctccactggacttctggttaagggatgtattcttcctcatactatcagcagaaatcaacggcctcatgtctctcctccaaatacaaaaagcactctgaataacaaaaatgatcatttaaaaatgtatccattaggctgggcgtggtggctcacgcctgtaatcccagtactttgggaggctgaagtggttcgatcgcttgagttcaggagttcgagaccagcctggccaatatgaaaccccatctctactaaaaatacaaaaattagccaggcatggtggcgggcgcttgtaattccagctacccaggaggctgaggcaggagaatgacttgaacctgggagacggaggttgcagtgagcggagactgcaccactgcactccaggccaggcaacagagtgagactccatctcaaaaaaaaaaaaaaaaaaagaagaagaagaagaaaataaaaatgtatcagtggtggcaaaaaactttgaagttgaatgttcggttaagacaaaaatgatagtgaggtgggtttatcattaaccagcctcagcatttcccagcgaaacaccagcagtttcctggcccctggtaggccctgtcctctggacaaattcctggaccgtgtattggctgatgcaccatccatagcaatgccaggaaagaggaaggaggactaggataaatgctctgtggccacagaattctctttctcactaatcacaacattttattcagcctccccctctcccctatatcacacacatattattgggatttgccctcaaggtaggggtggttttgttgaatgctgagctgaacagaagactcaggaagttctctctattctttctatgaatcatacagacctagtccaaggcctttggccagtttcagtctggggaagtcttctctgagctcactcagattttcagaatccaagctgcttcctgctgggccatggtccagctgctctcttctggggggaagtaaagtctctccctagggcttcttcagccctcagcttgccctggacctggagtccagcacagtggacgtggcagtcaccccttggctgtatcagctggattagtcattccaccttggctctgtctcccttctagtaactttccacccgcatgatcatactcccctgggtctggctgacccgggagcagactctcattctttcactattgttctagcctctggaacaagcacccactgctaagcttagcagtgctgctcagattttctctggaggaacccctagggtcaaggaaaatgtcttcatctcctgagagtttcgggatgtctgatatagactctgcagtccccagtggtcaacagtgccaaattttgcgcgcgcgcacacacacacacacacacacacacacacacacacacacacagatcaaataaggaccaaaaggtatcattggatttggtagttaaggggtaactggtaaccttagtgagcatggttttcggtgaagggaatgggaagtaaatgaagcctggggtgggatggctgaaagaagggagatgggacagccgaggcaggaggcatcttgttgaaaacccaggatccaggcagaaatgggaatgaggggcaaaatgctgaggccattctgggcaaagggatggcacaaacaggaaatcaggaggcgtagctaggttacagccagaaatgcagctactctggacttggagatgagtcccttccactttctggcggtggtactggtacagtgtgcaccacagctgctgccccgagcatcttccagctttgggttttagtggctcactgtggcctggggctggtgacagggcactgtcgacagtgctcaagccttggggtctggagacatgagggtttgcccagacagccttagaaagtcagcaggagccctggctcagcttcctccagggagaggagggggcaggccatgtccttagtggggtttatctggccttcaaagcctgtttcttggcccaggtgatgaagtttgctcagagcgtctaatctagtctccagggctgtggttgtcagagtgtggtgtccaggtcagctgcaccagcagcatctggaaaggccaaacatcaggccccactgtagacctattaaatccaaaatatttttagcaaattctcaaaggatgctgctggtccacgtgctgagaaccactggcctagaagagctagaatttccttcttccttgagttatggtactagcaggaccagcctccaaagccatttctacaaggcagtggtcaggacttacttggctcttccttgaaggggactgccttagtccatccaggaggccataaactgggtggttacaagcaacagaaatttatttctcacacttctagaggctggaagtctgagatcagtgtccctgcaaggttgaattctgttgaggcccactttgctctctgcctacttggtcgtctgtgtcctcacatggtaaaagaggtgagggagctctctggagcctcttttattttttatttttatttttttgagacaggatctcactctgttgcccaggctggagtgcagtagtgtgatcactgctcac

SEQ ID NO: 62377 - DNA, 1621 bp, Homo sapiens
ctggtcttgaactcctgaactcaagggatcctctggcctcagcctcccaaaatgctgggattacaggcgtgagccactgtgcctcttttacaacggcactaatcccattcatgagggctccaccctcataacctaatcacccccaaaggctccacctcctaataccatcacctagggaatttggtttcaatatatgaatttagggggacacagacattcagtttccagcagggatgcatgctgcccctgaaggcagagaaacaagcctccaggactgttcccagggcaaacctcccaaggggcatggcaggaccttggcaatctgcatggtggctgggaaatgcatctgcctctttgcaggtgtgtgacctcgggtgggtagccaagatctcacagcctccgtgtgcccatttgtgaagtggcgacagttacatccaccacagatgctatgaggattcatgagtccccacatattagggacctggcccaggacaagccctcgtggttggcacacagtggaatttaatggcacttgcctcccctttccacagcagcactgcctcgagctgctgccctgttctgccacctcacatcctgcaggccccagaggtgtttcctgggctgtaagatgatattggccacagggaccttatttaatattctatcctaccttagaaaattggggccacctcttttctctttcattcccctcccctccctagacaggccccacttaatccaaaacatagcttctcttctaccattctccgtctcacagatagaaaatcttttgattgctggcaggagaaagtcccaatgctgcagtggggtcctgatgccccgggcactctccttcctggcgtgggcccatccctgcaggcctgctagctgccctgcagtccctctcaggatccactggacaagcagtctagacagtacgtgactctctctgcatctcagtcccaggagtgtgggatgatgtcatcctacccgtgctggaggtgtttctagccccaggcgggaggaggagtcacggggcacagttctggtgttctctgtcgggtgacttccccaccacagggaagttggtgacagatgacagcagagcaagtccagatacaacctgcagcattggtctgggaagggacaggagaaagaaaaggcctcagcagggcttgcctcccagctgcccgggcagaatctccattctcttcagggtccattctgtaatcccagttcactttgaactagagcctaaatttggttgctcaagactctccctccttaaaaaataaaagcagcccttgccgggccctcaccagtctccggcagtgagcacagtgctgcttcttgcaagggctgtccattcttgtggtctccccttcttcatgtctcacttccaccttggctcactgacatcagcctcagtccccacgcttcctctgacactgctctcacctagatcatgggtgcctccaagttgctaagtcccaggggtctggctcagtccttaccgttccagagttctctgatgcccctgacacagtgctagtgactatcccttcttgaaaagctgcccctcggtttccatcctgcctctcttctggccgtcctccagccc

SEQ ID NO: 62378 - DNA, 1336 bp, Homo sapiens
ctggcacgtggcaggacatcaacacaggggagcattgtcaggccgggagggagggatgggggtccttctgtagaggtaggcaatgctgaggttcagagaagctcagccaagtacagaccctggtccttaccccatcctgctgcctcttaccgtgggactcccagctgctcactgtgacctgtgaagggagaggatgtgcccaatcacccccaccctgcttgtctgacatctttcctgtttgcagaccgaggctccattactgatccggccctacttggcagacatgacactctctgaagtccacgttgtcatgaccggaggttacgccaccattgctggcagcctgctgggtgcctacatctcctttggggtaggtagagccctccttctgcttggctatgttgaggacctgaagcccatctttgtgggagccccacacagctcctggccagagcagccctcagatcttctctcttgggcctgctgtgctggcaagaggagtggcttcccctgagcccagtgggctggaccatttgctcgggctttgcgcatggccacctggggcaaagcttcctggtgttccatttactgagtgcatgctaggtaccaggcagtatgctaggtgttttaatatccccattttccagatgagaaaattgaggctccagagtaagtgagatgcccaaacccagatctgtctgactccaaaatttgtgctcatttctccagtctcacacctgggctgtccctagagatccgtcctactccttccctcctccctttccccacactctctctgggctcaagtcctgcctctgctcctaaattattgcctgtgcagtttacacagcacaaagaatttgtaggtcaaattccagtggtgtgaattaggccctaaaagcaatcacaatgctactgcatggtgggcagagggaaattctcaaatgcatccctcacataatgcccggtaataatgctttacattcataaaacaccttatgctttcacatttgtgctttcacaggcaaatcttcaaaggtctcaattttatttccttaatgatcaaagaaattcttgcttattgcagaaacaaataagtttttaaatctctttcttaaccccacttcccatgggtaactgattttattttttattaattttttttgtttgtttgtttttgagacggagtcttgctctgttgccaggctggagtgcagtggcgcaatcttggctgactgcaacctctagctccctggttcaagcgtttctcctgcctcagcgtcctgagtagctaggattacaggcacgccccaccgcgcccagctagttttttttt

SEQ ID NO: 62379 - DNA, 957 bp, Homo sapiens
tgtttttaggctttatggctggctttggggaaaagggcttctggtctccgtgccctgccttggagaaggggaattctagtttttatggctagccttgaaggagaattggactgataaatgggagggcaggacagaaaaacttcttctgaggctacttctgagccctttattctaggttttgttttaagagtcccagcagaaggaatttgatatttcaaaaatggaaacccaaaactttgttcctgaaactttttttcatggcaggatattgggggagggggatgccataatattttcagaacttagggctttaaatgtcttaaccttgttctggtccccttagacaacgaaaagaataacgctggtgttcctcctagtcattacttagaacttaaacactggaagaatgctcgcccatttccacaatctggcttaaaactcagccctcttttcttccctttctcaggcaaaagtccaggcccagccctgggcagtctggcttccccattgacagggcctgggtacccacttccctttagctgcacagaatgggcagaggcagccaggatcatccctaggtgcccttgagcctccattttacagtctctggtttgaaagccccagactacaactatagctggcccagaggaaaagcacctaacaaacaaaccttccttcccttcaatctctgggtctgccccagtcttttctccagagcagctctcttttgcccccacctggctcatgacagtcactgcaccagccctgtactgcacgccctctaacttccttccccagtcagttcctcagtatctttggctctgccctcagcctctgaatcccagaaaggtctctcttgccctttccttcaagctcccaggttcgttcgttctttctttctttctttctttctttctttctttctttctttctttctttctttctttctttctttct

SEQ ID NO: 62380 - DNA, 895 bp, Homo sapiens
taaaaaataaaaaattacttgggcatggtggcacacatctatagtcccaggtactggggaggctgaagtgggaggatcacttgagcccaggaggtcaaggctatagtgagccatgatcatgccattacactccagcctgggtgacagagcgagaccctttgggtcagagagagaagggttatgggcaggcgtgggccctgggatgctaggatggaaggctctcctgaccaggtgcctgggaggcagggctggggaatgtcacagccctgcagagtagctggcagtggggaggtgggtgtgggctggcccagtgcccagggagccctgcctgtgcaggactcagccctttccatgatgagctggaaactagcaactgcagcatttgaggctgtgaccacaactgggtcacccaggggacagtgtgcaggaatgtgacaactgcagggtgtgttctctgccgtgactcaggtttacaaaccagatgtaatctacaagtcagaggaagggtcagggtcctgcctggtggagggaaaatcccaagattccaggtgtggcaccatcccagctggggctgagcaactgaggaggaagcaggggaagtcccaaagcccagcccagaaagtccagagaggacacctgccccaagtgggtttcatccagcaaggggcaggggcccaggcttgcacacccagtgtccacacagggccctggggaggtatcaggctgctgccaattcttgttcacattttaagaagttttgtcgatctttaaaaagaaacaactggggtttagaaaaagaagaaggacacaatacctgggattcagagcctgagagggtctccagcctggcttctcagcagcaggcctggcacttccctgagatggtaatgagggg

SEQ ID NO: 62381 - DNA, 3584 bp, Homo sapiens
gcaaaggcagaaaaaaattatacgatttaggcggaataaagagtgatgtttaaaaatcttttcctttgttttttaagacatcttcaccaagccagtagtacttttataaggcagagaagcataaatattaatattgcttaatgggcttaaacttggtaatagagccacgtgccagtggttcggggcagtttcgccagtaacgtgctctcgggttaccctgctcgggccagagatcgaggctccggggacccggcacctgaacctgtgctgcagtcccagcgcgacagcagggaatccagcccgcagcacgcctccgggtctttgcagtagccgggccaaggcgggagcggctgcctctcagggtcgctccagggccgcgctaggaaaggtgtggacggtcggagaggacaggaaggagccggctgcaccgcgccagggtctccgcaaaccgggagcccagggagggcgggaagactggcgggggtccgaggcagcccgctacaggatacgtgatggacgcccagagacaccgccctccagctggtgggggaggagccccagccaccaagaagttaagtgactggcccagttcacacagcaagctagtggctgtgtgcgtgtccggggtcctcatgggccccaggcctgcaatgcgtacgccccttcccctggctctgcctttggggtctcggacgcccgactagcactttggttaaaatgagaggaggacgggcgcctgcagcctgcccggtgctgtagctttgcggccgccccggcgcctgtgtaatccgaggcgtggcgcgccaggttttggcctgcgagggagcgcacgtgggctgcggcttctcgcggacgcccaggccccacccacccgggacccggcgcgcggcgccccagtttgactttcactacccccaaaggaggtctttccaccggcctcttttctgggtaacagctccagggctcacacttggtgaccccaccgaggtcaagtagccgctaagttacggagccggaattcgaatttggcggtcgggcttctggtggcctcgggacggaggtggctgtgtgtccctgggcaagtctctttccttctctgggtagcccagtcgggcgccccgcctgtcgtcgccgcgcatgctcagttgcgggcggcgtccggaggaggtggcgggcgccccagctgctttgcattgacgccagcacccgctggaggtcaccgctgggggctcggcgcggcacgctgccggcaaaacccggcccggatcacggagccggagccggagccgtaccgccagcaactcctgggtgcgcgcagccgtttctgcgcttctcgacggtgcggccccaggccccgctggagccgagctgctcccctccctaccctggcggacgtggcccggccgctccgaggggtttccctcggaccccgcgcctaaaccccggccagcgggagcgtctaaggctagccttgtaccccaccggcactcggcctgggggggcttttccgcgaggcggcggcccagcgggcggagcggcgtgggtgtccacatctaggcggagtctggagccggggaggcggcggcggcggcggcgggagcggggccgggcgcggccgggagctcgcctcccccgggggtcgtgccgcagctcggcgagggcagcgtggctcgcgcggcgtggactcagccgctcctgggtaaggagagcgcaaatctcctccccctatttccccggaagcgcggccgaggcgagcccggcgatgtgagaggcggccgtcggctcctgcctcaggaagggcatgttcggaggggcggcctcggcacgccacccgcctaagcgcccccttcccaccgcagccgccgccgccgcagcgcccgcaccgcgataaaaggggcggccgcgtttcctgacgcgagatccgcgctcgccgccgcccgcccaggcggcgatgacacggcgcccgcggcggcccggaggcgccgggtgggccgtttgctgaccggatcgcggctacccgccagcgtgtccgcggcgccgccgccagcatgggctgtgccccgagcatccacatttccgagcgcctggtggccgaggacgcgcctagccccgcggcaccgccgctgtcgtccggcgggccgcgcctcccgcagggccagaagacggccgccttgccccggacccgcggcgccggcctcttggagtcggagcttcgcgacggcagcggcaagaaggtaaggggcgccgggcactctggggccgccgcgaaactcgggcccggccagtaagcaactttcccgcaggggccgggcggggtcccccccacccggcctcggtgccctcttgtcccgctttggatggttctgattgacgccagtctcccgccttgccggggcagcgttcagagaaggaccgacccaggtcccgcgaccctgatttcctagggttgcgattaggacgccgcctgtgtcgcggcgtcggttttttggacacatccgactcccggagcggcggggcccgatgtgaagttgactgaggcgcttgcatcaatttcctctccaagagcgggtgtttgagggaaacccccaggatattctggcgcgcccctgcaatgttaaatcagtgtgaactttgttcttttcctgtggtagaaagggaagggcgactggcctcaccactcttttccctctgtcagctttgcacatgcagttgcaggttaccattttcttcgggactgctagaatgtaatctggaacatcagctttgcttcattgcacatgtatttgaggtccacgtttattagcatacatactgtatttaaagcatatgtaattagaaaatactgtgaaacgcgatttttgaagcattcagcagaacaaagttaatcttttattaagccgacttactgggacattttgtgactggggttttttgtttttttacattgcgtgtcttctccagcgcatgttgccttggcttatgttttgtcaaagtttctgggcttagtctttgttgaggttttctaaaggaaagttaaaaaggaaaaagaaaaacgtgatcattaaggcacacagcagcagctttccagttctctcatttcagaatttaaagctggaactcatgcgttggtttatgttttgttaaaccagtaaaagacaacaacaacaaaattcgtgcatggctgcagattgttggctgtcatccctctcatcacgaccagtttttgaaagagtaatttgcaaaatttgtttgatttttccttgcttgctgagaactgctgaacctccgaagtttgagggatatagtttgatgtactttctgtcttacatttctagcagtcgtcatgatactttttctgtacgaaaggggaaagtctttttcagtgttgcataacagttgatttccccaccattcccataccctaagtgaaaattcaactttgttctgattatcagaaattgaattccttctcctatagattctttaaagaaacctctgatggtttaggcttactaactcaaggtgctcttaatatcagtgttaagctgtgtgttaagcctacttggctttaaaaaagtgttaca

SEQ ID NO: 62382 - DNA, 1715 bp, Homo sapiens
gctgtgaaaaatggattatagttttagatattaactttgataaatctcagtggagagaaagaagaagccatcaaaaaatctgtaagttatgattctttttatttaaagattgataggctgggagtggtggctcacacctgtaatcccagcactttgggaggccgaggcaggaggattacttgaggccaggagtttgagatcagcctggacaacatagcaagaccccatctctaacaacaaaaaaaagattaatagctaaacaatatatagtaatacacacataggtgttaaaacttaccataaaatcagttcaggcaaataaagtttattttaaggacttaaatgtttagcatgttaatttgagtgcctaatatagaggctgtaggaggataacaggccctgctctcagggaacaattagtcctttctggaaaggtggggtaggtctctgacctggaagtgatgatggcaccttgggggatggattgtggaggcaagagcttggtctggattggtcataaggtatagaaagaggaaaggagggagaggtttgacctgggcttaaaagactgggaggatgtggataagtggaaaatatatctctggataaggggaaggaagggtacgggggttgggtgcatgttccaattatgaggaggctgaccagagataggacgggaggtctaaaagccaggttgaggagtttgaagtccatcctataaacctcagagaactcccaaaggcatttcattttcagcggggtagtcaaaggataaacatgtttcatgaagattaggtttcaggcaaaaattgcagtaggtggggtgagggacagctagaggtggggcactatgcaggacctattgcagtggttcaggcacaaggtatgaccaggtatgactaacttagtgcagtagtttgggagaggagggaatgagagaaggaaaaactgactagtgacaaattggacttggtgagtgaaagggcggagagtggagggtgactcagaggttggggtttaccagcttagaaggactgtgataacatgccacaatttgtacagtgctttatggtttaccaaatgctatttttgtacctcatctcatttgatgttccccaaaccatggggaggtggaaaggagggattttattttccctgtttaaggcctaaagaagcagaaattcagagattgaatgacttgttcaagtttgtggtgaccacttacagaaacaggttcactgtaatagcataagggagaagtcacaggaaagcgaatttagggagtttttaaaaaacctttcttgtcttttggttctgagttcatcttataaaaataaacttttacttttcctgattgtaaaagtcatattcattgtagaaaacttgaaacatatagaaaagaacaaggatcggctgggcgtggtggctcatgcctgtaatcccagcactttgggaggccaaggcgggcggatcacaaggtcaggagatcaagaccatcctggctaacacggtgaaaccccgtctcttctaaaaatacaaaaaattagccgggtgtggtggcaggtgcctgtagtcccagctacttgggaggctgaggcaggagaatggcatgaacccaggaggcagagtttgtagtgagccgaaatcgcgccactgcagtccagcctgggcgacagagcgagactccatctcaaaaaaaaaaaaaaaaaaaaaaa

SEQ ID NO: 62383 - DNA, 630 bp, Homo sapiens
tgcgtattattattttttaaataattattataaatgcgaatatgtatgagggagaactgatgaattggaaatttgtggtcagagagagctcttggacattctgccaaatgacattcctaagtatggccatacagtggtgcctgtagtggagtggggttggactgcagctcatagtcagaattaaagggaagggtgaggtggttgtgttgccatatgaaccttgaccttgcccagggtgatggtagtacttggagtgagcttgaagcactgaggtccttaatgtatgtgagtgacttagaggtcaagagaaggtggcaggggtggcattgctgtgtgttatgagcctcagggtatctaggagtgacagtgggagagtcagaagctggctccctctaatagggagtggtctgggcagctgtggcctttgcagaaagtcctattccaggactttccctacagtgtctgtgcctgcatagtcagtggctcagggagggatcagaagccagggaactttgcaatgttgtgatggtgaaatatgggttaattatatttgcttcaatatattttcagaattccacgtgctgatacccgtaatactctgtcagaccccattactgcctttctccttga

SEQ ID NO: 62384 - DNA, 1069 bp, Homo sapiens
cacatgtctgtatgtatttgattgcctctcctgatgtttaaacttgaggacgctgggcctatttatgccagtcattatgtctctagggaccactacagtgcctacactcattggtatttgtcaaatgaatgaactgacttcaaagggaacagtctttttttctgtcacccatttcaacttttaattagggttagtaggaggttggagcccctgtgaggttgcatggaacatttttgagataatagtgactttaatagccttaaagtatgacctgtaggaaaactcagctgaaggaggggagcagttattggctaatcagtgtcccttaacctagttctgtgtttcccccagtcgtgttcctgagagtgaagtttatatatgatgacttcatttgttctggcttttctcatgacaatcctaaggtcaagtctattttaagtctgagaaatatgtcctggaagttagtttcagagtccctatttcctttttctctcctttgtattgaaatcttggctgtcctccccattccctccttccaaactgttcttagaaacgactttgcaagtatcataaatatcctctatgttgatttttctctgaactttagctgttctttttcagttagatatggggaagtggcacgttctcactcaccattctaacctgacagaattaagccaaaagcaatgttcagattggcccagtaggaagacgaattgaagatgagacatttacattacactttatttgctggatgatttttgtagggtttttttcttcttgtgtaatgttgttagaagacaggtttggagccagagagtactggtccaaaactcaaccctgtctctccctgctttttgacctttggcaagtttcataacctttcggggccctagctttttcttatttgtaaagtggtggtagttgtccagttttaattaaattttgaatgtaaaatggtctgtcaatgtgtaaaaaattataaaacactcaataaattgcagttgcctaaaagggaagcttcaactttattgttagaaaaataatggttttcctagaagaaaaccta

SEQ ID NO: 62385 - DNA, 1194 bp, Homo sapiens
atttctatgtgggccagtcagtctttcatcttgcttaggctttttttttttcttttcaccctctattactcctactgcgtaggctttttgttacattaacttcccttttgcttttctctaccctcagcagagggggtcaaaagaaacttctttgttcttagtcttccttagctgcccaaaatttcccagtagtttgcccatgcatttcattcccctattgactcttactgagtgacctatgtgccaggcaaaaattcggacttgttcattctagtttctctgcttctagtgtgtctcatgctggtgtttgttggctcagatgtgttaatggggctgccgctgctgttgtggttgttagtcattcttttgaacagcggctttagcttaccaatgctccagatacagtttttcagaaactcaatgatctgtgtgcattacacattaaaaagtgcattgaacaacagcatatccagattaaaaacaaacaaattagatttatctggtgtttttccattatgggttggagcaaacatgctgtgtataaatcagataaaccttttctttcactgtttcagactgagaattgtttgttcttgcttttgtggtcaccaagaatgtaatataactatgctcttcacatcctaaggccaccataagtcctggatcagacctgtttttttgaagtcacctgaattttgacttgaggctcccccaacccttactcccactacccctttgaactggatcactttgcttttaaggggcactcccttgaagccagttccctgaagtgacctactttcttgaggtgcttgaagagcttccctttcatttgggaggcttcctcagtgcccccattcccaggcgttttttcctgggagtcctgtcctattcatgaatttcctgttttttccaggggggtgggtagggggtgtgggggcaggcagtactatgttattatcgtaactagtgacatttaaagaaagaaacccaaagcccagttaaccaattacacttaaattctctgggcccaggcctgctggatgctctccatctaccagaaatgcttcttatcatcccccctcttttttagactgctaatccttaacagattaatctgagtttatatttagatgaaagttattcattaatagaaaaacctgaaactgtagtgagggctgacagtgttgaagt

SEQ ID NO: 62386 - DNA, 781 bp, Homo sapiens
gacatgaactcattcttataaaaaagacatttagtctttgggaaataaatactgaagattagcttcaaatggacagtggtttggatgtgattcttgcatctctgactaaatcgtaaacttatccaagtcattgtccactgtggctcccacaaagctttcaggcctgtcttccttggtgatcttgctttgatgtgctatgaaagactgtcccagcagatggcagaagagaactgagtcaggaaaaaccagcctgggtatttcagtgtgcactgtgcactgggtaaagcttctgcaccttaatgtccctgccgcggtagcgctacacgtcgacttcacaatcgctgctgaacttccctaataaaggtgggtcagcaaaggcgtgagggttaccactctatccaaacaccatgtcactgagactcacttaggaagaacattcatttcctgagtacttccgtagtactggaaacggggatgaatacaaaatagtccctgtccccacagaattcatagtccagctgagatcaaataaggacagaacaatttgcattttgccgggctgtcctctaatgacaataatttcctgaatgttttcaggttgcctgttttagccatatgttcttctctggccgcttctctccagccccagcctcaagtccaactcatgatctctggcctaggatacagcaacaacctcctaagggagctgcctctgctcttatccacctccagtttattctcaccgcatagacaagataatgttttaaaaatgcaaatgcga

SEQ ID NO: 62387 - DNA, 1584 bp, Homo sapiens
gaatttatactggtgttccatgaaagaagagagatctatttgattagtatttccaacatagcattccacaataccaaaatttgtaagaggagttgatatacgtttttaaataacctagaaaataagttaaggcgaatgggtccggttcaacttcaggtctgctttcaacctactcaaattggattgatgttgttcattcaacaaatatcaagtctcaggatctgtgcaaagaagaacttcaaggaaagcagccactaacagctgcaaacccctgccatcgctgcagacagcccatgacaatcgaggtggggaacagatctgctggggaggagggtagggccgagggcgcagctacaggaaggagcaagggggagttctgcacgcccttgtgggttaggaagctgagctcactgcagaaatcagcctggtcctgaaccctggacctgagctgcgtggggtacaggttcagtctgactcatgcactggcctgcggaacagaccacaactctgcctggtgaaggttttcaaagaaccatgtcagcaagtcctgctgcctcctcaggctccggagctgtggcccagtttaaggtgaacaagtcccacaagtcccacaggtctgactcccatgaccatgtccggaagcagccgctagaggctgcacttggtcccttcaaggaagaaacgaaagggcctgagcaaatttgcagctggctttgttctgcctggaacactctgttctttcctcacatcctcccgccccgctgagggctctctacacaggcctgcaggagatcacatgccagcctggaagttagagcaccccggggcctctaagttaccaagggagagctggatgtgccaagtggcctcctaagggacactgcctgggggcagaaggttttggttctctgatgagaggcaactgtcctctgacttcactaggattctgaagcccagagaaccgattcagagagagggcaatcgagcgagatggagacagaatggacccaaatactgtccaaatgttcagtgttcagtgagccggcttctgtcacagtgaggtacctgaggcggggactgctccccgggagggtgagtgggagttgactctgcagggggagctgagtggggagaaatcaatcaagcagaaaagtgaagcagaagtttctagaggcttgccccacctaccagaggagtgttcagaggtgcttgaactcttaaggtcactggacatttttaactggggtgaggactcggacagattcacaacaaggcaagcagcagaaagtggctcctgaagtgcttcttgagaaatgtgagccaacacatgacaatcacacacaacacctgagagatgctggcattgctatagggaaggggtatgacccaccctttgggagcacccattccccctaccccgccccgctctgtgtttagtgctttctacgttccattgttagtgatgttcagtgacctcacagcccggtggggcaaatataaatatccccatttctctaatgtggaaagtaggactggaagaggttaagtaacttgccagggtcagctggtaacaatgacagagct

SEQ ID NO: 62388 - DNA, 685 bp, Homo sapiens
attgcttgaacctgggaggcagaggttgcagtgagccgagattgtgccactggaaaaaaaaaaagattcttgagtaagccctgaggagccagcaggaggtgctcaggcaggaaaggtaaacagcatggccaagagcaagggccagagcaaggaaatagtcgccaaaatgtaacttatttttctaaacaccggaaaaatgaaatagcaaactagtagcccacatgaagcaaatttcaagggggaaaatggagataaaaattccttaaatatcagccgttcctctgatcttttagacaggtcgtcagtaagaagctcaccctgatcctctccaccaacctcgggaatgctttagcagagagggttccagacgagcttcccacaacggactcagcccttctgtttcttatctctgacctttgactgttttctgctaattacaaggaaggcctgagcttgcatttttacaactgccgccagcactcagaactcatacaatccctctgtatttccttccagctgttgactatcaaaagacaagtcaatagcctcctggaatcctgtaggatggtccgttttccctaggaatggggataccatggaaagactgcaaagcccaaatcactgtgtaaatgtaacctgccagtgttgccatcagaataatgatcactgtcatatctccaggtat

SEQ ID NO: 62389 - DNA, 1134 bp, Homo sapiens
accacctactattttggtaatgtctctgaacctcagtttcgttctctatgaagtggccatagtaataccttccccctagaagtaaaggaaatcatctagattaaagcacctgatacaaacaggctcacagtgaatattagttactttcccctatacagccatttttattaaaaatgcttctattttcaaataatttaagatgaaagatgtaattaaatgttttaacaaagatagaaatcaattgtatcacatcattcctccaaataatagaaggaaaatctattgagtgtgttcatcttctggggtctatatttcttaaataagtctatgaatataaggaaagaaatatatgagcacacgccttagggccagttaaggaaatatttcctaatctggactctatccgctcagggctccctgcccccacaccccatgaaatcatcagaaaaggaaagagatgcctgggccctgagatcctacccaattatagctctaggtgttagggtcatgtggaagtggcaggtttttgaaatgctgacatgctgacacttaagctcatggctggatcctgttatagctcagagaaagtatataaagaagttggcactaggtgagatttcaaaaaatgaaacgatgcccagcatgacgtaagtggtgaggcttgaggacagaaaggctggggtttgaatcccagcttcacactttctcacgtgtgaccttgagcagggatgaataatgtattgtcactgtatactccatctctttgctcacctgcaaaatggaggtaagagcatcctcttcacagcattattgtgctcaacaaatgtgcattctcttctccttttggtcaaaggcttggtccatttgaatctatcgagactcccagctcagctcggctgcaaccctgaacccctagtcagttgctggaaatgtacctccaggcactgttttgtgggcttttaaaaagggatctgcactgggatgatttccaggctctgcagcatgtgtctgtccacgtggaggatgtttcccttctcagctcctgctccggggatgttacctcggctggcatctagctcatgaaccacggcagggcagtcacaccactgtgctctctgcttccaacatcctttt

SEQ ID NO: 62390 - DNA, 1573 bp, Homo sapiens
aaacagcattaaaaatagaagggcatgtggtgagttgagtttacactcagtataccaatgaaattttctctgtgggttttcactggttgcttttaagagtaagtttgagcagtaatctctgaggaggatcttctgatctaaccaagtgaaagaacaatttcattagcactacagcagggaagatgtcatttattgatgagctaacagtcattggatagatgcccagtgatgctggatattgtgctgggttctgagaaaatctaataagatgtggtccctgccctcagggggcttgcactctagcagaggagacaaatcaaacaaagaatgacagtgttgtgttgtgtgagcacaggcacaatgggagcccaacagaaaaaaaatcaaatccagcctgaggatgtcaaggaaggcttctcagagaagagaaggaggcatgagctaagggtttttatttcatttcattttttttttgagacagaatctcgctctgtcaccaggctggagtgcaaaggcacgatctcggctcactgcaacctccgcctcccgggttcaagcgattctcctgcctcagcctcccgagtagctgggattacatgagctgagtttttaaggatgagtaggagttagtgatgaggtcattcctagcccaaggactaaatcacatataaggaagcgccttaatgaggggcaataggttggaatcagggatcaggttgttcattataaacaagcaattcagtagggcttaagtgaaggttgttggggaaaagaagttcaagatggtgatgttccaaactatgacaagcccagccaaagagttaatcctgagagctacatgagccatctccaggttttaagtgagaagatttggtattcttgacagaagctgtcaggaataccctgtgagggctgcttatctccattcctgggactttccctggatgcttttggcacaagggcagcagctgctattgctgactgctggaaaacagggtctcactggcatggaattcgggtgactgtaattacggataatgggtctcaatttgcctgtcaggaatttgcacagttggctctatccctggaatttgaatactttacatcctgcttatgcatcaaagtcagacagcagaagaagcagaagtcaccggggtttcccatctactcagtcagctggccttggaaatggccgtggacctcttaaaagcagtggccattcccatggagggagtttttcctaaccaagcccacccccacagaaaaggcttagagccgctctcaggcaccaggtctgggaagctaaggaaggaggacttgctgttacagtgatcccacggtgttttcctggggtccatggcagcttggaaggactgtgtccactcacatcctggtctttaactcaggctgacacaccctcaccccttactgcctgtagccaatttttaaaaagaaacaaaaaaagaggaggaagcacttgcttcactactactttgctccttccttccttccttccttccttccttccttccttccttccttccttccttccttcctttccctccctccgtcc

SEQ ID NO: 62391 - DNA, 1195 bp, Homo sapiens
tttatacagaatatttctaaccatcatgacaaccctaaaagtaaatattattgctgttttacagattgggaaacagagtttcaaagaggtttaaataacttgcctatgatcatacaattattcagatatgctaaccccaaaatctatcctctctctttttctttttttgagacagagtctcgctctgtcacccaggctggagagcatgatctctgctcactgtaacctcgacctcctgggttcaagtgattctcctgcctctgcctcctgagtagctgggattacaggcaggcagcaccacgcctggctaatttttgtatttttagtagagatggggtttcaccatgttggccaggctggcctcgaactcctgacctcaggtgatccgcccactttggcctcccaaagtgctaggattacaagcattagccactgtgcccggctgtactttttctactgcacttggcttcttctcatgtgagcaagattcaggacaagtctttccaagggcttggagaaaatatagaaggtggaagagaataggtttcagcttgggtcagtgggatatttcttttttttttacttcctttttctctacttcctatcatcccttcttttcttccttttttcagttaataaaaaatgacacaattaataacaaagctagcagaagccctagacttggctccttgccatatttaaaaaccaagttccacccatatacaattatgactgctgacaataaagtcccaacccagaatgaatcagcacagagaaaaatcaaaagagggcagggctggggcttggtactcagagttagccccaaagttatgagtcagagacttctcagaataacctccctgccaaattaatcccaggccagggcttgccaaggtgcagctggtttcacaaattccagtggactaaagtggacttccctgggggaaaagggcagtgctaatgtgccagagagagacagactggataggtgagtggtattatggtcattgaccaaactaccaaacttcattctactctagcagaaacaatcctaaggccacatagatggaaatgcacctgttcaattctgctcatcactgtattcaagaactcaggaaagatgtgtataatgcatccaaaatgaagggacatatttatttatattgttaaataatatctgcaacatgaactagcc

SEQ ID NO: 62392 - DNA, 2286 bp, Homo sapiens
ctgtaccagatttttgaaaactgacattaaaaatacatgtttaaaatgtgcaaagtgcactaaagtgcactggatgtattttttattcatgtatatacttttgttatctatcacccaggtcaaaatacagaaccagcaccccagagggttccctcctcctccttcccagccaataatcttctcctcctacctaaccgctgttcttacttcaatcactatcaactagttttacacgttcttcaactgcatataaattgtctcagttttttacttaacacttttcttgaagtgctttcgttttttgccactttttatttgacctaagaaataacattaatgaaacagtggtttgacgtgataggcatttccctcctaatgcgcactaaaaacacttaactatttgaaaaaagaagtttcttcgtgtaccaactaatatattctccgccctgtctccagaaaccgcccttcctctgtgggccggtggttaccggcaccattggtacacggaccacattttgtttcccaaagcaaccagatgatttttgaggtcctttgcagctcgaacacggaatgactttgtggtgatcgagtagccagaagttcacggaatgcactgtcacaattgtgattccgccatagcgccgtgcatccatccaacacttgtttaatacctatatttaatacctaataccttagacggtcctaggctgtggacacagaagactaaaccccacttcctgagttgaagtgggggaaatagaggagtaaatcatttcacgatgtgtggttaagtgctgcagctcaggtaaccaccagtacacagaggaagggcggtttctggagacagggcggagaggagaccgtgggtgggcatttcccagagcagcctctgccagccaccctactttgatcactttgccgccgagcagcagcggcggtcaacctcagcctcccttagcaacctgagtgccccgtccaggagccttactattggtctcatgcagcgagatgggcagttctgccgtgcaatcccagctcgcagttcttgctccgcgtgtactcacgggaggactcgcaggcgttaccgccttcccgcgtgccccgcccaccctcccgagcgtctttcggcgcatgcgcggactggagctgtgtgcagggccagcgcggagcccgagcagccgcggtgaagcgcctgtgctctgccgagactgccgtgcccattgctcgcctcggtcgccgccgctttagccgcctccgggggagcggccgcctattgtctttctccgcggcgaaggtgaagagttgtcccagctcggcccgcgggggagccccgggagccgcacggtgagagcgcaacttagttggcggagttgggggaagttttgtgatttgtgggtcggggcgcggagcgcggccagtcccctgcggttgctcggtggggcgggccccggaggaggggcgggggctgcgggggtttcgggggcgggctggacagacgggtcgccgggcggcgccgggacctcaggtctgcggacccctcctccctgcgcatcgcccttctcccgcattgtctgcttggggctcggcgcgcctcccactccgcagcccaacttagaggccgtcgccgctttccgggtggggggcgcgcccggccgccgatgctacctcaggcgctccgcccccagcgaggccccgaatccttgccccgggtccccgggtcggcgccgccggggcgggctcactcctcccctggggcgggcggccgcggtgtggagtccccgccgtggagtccgcgccgtgaacaagtgctgcgggcgcgagggagcggctccccggggtcgacgcggacggtaaacacgtcgggccgcgcctgcctgtcggtgcctctccgcggcttctcgggggtgcggcccagctgacccgcgcgggtcgcaggcgagcggcccaggagacccgtgcggtccccacgcgctctgggacccgtgcagccagccggctcagcttgcagctatactttgataccaaacaaaacttttttttttttttttggtaaatacggtttactgctttttttttttttttttttttgcaaagccacgaagtatgtgaagttgaaaaaaggaaaaaccctaaaactttttaaaaaaaaatcaagaaagggggtagataggtttgttttgttttggaaatagttcttatagcagagtgataccgtcccatttaattttctagatcccggaattcacaatgaaaattggattgagcggtattttggtgttcattctt

SEQ ID NO: 62393 - DNA, 1162 bp, Homo sapiens
gagtggctgagactacaggcatgcgctgccatgcctggctaatttttttaaaattttttttatttttagtagagacagggtttcaccatgttggccaggctgttcttcaactcctgacctcaggtgatctgtctgccttggcctcccaaagtgctgggattataggcatgagccatcgtgcccggcctgtgctgggtcttaaagcatgagtaggaatttgccaggcctgggttgaggagagaaagaatggaatgatggttctgctgtgatacactgtgtgcaaagaaacagacgtcaaagagcttggtgtgtttgaactcagtgagcagtgaggtgtagaattatttcgtgtggatagggtgtggtcaccgaattaggttagaaagtcaaaatggggtgggtggaagcgtcttttagtttgtcctcttgaagcaaaagggaggatagtctggttttgttttggatacctcattctgtgagcagtagaggatagtggcttggcagagggagaagggagcattgcctctcagacaagttagaggaggccattaccatagttttggacagattgtgagggcttgaatgcagtgaggttggaagggagccagcagatctaatggacattttgaaagttgaatggatgaaacttgttgagtagatggtgggaattaggaggtggtagttgtccagaataactgggaatttctagcacaggctgctgggtgaatgagagtgcactgaggggcatgattcattctggcatgggagaggagttggcttcctggaagtggtaatgtttacatttggcttagattacctcattcaaagtggttcttgattttgcccacaatctattttagagtccatttattcatctagaaagtaccaactgcttactgcatgccagtaattgatattttaagaatattaaaaaatgttaattgtggtaaacacacataccataaaatttaccatcttaaccatttaccgtcttaatcatttttaagtgcagaggcagtggcatttagctctttcacattgtcgtgcagtcatcaccactgtccatttccatgactcttttcatgttgcggaacggaaattttgtacccatgaaacaataactttctatttctctctcctccgtgtccctggcaaatacttt

SEQ ID NO: 62394 - DNA, 2668 bp, Homo sapiens
caaaaatcatgcttgggtaaacgattcattcaaagtgaaagaccagtcacttttaatgtaacagagtacaaaacggtcattgatacagtttcagatttcacattgtgactaactctttaagaagctaccacttgtcaagttttggtgtaacatggaaaaagaatattaacaactatcccaaaagactattaaaatactactcctttttcaaattgggtatctatttgaggcaaaattttaaaaatgtacttccccaaacagtgtaaccgtttgaatgcagaagcagataggagaatccagctgtcttctattaagccagacattaaagagatttgccaaaatgtaaaacagtgccacgttcttatttttgttttgttttggaaaacatagttatttttcataaaagtatgtttatttgtaatgagttcatggaattttaaaatgaagtaatattttataaatttttcagttttaatttctaatacaataaagtaccaataaatataacccacataacaaaagctctttgggattctcagtttttaagagtaaaaaggagggagctcaggcaaccaagaactttcaaaccactgattatagcttacaatggattgaaataagctgatcctcatgaaatactttagtttcttatttgaaaatctttatagaaacaacacagaggaaaataattagtatctgctttcataatgctgagttatatttattgggcacttaatatgtgcctgacactgcactgaacaccgtacctatattatctcctctaacctttatcttatcctgcaacgtatatattaccttagttttacaaatcagggggctaaggcactggcgggtcaagtaattggcccaagcttatttaagaggtaagtagtagagctaagttttagacttagtttaagttgaaattgaaagcctgcgcttttcatcaggatgttctgctgcctcacagaaaagtttgtaagtcggcactgtgtccgcactgctaattgatccttagggaaaagtgcagaatgctgttgtctgaagattgttgatgcaaggttgagcagtggctgaagatcctgcgcatgttttctttttatcccaggtcacgtagtcttgtactgttttgtggagctggatctttagaaggtggttctttcagaacttcagaacagaccgtaactggaagactgtgggcttagtttcttatggttactagtagttagtatgtgaatctagctcaaggttggagagatttttcaggatggctgtagttcagttgtcgttgcttatgctagttctttcatttcattcaggggtatagaaactttagattgtctgaaaatgttattttcaggagttttcccattgggagacaaggaagtggggatggagttgaagtcaggtgaaggtgaagagaatagcaccattgccctgacccctggcttttgggttattgtgctgcaagcatcaggtgactgaaaaagcaaacatgaaagtagagattcagagaggggaagtgactcaacccaggcaccctgcacaggaacatgtgtcatcacggtttcagctccggacggtgagatcgcagtgtgttctcaggcccttgttaggattcttagcacaatagttgtttctgcttggtgggtttgttgattgagagcgcctcagaagcatttatattcacagtatcccacgtgccctactaactcaactttatattacatagacagctactttaaaattgtcttggtacatgtattttgaaatttatatgaacagctttatttacattatccattatactcctctattaaagaatatatgtatattttaattatacttttttatactcattcaactttcattgttttctccaaccttttttaccacctcagtggaaatggaaatgagagtacctgttatagcctgaaaagcagaggaaaaaaggtgtaactctttttaaggtttttcgtcatgtttaacttatgtgttattcccagatttttctccgatgttcatactgtctcttgaaaccagtcttcctttttttcagcactattgtggcctgtgtataattggtacttgtctttcagatttgtattctgtaaacaggctttgacggggcaaatttaaactgttgtaaagattgcctattcatttctaatacatgttttgtggtagaattgaattgctgattgtgtgaagggtttttgaaaatgagggacaaacaaaatgagaacttatgaatagtagcacagtaaaaaaaaatccaagaggaataagaccaccgtgctttcttttttcacttctgaactagtcaatagctttgtattctggtgataattaacaaggtttctatacatacacaaaaatgaggggtagtgagatttagatgatgatatagagaatgaagatgggaaaaaatcctcttggtattaatacatatggtataggtacagagtgttcctttatgtgtataatttgaaaagggtgagggagctccaaaataagataaggaagttggtagactacatgttttgttaattcttatgttagagtgccttctcctggtgtggatgcatttctaagatgaatagttaatttgttcttgtttctttttcaaagtctctttgagcaaatgacaaattgagatgtcctagct

SEQ ID NO: 62395 - DNA, 691 bp, Homo sapiens
atttgcatttgtgtcagtgggtaaaaagcactggtttcatgtaaaaaaaaaaaagtgtgtgtgtgtgtgtgtgtgtgtagggtatttgtgattctggagcctgatttttccttcttcatttaggaggtatttatgactgtcaaggctacttgactgccagaacttgccattgatgtgctcacttcatcaaatggcatagcttattctaatctgttgtttattttgttgccatagtaacctttttgaaaacagaaaggtggttgatatgtttgtacaggaattcagggcctttcccctgattgacatctgctggcaggaatttttatcctagtgattcgggctaaggcttggggctataatgagtacaaagggaggtgggatatttggacagtttgaagcagacttctttatattaatccactctattaattgctaaattattttatttagtgatttagggctttccactcgagccagctacttgttatatgaattatatttattcctgacaggtgttatgcttgggttcaacatttagaactcaggctagagtggagcacgttgctgctacctcaggcttattcagacagacaaaatagaaaacaatgaaaggtggccccttccagatttcaccttagtacatttggactagtgaactaggatgagcaataaaaggtagttgaggaggtgt

SEQ ID NO: 62396 - DNA, 833 bp, Homo sapiens
gatttcaaagcctgtggtcttcctctggtactatagcccccaaagcaatgctgtccattctgtattggtaccttcccttcttaatcttgtagttgacagtgtcccacttcccaactttgaatgtctcttttccatggtctcagcatgttgtaccctgggttaggaatgatgtgtgaccagaggtgattcaacttgacctgctgggctccgtgacttaggcattgctggtgcagagatgacgattgtgcaaacctgatggactcatggaatcagagggcaccttgatctgcctgcagtgggtgaggcatagtatgtattagatcaggtaaaggaggcccttcatctgaggaaggggcccaggtttctacttagaaaagaaaggcattgtatttcatgctttactctctcgctctaatcatcagtgtgacagataaagggagcagcatggccgagtagtgagacaggtaggaagagtgagccttgaacatgtgttcatgaattctcaggggcttggtatacttgtagcaaagtgtttgaggagaggctctgtgagggagatgatgctggaggggtcagtgagggctaggtttgttgggggctttgtgtgctgtgtgttgaagggacatgctcaggcatagggctttatcaggagagtagcttgatcagattgtattttggagactctgtgcttcccagtgtgtggaggccagcttagaagcctggagtcccaacttaattgatgactttggagaaaaacaagagaactgaggataataaataaccaagaaagctaggtgaataactgtaagatataggtgagagcagaagtcaga

SEQ ID NO: 62397 - DNA, 1524 bp, Homo sapiens
ctgcctcctgggttcaagcgattctcctgcctcagcctcctgagtagctgggattacaggcatgcgccaccacgcccagcaggttttttttgttttttttttttttgtatttttagtagagatagggtttcaccatattggccaggctggtctcaaactcctgacctcaggtgatccacctgcttcggtctcccaaggtgctgggattacacgtgtgagccactgcacctggcccccacttttctttaaacagataaaaaactctggctcatagaagcgaaataatttgtcttagatcagaccatggtataaatgggattctactcagactttagcacctgtacttttcccataccacactatgatttagcctctagggaagtctcagttgaacataattagatgaatttgtagtgaattggtatttttttcctcgtaggaaaaggtaggttggtgtcaattttgtgaacaatatggtgagcaatgtgggcatgccattttccagcctgtcggaatcaatattgtccttcatttgagtagaatgtgcttgtttttttttttttttttttttttttaaagacggagaatgagaatttgggctaggcagtttgtccaacattttgtcagtctcttcaacgctcactattctgttgatcaatgtagcagatggtggactttggaactttttatcagagaatgtgtgttgagaaatgttctacttggaaggaacattcctttgactcataaaaaaatttttctcttaaagacctctttgctccttgttgcattcaaattaccctgaatacttcctgctgtgggcaccgcatgaactgttcctacaaaagccagccctttccacttaaagtagtgcagcattatataagggggagagcacaggctttgggagcagcccaacctggattcaaatctattacttgttagcaatgtgctaagtaagagggtgctaatatttattgactgcctactgtgtgccaggcattattaaataatttatttactatcctcattaatttccacaacaactttctttgctttttcacagcaaccttttaaaaggactgttacattttttataggtcaagatgcatgctcaaagaggttaagtatctagctcaagttctcacttcttgtaagtggtaaagtttgattttgaactgaggtttatcaaactgctaatgtatgtggtataccttgaacaaatatgttaatatttctgttctcaatttcctcatctctgaaaccggaatactaccactttgaaggactgataagaggattaaattagtgtacttaaaattttctgtcagtatctgtttaagtagatactcaaataatactagtttcttccctacctttagtaagtaataataacagaagaatgaagcaattttcacctctgcctttattaaaatgttttacatttaactttgtattttgaaaaattttgaactcagaaaagatgcaagaaacgtgcaatgaactcctatatatccttcatccaaa

SEQ ID NO: 62398 - DNA, 5474 bp, Homo sapiens
ttccctgtgcaccggagcccacggaccctcagcgactttcttcttctgaagagactgagagcactcagtgctgcccagggagccctgttgcacagactgaaagtccctgtgatttgtcaagcatagttgaggaggagaatacagaccgttcctgtaggaagaaaaataaaggcgtggaaagaaaaggggaagaggtggagccagcacctattgtggactctggaactgtatctgatcaagacagctgccttcagagcttgcctgattgtggagtaaagggcacggaaggcctttcgtcctgtggaaacagaaatgaagaaactggaacaaaatcttctggaatgcccacagaccaggagtccctgagcagtggagatgctgtgcttcagagagacttggtcatggagccaggcacagcccagtattcctctggaggtgaactgggaggcatttcaacaacaaatgtcagtaccccagacactgcaggggaaatggaacatgggctcatgaacccagatgccactgtttggaagaatgtgcttcagggaggggaaagtacaaaggaaagatttgagaactctaatattggcacagctggagcctctgacgtgcacgtcacaagtaagcctgtggataaaatcagtgttccaaactgtgcccctgctgccagttccctggatggtaacaaacctgctgagtcttcacttgcatttagtaatgaagaaacctccactgaaaaaacagcagaaacggaaacttcacgaagtcgtgaggagagtgctgatgctccagtagatcagaattctgtggtgattccagctgctgcaaaagacaagatttcagatggattagaaccttatactctcttagcagcaggcataggtgaggcaatgtcaccctcagatttagcccttcttgggctggaagaagatgtaatgccacaccagaactcagaaacaaattcatctcatgctcaaagccaaaagggcaaatcctcacccatttgttctacaactggagacgataaactttgtgcagactctgcatgtcaacagaacacagtgacttctagtggcgatttggttgcaaaactgtgtgataacatagttagcgagtccgaaagcaccacagcaaggcaacccagctcacaagatccacccgatgcctcccactgtgaagacccacaggctcatacagtcacctctgaccctgtaagggatacccaggaacgtgcggatttttgtcctttcaaagtggtggataacaaaggccaacgaaaagatgtgaaactagataaacctttaacaaatatgcttgaggtggtttcacatccacatccagttgtccctaaaatggagaaagaactggtgccagaccaggcagtaatatcagacagtactttctctctggcaaacagtccaggcagtgaatcagtaaccaaggatgacgcactttcttttgtcccctcccagaaagaaaagggaacagcaactcctgaactacatacagctacagattatagagatggcccagatggaaattcgaatgagcctgatacgcggccactagaagacagggcagtaggcctgtccacatcctccactgctgcagagcttcagcacgggatggggaataccagtctcacaggacttggtggagagcatgagggtcccgcccctccagcaatcccagaagctctgaatatcaaggggaacactgactcttccctgcaaagtgtgggtaaggccactttggctttagattcagttttgactgaagaaggaaaacttctggtggtttcagaaagctctgcagctcaggaacaagataaggataaagcggtgacctgttcctctattaaggaaaatgctctctcttcaggaactttgcaggaagagcagagaacaccacctcctggacaagatactcaacaatttcatgaaaaatcaatctcagctgactgtgccaaggacaaagcacttcagctaagtaattcaccgggtgcatcctctgcctttcttaaggcagaaactgaacataacaaggaagtggccccacaagtctcactgctgactcaaggtggggctgcccagagcctggtgccaccaggagcaagtctggccacagagtcaaggcaggaagccttgggggcagagcacaacagctccgctctgttgccatgtctgttgccagatgggtctgatgggtccgatgctcttaactgcagtcagccttctcctctggatgttggagtgaagaacactcaatcccagggaaaaactagtgcctgtgaggtgagtggagatgtgacggtggatgttacaggggttaatgctctacaaggtatggctgagcccagaagagagaatatatcacacaacacccaagacatcctgattccaaacgtcttgttgagccaagagaagaatgccgttctaggtttgccagtggctctacaggacaaagctgtgactgacccacagggagttggaaccccagagatgatacctcttgattgggagaaagggaagctggagggagcagaccacagctgtaccatgggtgacgctgaggaagcccaaatagacgatgaagcacatcctgtcctactgcagcctgttgccaaggagctccccacagacatggagctctcagcccatgatgatggggccccagctggtgtgagggaagtcatgcgagccccgccttcaggcagggaaaggagcactccctctctaccttgcatggtctctgcccaggacgcacctctgcctaagggggcagacttgatagaggaggctgccagccgtatagtggatgctgtcatcgaacaagtcaaggccgctggagcactgcttactgagggggaggcctgtcacatgtcactgtccagccctgagttgggtcctctcactaaaggactagagagtgcttttacagaaaaagtgagtactttcccacctggggagagcctaccaatgggcagtactcctgaggaagccacggggagccttgcaggatgttttgctggaagggaggagccagagaagatcattttacctgtccaggggcctgagccagcagcaggtaagcaaaacataatacaaaattaacagtctgagaagcagattcccttaagagtcactgtggtgtcctggtaaaaatataggcatctttgttgttttgaggccttgcactcattgggtaggtagccaagttaatagtcaccaccatcaggaggggcacgtcatctcagggttggacagattttgcttcctgtattgtagacttactgcttggttgcttaagcttataaacactcctgtctcattctggagtggttgcaactttgcaaacctagaaaacaatgcctagatcacaggtactctaaagtggtgaaagaatttagcagatgtttttattcacatggcttaatccttttctctagtaccatagaaaacagtgccaaaaagctgtgttttatctacaagcctgaaactcccttcctcccctatcatcctagtctgtattctgagcaaatttagagtcagagtggtttcatgaacagctgtaagtattgttctgagctgacttcccaacatccaaaatggtggtattaggtcattggtggttttttgtttgtttgtttttgttttttttgggctaggggtgttgttgacggggaactccttccttttcctgcttggggagtggacctctagttccattgcctgttgcttttgggcagcagtctgagaattcaagaccctgcacagtgcaggggataggatgcaggatttccgcccaagcccagtctgctgagctgctgtcacagggcagaccttgtgtctgctttatcttggtgaagcagctgcactgagcagattgctcacacagcagcctgttccatctgtgggtaaccatgttccgaggcagcaaagagaaaccgctattgctccgtggaaataaactatctgaataaaacttcttaacgggggttgaggctgaagctgaaacgggagtcggacacgatcttggctcctgaagtctttaaaggtcagtttgatgcacacttctataccaccacctgttaccagctgtagacagaagacctatctccatgcttgcccctaggcttttgtaggtaagaagcagcctgttttgtctttattgtttatttttgctgttcttttcaatttttgaaaatccctttacacatatgtattaagaatgtgggggagggttatggagagaaatgaatcaatggagcaaaagaagttgctttggaagaagcgcaatttaaatacagtggttattttccctggtaaagggcttttagccgtttataatctttttcctccccagttgagggatttaaggaatccgaggtagaatttttgatgactttagctttttagttttattaatgttttggattgttagtgatagatacttgctggctgttgtctcaggatttaaatgaggtctctaatttttaaaaaaagccacaacaacaagtctattttgggggccctggcaggttggcatttcagaagaatgggagtggctgtaagctgatgcctggtgatgttcttttcatttcggtgctgcgtccttggccacatgggccggaattatttctctttctggctcagtggtcagaatttgactcaagcaagtgtgaactctgtggggattgtgtctgtagtatcctatgagaaaaagtaaaaaccagggagaatttcagactttgatttttattagcacatatagtaaagatggtgagaaatgacggatgtttaggattttgaggttttgagaaggaagaaaaatgtatggactttcagcagtatatatgggcttgaggttggtaaattttgtgtaggtgagttacttgtcctgttaccaaaaggagtcatactcatggtctcaaactgcagaggaactctgtattgatggtctcagactacagagaaagtagccagtcatgaagaaattggtactttcttcagaaaatggccaggattgggaaaatccctggtcacattactttagagaaaaagcacctgagtgtgatctcagagccaaagggtattttctatcaagtttacattctactcatagatttaatcatactgttttgtgagtgagaagacataggtttaactgctgatttggaaggagccagtttgaaagaaggggatgtggcccttgacccaccaaaagcattgaccacagtgcttaggaaatcagtgatgcatgactgagccacgccagtcctgcagaggctgccgacacccgtcaagtgtgagtaatcactgttttctagtgtgactggttgctgtgccaagatgcatcttttcaaagttgataggtataggaaaggaaggaggtaccaaaaatcacatccccagaggaaagcaaccctctttccccccagaaattactctgactcacttagagatgttttgatc

SEQ ID NO: 62399 - DNA, 3087 bp, Homo sapiens
gttgagagaaacagtgccctatgctttagattccatggtggtcaaaaaaaaaaaattagaaagctgaaaatcaagttagtgaacttactcatgctgcccctttgaaagtccatgttccttgggctacacttgacattgcactgtttttactcttcagaggactaagtggtatgtttttttgaaatttcacggtaggtaaatggaacagactatcccagattgtttcaagagtatgaacagtgatgaacaaaccttgttgtattggagtactgtggtatgaaggtgctgactgttctaacccgcccttattacacataatattcatgactaatgcctgggtggctacttgtaaagcaggcattattcagacaaatgttgcttttacccctgtgagaagaaaagagaacacaccctgcatgggtacgtgtgtctttgtttccagaagccccttagaaagggaaggaaaaaactcacatccttgaattcaaatacctctgtttcttagtactccattttaatattgtagtgattagagtcattgaatccaggctggtacttggctctagaccctttgctttctgatgagggatatctctattctaatggtatcttgtctactataaagaagaaaacaaaacatgacttaaagaaaagaaaaggtctcctctctcagtccctttcctcttctccttttttctctagttttaagagttgagagagtgaatattcctctggttggtcagcatacctcaatttacagataaaagaatagacccttggagagtcacatgactagcttgaggccaaaggcagctggaagagtttgaggtttgatttctaatctgggacttacacaacagggcgattcctccttgactcaagaaacctgggctctgattggtaaagttgctataagaagcctgagaaccatgtaatttatctctagctgcgagatatcaatgccttatgctttgtgtttgcttccaccgtgtagagttggggaaagcatatgtcagtgggattttcagttcttgaggatttgcaggcctaaattcaggaagtttttgtgttcacagcattcttataatgatgtgaaatctgactacttaactcttctccgtggtgctctgacaaacttgccttatttgctgtgagttgaaaggataaaacagacacacactttaatttttcccatttaactcttcacatactatattcatataggttttcactggatggggaaagagagcagaggtcggcaaacattttgtaaaggacagattttgtaaatgctttgtgggacatatggtctcttaaaactagtaagctttgctgtgagtatgaaagtgtctgtagctagtatgtaaacaaaggagtgtcactgtgcttcaatacaactttattatggacactgaaatttgaatttcatgtgatggtcatgtgtcgtgaaatattattgttttgaattatgtttccagccattaaaaaaatgtaaaatctcagccgggcacagcggctcatgcctgtaattctgccactttgggaggctgaggcaggcggatcacttgaggtcaggagttcgtgaccagcctggctaacatggggaaaccttgtctccactaaaaaaaaaaaaaaaaatacaagagttagccagaaattgcttgacccgggaggttgcagtgagccgagatcgcaccactgcactccagcctgggcgacagagtaacactctgtcttgaaaaaaaaaaaaaaaaagcctactcttaattttttttcatgggctgtaaaaaagagttaatatcccactggcaatagcatgtgagcccctgcctaataaatacttgtgcaccagtggaagaaaagaaaaaagaagcaagcagatttcttaaattgttttgtggtgaaacctctggtttttaaactacaggttgggagtgggatcaagttctgtctttcctgaatagctttttgacagcctctctagggctcagtttccttgtctctaatcattctctagctttaaccttctagagtctgttttcatgctgaaaagggttagagtctatgattatatttgagggaggagtggcatttgtgtaatatttaacctgatctttctgccacataccccgtctatgtgtgtgccttgggaataggccagtcattgcttcattgaatcattgaatcatcctctccaaatgtaaaatagaacaaattcctgtatcttatgctttgctaccggcttcaaaaccagtagtatggtaaatttatggcagttttctaataaatgtaaataatccatttaaattcttatggaagttttgtaacattctctaaacgtgtaatggtcagagcataagaacctctgtcgagtggcactaccaaggatttaaagaaaaaagctacagctgagttcttgttttctttagtcctttagtctgctatctgtcatacaaactgaggagtaatttttcattccttaacctgtttgacacatgtattgtaaataaatccttactttaaaggtccagtgctgaaaatcatagttcatgaaggaattagacagtatctgcattcgtttacttatattctcagagaaaacacaggtatgtgttaaatgctgcagatttcttgatagtctttactgatatttctttattggggtgaaaatgttcacaatttttgaggcaaagttattactttacacatattgtggtttattcccattaatcattttatcattttattttagccaaagttttaatgcccattgcaatttaatattcatcattacctccacctgtatgctttactggtttgaaggtattcagattacctttcgttgtcatctttttttccttagtgagttaatatatatcaagtacttagatcagagcctggcacaaaataagtacagcttagtattattattagtttagtaacttcagattacaatatgctattcacttattttagtaactagtggaatatggtggttcagactcagttactgcttcttgaacatgttataaaagcttcaggaatagtttcttacattaatttgaaattgaaagacatggaacttgt

SEQ ID NO: 62400 - DNA, 1387 bp, Homo sapiens
tcccaggatcacctctcagagctagatgctctttaccccaatgggtcacactagtatttcagccttctgggtggggattgtttcggggacattttaagttcaatccaaattaggcacttggggattggccaggaaaaatctataaatatctgtcgtttcttctttccctttgcctcagatgaagaggcttttttctttttttctttttttttttttgagacttaactcttccatctgtgttcctagttctatcttggcttttaaagaagtacttctttgtaaaacagcttcagatacttagtagttcctttattcttagtttttgaggtagctccctaccttctccagttatcagataatcagaagacttcacttttccctctgctttcctttgtcatggtacaaaatagatccagaggggatatggtagtctgattgaaaggaaaagtgttttgttctttccattctgacttgagtcagaatttaccatagttacttggttttattttatatgcacccttgtaggctgacttaaatacctccttttaaaaaataagacaaaaatgtaacatacattaattcatttattgctcacacctttttttttaaccatttgcctttatttttatccccattttgtaggtgagaaactgaggaacagaaaggttttaaaacttgcgtaaggcagcctagctccagagttcatgcttttaaccacgatgctagcttaatagagtcactaagctactcatttgtcccttcatttcctttgatgtttcctgtatgagacatctctgctagtatgtatttaagtaaaggagcattctccactctttaaacatatttttgtgataacccttccaaagcaaatgttcacagtgtaatctaaggtaaacagttacattgtactttcttaaaaatttccagaacattaaaatatgtgttctagttaagtaaaattctcaaaatacaagctccagataatagtctctgaatgaacagaagcaagtttattgctttgaatatgagtgaatgccaaaattaacctggcagtagtgttgacaaataggctttttcatgaagaacttctttcttttcccctttgctttgtttttttggacaattgataaaaagagcaagttgtacctctgcattttttggagcgcatgactgtacaatggtgtatatttgcctggagggatgagggaagtcttccatgggaagctgagtcattttttggcttgtctgactgtgtgactgtgctagagctattctttttttgaagagaaaaataagaagtcaagtaatttcctaaagtaatacatttttattttatgtgggattcatattttccttgggttgtggttattttgagcaggagtttttg

SEQ ID NO: 62401 - DNA, 613 bp, Homo sapiens
tcaacctccccaaacctgctctaatagccagtgattaaataaaagcgtggcactggcagataggccatcagctgcttccttaaaagtcttcctcagtggtcacccccagagtgtgctatgcaaaatatcagaatgtcttgcagtttgttcccaggttctaaccctcttctccatctctaaaaaataatctgtaggcgagacattgcaacatctttttctgtgaaccatgagtggtacatgaggtcacttcctgcagccatttgtgtctctggcctcacagaggtctttaacagcccgtaacgtttgtcgtgaccttttcaccttaaccctgtctttccattcagtatgcctcctggtaaatgactctttagtgagtgttatgagcttcacgtttattctcatgaatatgtgtgggttcctaaggtctttaatcaatagcataaaatttagattttatttttaaagtgaaaagaaatcctaggattctttttggcactagctaagagagaaagtacgattataaaatatacatgatctaggccactctactatccaaaaggataattaaagtctacaggaaatattaatagttgctgcctgtcttcccaaagag

SEQ ID NO: 62402 - DNA, 692 bp, Homo sapiens
ggaaataagaatgatttaattttcttaatattatttatgtgataccttttctaagatggatatttccgggaatttgacagataaccctgcattttagtaagacgttactactactgatgtgtttctaaaatggactgtctttctgaagtggactttctgattcagtctttctagataaagttgttgttttagtgccttgctatgcttagccttcctggaatctctacttacccatagtttttatcttgtatggaacctcagagtaggcatttgagctgcttgtttcactctgatctagacgagttgcctgtagccaacttcctgttaaaagtctctgcctttcactgaggtcattttttagacctcacagttgtatttgaaacatagcaactgtttgcctcagctgccatggttacacatgaaacaagctctaaataatcagaagtctggcctaagtgagtcaagttcatgctagtaacggatttttcactgcttccctttcaatatgtgagtcataaggaggcagatttcattctgtgaagggaaaggattaatgataaagtcagttaacaattggaatgggctcttatcaccagaagtgtgctagtggacactagatgactgtctttcagggatgttgtaccaggaacttctgcaggtggttggattacatggtctcaaagctgctgtga

SEQ ID NO: 62403 - DNA, 1166 bp, Homo sapiens
gctcaagtgttcaattccaagtcacttaaatactcagcatgattcatctatggtcatagtctccctaactgaaatagtgtcataaataaaatcctcagtgatttttaaagcctaaaatgtttggtacactcaaaatattttaactgatattttaagcacacttagtagctgtattactttgagcttgttactgaaactctctgcatcaattcaactgttaaatggggatgataatgtgatgtggcttaaatctgacttcatttgaagtccatagcatattttctgtcatataatgagcacatgctgtcattgtggagtgtgattgttcacaataaccagaacagtgccagggtccatttttctctgcccagagcttaagcaaggttaaacattgctcaccattgctaggacattgtcccttgttgtcttgcacttggctgtttattatgagtgtgcttgtttaggaacagaatgttttctaaactcatcctaatctcactgctttccagcttttacctgtgctctttttccttctaaagaaattattagtttcctcaaccacagtttatcacagctgtcagtaaaacttgagcatttctggaaatgtatttccactgagctgttgtccagaatgtcttttgttgggtcatttgctagattagaaaaacagacaaacttgtagcattatttctaagctgggatctgttttttaaaaaatctactgatgtaaaggaaaatactgaatagagagggtgactaaaatatttctgtatcactttctggggtggagagtaggcaagcagtagcttctttaggaaccacagaggacgggaaaagctgcagtgtctcctgtcttggacttcctgtcttgattcgaagggtgggatatgatgagcgtgacttgccggcaattttttagggggtcgcagtagcacaggtgctggctgtgtcatgaggcttggtgcctgggaggactgccctgagagaaacttctccatggaatgtgttcacagcatttctcctccttgcatcagagaaagattgtgtggagcctttttctcccactgtgctgggaaacatagatggtttcttgatagaacttaaaaataaattttattttcacatgtatagaattcagttattacagatgatccctttctttcttt

SEQ ID NO: 62404 - DNA, 2893 bp, Homo sapiens
ttctagcagtctcctttctggtttccttccctccccatcatcactccagtcccccacaaatccatgtgtctgggctaaaagagatgttggcccaaaagagatgttggcccttaactggtgagttgatgtagacaggacctgtgatgcttcctgaatcagtctgtgaggcattgcctagtgaatggtatctgtggttgatttcctgagtgagcccttcccatgagagtgtctcctcgagtgtccccacaggccgatctttcatttgtttctgctttacctctggcttcctggaacagttctgttatgtgactttatagcagcgctgagagctgatggtaagccttctgagacacagaggcttgggtttttacgtcagtggcccttgtaggccaagggagtgaaaagtaaaggaattgagataaaatgctgtccttgccaaattgtggtttctgctttatctttcaagaagtctccattttctcttaagtcacagttcccagaggtgcatgtgggggttccagtgacctttcatgtgtggttcctgtctcagagaatggggtgcaaaaagcccagcgtagttaagcttttcagattttatattctgtgctttattacagtcatacaaattttgtaacccctgttaggggctttattaatgtatttatttgtaatttagacttacacattgatggcagacactttcacttttagttttggtagcctctcagcttcctgtctgaaaagttccagacttactagtttttgttgattagaaatcacatctgttgcttcctaagggccaggaaactcacccttcccatcagatcacttgagtcgttgttcctctcattaagctgtaatctgtctcctggtctccaaataaagacacaaacaccgaaaaaaaaaaaatcacatctgctcgtgtttttcctcctccaaataacatcacagacctgcttcctagaagaggactgcagtgtgtaatttcagtcacattctcacatgtgagtgacttcactttgaaattcagaggccacttgtggcagcagtggaaactcagaatctgggatctgtttgctttgtccatgtgaccttgggtttgctttcttttcagattgcagtgcttttgtccacaaaggctgccgagaaagtctagcctcctgtgcaaaggtcaaaatgaaggtaagactttctggctaaaacaaggcttaaaataaaagggtttaaaccagcaaaatcctcgggagttgggagagttgaggttgtggtggattttgtttattttaatcatttggtaccaactttgagaacaaattataactaaaaaatattttttctcttaagcgatcaatcttcttcttgagtaacactggagaattagactttcagaaaagaaaacgctttcagaacttcttcacgttcaatatacatttcttcgtgattttaatatttccgtattgctcttaaagtggttttcttcttaactacgtctgcaggcctaccctgctgttcatacacctgtcttcctccttcaggactatcagggcagcaggtggaggtcaggggcattgacctgctggtgggggtggggagggtgttatggttagccccagcctgtctggtagcacttttctcctcaggtatgtaatataggtggctctgatcacatgacgtaagaatagaaagtgcctgttttatggtggtatctgccctgagcatgtatgctatgtaatcatgctttcccagtggcccttaaaaaaaagtgtgggttaagggccataccttttaggtagcctgtgaggttttcaatgttctagtcgcctgtaagtgtctcttcattccttgtcaaaggagtgctttccaacttcgtcgacacagatgattaatgagctgtgtgcttcgtcagtcaccaaacacagttatctagtgccatgacctcaacctggaatgtgcatcagaatcaactcgagggcttattgaaagacaacttactgagccccactcccagagtctcagattctgggggagagtccaggaatttgcatttctagtaagttcccagatgatgctgatagtccgaggaccttactttgagaagcactaaaactagtgtcaaaatggcaaagaataggatagccagatcttctttagcctatggacacatattttgtttggctcatgtagtatttttaaaatgtgagttagtgcagctctttcaaaatcatgttttatatcagtttggattcttaagttctcctgaaaaaactggaagatttataacccttggctccctgatatttccctgtacccagcactcccagtttttccttttttccatagtacttatcaccttcttagagtctgtatttacccatctttatttattattatatagttttttatagtctgtatcttccccccactagaatataagctccaaactcattaagcaggctgagggcaggagttggctccatcagtggcgcctgagcacctcacagggagggagggatggctggagctgagtggtgctgcctcctttagacaggatatgccagttccaggctgccactgccttcccacaccccaccccaccccagcttgcttctgtcatttgttgcctgccggcaccatagtcatttgagtttgtgatctctgataagactcaattgttgtgaatgtactagtttatacagaatgatcatgatagagacatagcatctcccatataagagaatataacctaaaagggggaattttattttattttattttattttattttattttattttattttagagacagagtctcactgtgtcacccaggctggagtgcaatggcacagtcttggctcactgcaacctccatgtcccaggttcaagcaattctc

SEQ ID NO: 62405 - DNA, 654 bp, Homo sapiens
cacagtctgtttactcccttgcagaagaagatgagcagttcagttgttagaaggcttggaattccagagtgcatattgcttgtaactcagcggattaccaagtacccagttttattccaaagaatattgcagtgtaccaaaggtaagtctcctttctaactcggtcttgtatggtcatggactgtttcctctgtggccagtagtactggaagccccatggaagtgctatttcatgctttagtatgtctaaaagagaccttgtgttttatcttgaattttgttgaatgaaaatttggactgttatgttaccagacttaggatagatgatagcaagaaggaaagggaacacattgattccatccagagttcaatgacctgaacagtattctgttatcactaggctgggagataatttccactagttattcccagaagtgctagaattgctgctgtttttcacttaatcagtaattactggtttctctctcttggctaattctgttcctaggtagttattttaaagattacaaggcagtacattaaaaattaagtaaaacaaataaaaaaaaaaaaacttggttgctcttcctgctattactgtccctcctagaagtctttagttccttttatttcagagcacaacatatgattgca

SEQ ID NO: 62406 - DNA, 470 bp, Homo sapiens
cactttcataggactgtttcaggttacagggtcaccccttcctgtccctaccttagactcccaaccccatcgctgcacctggcctggcctcctctggaaggaagctcagatttggagcctctgccagggcagggagcctgttggaaccagcccagggccagccggctcattcctggaattcctacctcctctcactgccctgggttggcaccaggtgctgagtgggcctcaggccaactgtgggcatgggctcgatgccgctgcttcctcctccacatcaaggcatcagccgtatctcaccccaaaaggcagagaggaaatccagctaagtcccacgcccaagctctgtgctggcttctggagggaagacacagccactgatcggcacttttggttcatgtgtcctcctacaacaaatgcgaacaaccatatacccttcacatggcttatgtctagctctcaaacggtat

SEQ ID NO: 62407 - DNA, 869 bp, Homo sapiens
cctcactgctacctggaactaaacagccacgctacctacctgggggtgtcccccaaggcaccctgagttgctgaaaggaatacagatgacagctagaggcacaggggttggggagcctcggggccaggctcctgtgttccctctcaggctgggtccctttgttccctctcaggctgggtccctttaatttttggcaggtgctccctggggcctggcctcaactgtgaaatgggctaatcctccagcttgcagagtggacaagggtcagcggccgccctgcacttcctgtgtgcagcaggtcttggccaacgtgcatcctgtgggttgttggtgtagggcctgccccactaggctcagcctgccccatcaagggtgggatgctgctctatcccccagcctggcacaggaacgaatgactgctgatgcctggacggacggactccgtcctgggcacttgcttagccaggcccaaccctcaaggctggcagaaatcctcaggcctgtgctctgggatttcccatctgtagcaacttctttaagacaggagagaatgtactgtactgtccctcctgcagcagtgacggagcccacagtggattaatgagctcggcctttcccagagccaggactggaaccctgccctgcaccccagtggctaggccccagcaacaccctgaagagaagacaagctgtcggcagccggatgcctgccttgcattcggcagcccccccatgctggaggcgggtgggaaagaagggttgggagtctgcgccttaaagggcctggagtacggggtgcccagtgggagagaaagagagagaaggagagaatgttcacagcaagatcacccttagtgggtaagcggggg

SEQ ID NO: 62408 - DNA, 3127 bp, Homo sapiens
agggtatgagccagctctgggacaaacatctctggcctgcagatgagccaccccctaggcaagctccagttgaggctgcctcccatggttaagagaacatgcaaacggtgttcctgactgaggctggtgtccgggcagtgctaagtaactggtgcctttgaccacattccactctcatgacagtcctctacagaagcttctcttgtaagtcccattttagagctagggaagccacagctcagagaggccaagaaactacccaaactgccacagccaggattctcacatgggctgtccggctctggagcctgatctctgttcaaggtgactaatccctgcagggtttgctgtggacgcccaagcagagcctcacgtacccacttccctgctcccagcaggctctgccctgggccgggctccaagcggtactggctagacatcccccttgccttggaacaagagccgccatcaaggcccaagtgctcagtggagacatgttctctgaatccaggtgtctccacagggctctttacctagctggggcaagtgatggcttggaggtggggccgccagtgactcaccctcgagaccaacgcagaggcccaagatgacagcaggacatgccgaaccctaacggaagtgatccagatttgcctcagcaaagcagagaaacacgaagccagagcttcccaggtcccccagctgacgccaggatcctgggccaacgcagcgcctcccctgcctcccttgcctgcccttctccaccaggcctggggacctggcgctcagagtgatggagtgatggccaagaaacaggttcactacttgctcaatctaggggaattctaaagcactgtcattaatgtccagtgaatggcatgacccgaggccccagttcagtactttgaactcaaggctcagccaacaggcggcaaaactcatatacctagagaaaacatggccaacacccttgaggccatctcgaagaccacagctacctgccccactgacctgtggaaggagactgtattcaccaagtctcccgatcaggaattcactgaccaccttgtcaagaccctcaccagagtctccatgcagaggacctacgctccagctgtggctacaacagggtttttatacaagaaaaataaagtgaattaagcctgaaaaaaaaaaaaaaaagaaagaaaagaaaacatggccaaaaagcaaactgcattccagtatcttgaccccctaaaagcctgtgctgctgtcttcctgctggtaatggggccaagaaaaacaaaaaaccctaaacaacaaagtttttcatttttaattttcaaaagtatgtaactctcctgccgcctcccactccaagtcaattttctacttaggtaataatctggtaaaggtaggaaacgatttcatgcttcagtgaaattgtaaatgagtgtccggctacatggctctctcttgctcactcctcctctggaaaagaggcagagaagccacaaactgacgagattagagctagcaaggtccctgcttttgggcttaggcagagagggcacagggccagactggccttgctgcttggacccccaagctccaggtagactgtacaccgaggacctgcctaagacactgctgtccaaacctgcagcccacagtccacagggctccgaggctatatgaggttagcccttctgggggttggggtgagagcactggacgcagatccaggctgtatcctggctccacctccatcctgtacctcactattattttcttgtaaagtgagatccccatcctactcaggcctccacaactcacttgttggcaactatttcctgagcacatcctcgaagctgggccctcagatgcagtggcacggagcctgagagactgcgctgaccgggtctgagggaagctttgccaacagcctggcccgtgactgatcggaattgcctaatctgaattccagaccctgcgacatttccccaaatcttgctgtgattgctaaactctcactccagtttcctcactccagaccacccccttggtgatcagacaatttcccaaatgtggctctgtcccctcctgccccaccccacagtgtcaggacattttaagaggcatttgttgcctctggtctgcagaccgtgctgggggaaacgtggagagccaaggaccaggaagaattctagttcgagccctgggactcctaagcccatgccctctccactgaggtcacgttcaagggccctgatgctgaggtttggcttcagttccattgtcaacacacttgtgcttccaaggacctccctgctctaggtccctaggcacctcatcgcacctgccccctgccccaccctggccctgccagaggggaggctggttctgagcttgggctgaacggcagcttgaatgcctgggcttggacactccaagtgtggggtgagcccctctgggattcttcttacagacagccccagctggaatcccagctcctcaccttagtaactacggccctggaaccaacacacctagaactaactccactctggggcactgtgttaactgggctgcctgcgagagtacccaggcagagactccctttggagggggttatgggcaggacaaagcaagactcaaaagaccgagaaagccaaaaagcagggcaaattgaaacagggcagccacaatggtccagagaaggaggcagagcagtgacctctccaagccaacagtgagcggcaacccagggtcccagagctgacagataccctgccaaagtcggcaccaagaatgcctgcctgctgatgcagatgctggcaactcatgtacacgcccaggcaggttcccaccccctagacagccgccagcctggggcacctctgtgccaagggcggaagcacctgcctagttgtttccccggtttgtcccatctccttctgggcagcgcctgcccctgagccaatcttccactgatggcagccactcactcaccgactcagcctgatcccaagtgaggcactggagccccactttacaggcaaggatgctgaggcccacacagcttctgggcatgttatttgtgtactgtctcccaaactgcacaggaggcccagaaaggcaggga

SEQ ID NO: 62409 - DNA, 1031 bp, Homo sapiens
acacaaacatgcagaacagaacaaaaaaagaacaaatgccaagcactggccacttactggtagtgaatttctttctccctgttctccagaagctctgttcttctctaggctgtcaacgctgatgctgaatcagaatgagaatgcctctcaattcccaaagcccaagacacaactctttctttacccgctgacagagatgagagcaaggggagcatagttggcacaatctcttcagacaacaattgggaaacatcttacaaaatgacaaatgcatgtgccctctgccccagcatttccactcctaaaaatttcccttccatcatgcctgcacatggttacaaaatggttacacaccgcagcatggttacaaaaggaggggctgcgaacaactacaatgttcacgaataagaggcctggtgagataaacctgggtacacgcacagagtggagttccacacagctatctaaaaaaaaccaaaggggccgggcgcagtggctcatgcttgtaatcctagtactactttgggaggccaaggtaggtggatcacctgaggtcaggagttccagaccagcctggccaacatggtggtggcgggcacctgtaatcccagctactcaggagcccgtatcccagcccgtatcaatgaacttttgtactcagtggcattcccatctgacagcctgtcctgcactttgaatggattgtttacccatgtgtgattctgtaacatcaggcatcggccatttggaaaacatcggttcactgagttatgcactctggagagaatgagtgaaaagggcaaataatgttttagtattaccacaaaaatagttttgaccttgtggactctccaccaagagaatctcagggacacccagaccacactttgagaacattgcggtagcggatttttctttttttgttttttgagacaaagtttcgttctttttgcccaggctggagtgcagcaatggtgtgatgtcggctcactgcaacctccacctcctgggttcaagcaattctcctgcct

SEQ ID NO: 62410 - DNA, 2169 bp, Homo sapiens
agaagacaactcacgctttctgcattttcaattcctggacatgtgatgctagagagcagagactgatgtatttcttttttctttttttttttttttctgagacagtgtctctctctgtcacccaggttggagtgcagtggtgtgatctcggctcactgccagctccgcctcccgggttcacaccattctcctgcctcagcctcctgagtagctggaactacaggcgcccaccacgacgtccggctaatgttttgtatttttagtagagacgaggtttcacaatgttagccaggatggtctcgatctcctgacctcgtgatctgcctgcctcagcctcccaaagtgctgggattacaggcatgagccaccacgcccggccaactgatgtattcctatatcctggtccttagcagagtgggtagtatagagcaggttctcaatttcatttaacaaagtttcaaccttctgggcagtcagaactacattgcttacagctttggagctgccctggcagccaggtacaattatctgagcaaaacccagcaaagtcctttttttttttttccacctagaggaaactccaggcacaggaagtggttcagacaaagccacccagcaaccagggtaggtgtgtgtccacatgcaaacgtgtcttgctttgtacaacacagcaaaggaccatgtgcagtggcccctgcctcagcccgcagcagcctcccacggcttagctaaccagccaaaccctggcattttgcttgtaattgtacctcccagtaaaaagtcctggttggagtggtaaaaatagcaactgcaacttcctgcaacacagatataccagttgatgcctgaaaagaaacctggtgattcgacctcactccaactcagcgaaatgccttcaagctgcgctcacaatggcagtgggacaggagcccagcaaaggcagccgacccacccccccgccccaggaggacccatgcaaaaccagctctagagtgagatgcttcccttactctcttaatgaaacacccaactctcagaatcaggaggtgtctaataaacgcaaaaactgctttcagcgaggcccctcccctttcccttctcctgctcactagctgcagaggtataaaggcagaagccctccctaccaaagccctttgagggtcccattgtccccttggttaccctctcccttccccctacctacatctgtccctgagattgttccaagtaggtcaggctggctgggatcacaggagcctcctctgaagcttggttctgagtcatctccagggcagcaggggagtcatggccaaacctggatgttgcttcctgaagggtggggagagcctggccaaaacgtccccaggtacccagcagtaatgaattcctctggggcccaggccatggtcagcagttccctggctcctctatcatggggcccgatgcctcctgggaccacacaggcaagtaaacagggtttagtctgtggtggccactgcccctttctgggcctttctctggaccagctacggaactctctctgtcctcctggctcatttctttattcctgcagacaggtgacagatcattgactaagccagccctctgagaagagctctcaagcccagccagatggctctcagccaggtaaggccccgtgcatctctgggacaataggcagacacctcccacctaaggccagctccactgcacaagggcaaagtcaccccagctcctcccctggatatgctggctgtttagaaacacctgaattcactcaaatgttccagatatttccatttcgctagtaaaaaccatgcctcttcatgtttgcagagcttttcagcataaaatgaactttcaggaatgttttcccatgcaaaaaatacagcagcctagtggggggcaggggcgggcagggattaaagggcttcatttcacagatgagtacccagctgaggtcaggagaccaataagaggcagaaccagcactcaataaactttgatcttctggaaagacaaaagtggactagaatcaaaggacaaagcctgaataaacattttttttaatggaacaatgagattccacccgcccccccaccccatcacattagctaaaactaaaaatgtggataacatcaaaaatttgggggctgggcgcagtggctc

SEQ ID NO: 62411 - DNA, 2122 bp, Homo sapiens
aaagactgactacgtcaaccttcacaggcacagcttgtggacccaagagcctccggtcttgggacaccaaatggaccctgaggtggggtagactttgtgtcctactcttccccagacccccacgcaagccttcaccaacatgccaggaatcctcacagctcagatcagcacactgagcatcagttcctcctatgaatggggagactgggacccagggtcccagagggcttggccccataacggtcactggaatctggtccaggatacagaccgtggaatcctgcctcctctcctggtgctactgctaacttccttcccttcctctctctattgggccgatagagtggaaccaaatggtccagacacctggcattctctgccctgactaccgaggagagtcaaagtccagcccgccttccccaaggtcaaattcaccgggatccagcaggacccaagagcgtccagattaaatctgcaggggcctgggtccgccccctcacccacagttcgttgggtcaggcctctagagagatgtttctttgttcaaagacaatgggaatgcactttgggggcttagagcagcaacacaaaaaaagtatctggtatctcccgggcacaatcccccaagagaaaagcttctaaagcaactacgaaagagacagggggagtgggggcgtaacatcgcgcggtgtgtctcggagccagggcaagtgtggtaattagagtcaggctagagggcttgctctggacctgccagtctggccgccacccaggtggacaggtgggtgtgcctttgagtgcgacctttctctgccgctggacagttctgcaaaccgaaacgagggaccctggcaggcggaacgtgaacggctcggggctccgcggccaggcccgcgcaaaccctccccttgtgaaccccgggccctcgctctgcgccaggcaggcagccatccggcctgggcgtccaaggcgcggggcatcgccgctcgcgtcctcaaagacaagcagtctctctttccaggatcaatagtaattttttaaaaaaaagagtctgcggactcaatgaatcaaccactccctggggaaagagtagcggctcccgcgcgcaacatccatttgccaaacaattcattccctcgcgcagagctctcggcgaattccctcgcggagccgcggggtgccggccggccgccgctccccaccattgtcccagggccccggccccagccgcggggccccctcccgggacacgtagtcccgcgggggctccgagcgcttggtcccggcccggcccggggtggtgagtccccagcgcagggagcgggggcgcgggtgctgcggccagagcacggcgtccccgcccggcctggatactcactgccggagacgatccccgccgccgccgccgcctcagagaccactcccggcagcccgcgcgagctcaacaggctccgccgcggctcccgtcggccggctctccacaggcaaaaacgctctcgctgcgatacagcctaggcgccgccaacaaactagtttctccggccttcccgccccgcctcccggcccgaagagcagcagccaatcagaggcatcgcctctgtgacggatgggcagccgaacccttcagtgcagccgcagaaaagaagggggtgggccccaggccgcgccggcaccggggggtggggggccgggggcggggagggggggggaccgggggcggggcggggcgaggaaaaggacttcgaccagattcttaaagagacaggcgcctgcccaaccccgccgcccaagtttgggaacaaaacgcgacggtgttctagagctttccagagggagcactgtagattgcatatgcctcttttgtgttcgggtcacaagtgttgtagatctctttagactcttcagagccacactagtagttgcccgagtgttaatgaaaccctgtctttcactctgggcttgtttgaatgtttgggactttctgcagcctccaaaccccacctgtacttgaaatctgtattttttggagtatttcagctctcctctctgtgtcatttctcactaaactcctttcgtaagccagcctttaaatgttcgttcattcattcattcatccatccat

SEQ ID NO: 62412 - DNA, 687 bp, Homo sapiens
ccaaccaaagcccaaatcctattacaggttcttcttaacatgcttgaactgagatgccccatggttaccctatcatgtgtggtctccctcgcaacaataagctcaagttgttcaactacaggtgtttctgatggagggcattgacaataaggtacacagatataaattttatttggggggagtgggatttgattggctgtctcctcttccaaaatgtaagtcccatgagagcagtgcctcatctccagacctggaagctctccatatttatccagtgaattcagaatgaactcaatgtagcttcagaggtagtgtccaccaccacaaaattaggagattctgatcttggtgttggatctattcaatcaagttttcaatttttaatctagcatccccaaagatggaacccactcagggcaaggcagtggcaaaaagtggctttgtcagcttcagttcccaagggaggagccaggtgtcagtggttgccttcctgggagagcagccaggattaaggtcactggtgagtcactgctggccctgggcacacaaaggagcaggagggctgggtctggcagggacagcagctgcaggaggtgggaaggtgtcgtgttttcacctggtggcagtgaggcgactgcctgagatagaaaccatcttaagggaggagaccacccctcatattgtctt

SEQ ID NO: 62413 - DNA, 1019 bp, Homo sapiens
aaaaaaagaaaaagaaaaagaaataagttcttatcttttcttcctccactccagtgaattttctcccctcctcacccccacagggtgcctgtatctcattttatttattttttattattactattatttttgagagtagctgggattacaggcaggcaccaccacacccagctaattttttttgtatttttagtagagatggggtttcaccatgttggcctggctggccttgaactcctgacctcaggtgatctgcccaccttggcctcccaaagtgctaggattccaggcatgagccaccgtgcccggcctgcatctcattttagaaaccagactattctgtcaacatctgcgtacttgccagctgcctattttacaagtgcaatttcacttaagcttcattgccaccctgggcgtttctacctttgctttccatatcagatcagaaaacaaactgagctaggctacatgactcattcaggacacacagtgaggaagttaggagcctgatgttgactcctgtgttcgtttgctcaggctgccaacaccgactgggggcttcaataatggaagcttattttcacacagttctggaggctggagttccaagatcaaggttttggcaggtctggcttcttctggggcctctctccttggcttgcagatggctgcctactcatggggtccttacacggtcttttctctgtgctgacacatcctggtgtgccttccttttcttaggaacagcagttctgttggattagggccctgctctgtgacctcattcgaacttattacctccttaaagaccctaactccaagtacagtcatattcagagacactgggggttagggttccaacgtataaattttggggggacaaaattcaactcataagagttcccaggcctatgctctctagtcactgggctgccctgcttggctggcctgagcatgtgacctgaggacacccactacaaagataagtgcccctatggccttccaggggacagccccag

SEQ ID NO: 62414 - DNA, 1170 bp, Homo sapiens
tgttttgttctgtttctgctttctgccgctcttctctgcctgcaaagccaacctcctgtgctcagctcattttataggatgaggtgttgctcacttctagaattgcaaataaaagccaattagatctttaagtttgtgcttctgtcttttgacaaaggttcacaacttctccagccctccacgaagaagctggaaggagcagggtgcacaggctctttgaagatgctgagtgaggtcccagggcacccacaggagctgccacctcagctcaggggacacagctactctgagcccctttgctcatgggggaaagggcgggggaagcatgctatcccgcccccgctccctaccccaaaaaagctgctttgtcttcagaggaccaggagtcctgattgggcagcctctgccgggaatgaaatgcatgtccttcgcacttccactaccgttctattttcaggctgatttataactaaaacgtgaaataagtgctaggaaagcatttagcattgtctgacactgcctcagcacactcagtttcctctctcttcttcatcagaatctctgcccggccaggcagcaggcgctgactctcgcactgtccggttcgaagagctgttttctgcaggtacttgcagtagcagctggcctgggacccacccccgggcaaagtccgctccggagtctgtcacttcccggcgcgggccacccagcccctggcgccctggcgctcagcgctccgcgggcgcgccctctggcggcaagagccctgaacatttcgcaagcggcgaaggctggcgcgtgttatcctgggcacccaccggaccgaatcgctgggcagggctgcaaggtgacttgctaacgcaatcagaccagaaaggagcgcgcgtctaactaagcgggggaggggagaagcatgttcatattttgtaaaatgcaagtggcacctctccccattttcctcaaaattttattctgaaaaactttagtacttaaaagttcaaatgcttttacagtggacacacatttatctatcagctagattctgttattcacattttactctattggtttcattgcatatctgtccatctattcatccctctttccatccttcaaactatcttattttttctttttcttgttctctttttaattttttttttttttttt

SEQ ID NO: 62415 - DNA, 1321 bp, Homo sapiens
ggatcagtggtgatatcccctttatcattttttattaactgcgtcgtatttcattccatcaagtgtaggctgtttccaaccattgctttgataacaatgttgtgatgaccgtgcctttcatgtgtcatttggcacagagaccaaatggttaggataactacccttaagcagactgctgtccaaagagcataggcattttaacttttaattagaatattgccaaattgtcctctgaaccttatgatttttaatgccgtggacaccagacccatccattcacagattcacaaccaggtcatttcctccacacatttcctgcctcttctcctaattttagctctgattgcataatgcctgtggctgatccatagctcagcaggcaaacagttgttatctgaataggggtccaaagtttccccaaagtaggaagaggaggggtgggggaggcatgacgggaacacaaagaggaactaatatgtactgaacatcttccaggagttggagctttccctgtgaatctcatctgagcttcacagcagccatgtgaagtgggtcacagttctgtctctttcagctgagaaagctgtggctcagagaggttaatcaacttcatcaaagtcacacatagtgctatgggtggaattgtctccccacaaaagatatgttgaaaccctaacccctactccctcctcagtacctgagaatgtgaccttatttggaaatagggttgttgcagatgtaactagttcagatgaggtcacatggagtccagtgggccctaagtccaacatgactgctgtccttataaaaagagaaagatttggacttggacacagagacagagaagacagtcatatgaagacaggggccaagattggagtgatgccgccacaagcaaggaatccctccctggggctgccagaaactggaagaggcagggaaggatccttcctagagggtttggagggaggtggtcctactaacagcttgatttcagatggagctgtaagggaacacatttctgttgccttaagtcacacagtttgtgatggtctcttatggcagccctagcagactcatacagccagtaagggccaaagccagaaatgtagcctaacatggcctaaccttgaacctcaagctagctcaactctgtcactcagtgactgctgcccgtgaaccttcagtggagtcagaggtccaggcctgccttagagctggtgggaggaggcaatgaatcagaagtgggtgaagtgattggaagccaaacccagttctgggcatttggtgacccctcagcctcctggaaggcatattttag

SEQ ID NO: 62416 - DNA, 671 bp, Homo sapiens
agggggctcctttagtttagctgtccctaagtggcttatgttagtcagcccaattagacctgtgccttatcacaaggacagagggctttctgtatccccgggttcttgccttggtgtaccgtaagaatcggatcacacatgggcttggagaatgagtgcaaggttttattgaatggagtagctctcagtagatgggggagccagaagagagatggttttcccctggagtcaggctgtttggcggctgaatcttctccaacagtccaggtcaaactccacattgttccgtgggtcaatggcctgctggtgtgctgcagtgctcctacatgggtgcgttcctcttgacgtccagccacccgtgtgttcctccgttgatgtgctcctcttgatgtccagccgcctgtgtgtctgccagctagggtctcaggatttttataggcacaggatgtgggtgtggcaggccagggtggtcttgggaaatgcaacatttgggcaggaaaacaaaaatgcctgttctcacctaggtccgtggggacaggcccaggggtggagccctagccagggaccacacccttctctacccagaacttcccttccctacttctgtatcacacgtgctggagtttcagctgtgatggctaatttggtgtcaacttggctaacagtgccca

SEQ ID NO: 62417 - DNA, 681 bp, Homo sapiens
tttatttgtggtgtctttgtcacattcatatagaaatttcaattaggcagctggaaagttgagtctaggtttcagagaagagctctggacaggagagaaacattggtaaatcatctgttccttggtggtaattcataagcacacatgagatcacagagtcaaaggttaagagtgagcagagaagagggcctgtggctgggcctgggataatgccaatatttaatggccaaataggaaataaggggtctgaaaatgaagacacagaatggataatcataaaggtaggaggaaatcaaggaggtcattttgtcaactaaggcagaaagaaaatgtttgaagatgttgtaatcagcaatcctgatagctgctgatacgtacaataagctgagaacagagaaatactttgaaattgagcaacatgcatgctattgctgacctttggagctgtttcagtagtgtgatcacagcaaaagccagagggaatgggttaaggagtgactgaagagagaggaaatggagataagttatcataaacaacccttccaaaccagtgaacccttaacgtgcaaaactgagccactggcagctggaagcctgcatgacaaactgtggtttggggttagatttacctggatttttcggaatcaagggtgcacttatgggccttgattcttgattctt

SEQ ID NO: 62418 - DNA, 3263 bp, Homo sapiens
cgaaaataagacagactttttaagtcgtattatggtagatgtgagcaacaaagaaaagaatatgaaattatttgttacttaaaacacaaagcaggggccaagcaactgtcttttatttgggaatccaaataccccttttcccttccttctggctggcctaaaaggatcacaacctgttatgcgagctccaagtttgaactgtagaaatttctgctcccacatatcttccaaatcttgcgccagcaatatatcctgttcatcttcttcatcatgaaggtcagctttcttctttgccagtcgctggttttcatccagagcacgaagctcgtggtctgaatacaggcttctctctatctcaatctgggaaaattcaaagggcaaaaaactaccttaatctggcaaaattaaaaggaaaaaaaaaacaggaagaataaaacagagacatggcacacttggcaagctcagaagtttatcacccaacataaccagatacacagtcaaaacaccatgcagaaaggaaatggagggaaaaaaaggtcctctgaactttgggcttgagttacatttgccaaaaatgttacaatgtcactgggggtcaagagtgctacaaaaacagagagctgggttgggcaatgcctgctgactcaccacaatccagtcatgtcagtctttgatcagaatctcactcaccaaggactttcctgttcagggactttcaagaggttgttccttcttcctagaatgtttttcctcacattctttcttctgggagagtcctactcatctttctgatttcaatttaaatatgactgtctcagagagacatttctcataaagagaaaaacctgtattcagaaagtctgaggcattccttgacactcaccataaaatcaaaatgtgatgtatttgttaaacactcttatagtgccttgtgttttccttaacaacacttatcagggtctgcatttagttgtatgattatttggttactgactgatcccctcactcaactagactgaagtactctgagaaccagagctacttctgccttattcattacagcatctctatcacttaacatactctctgatgcatagtatgggcacaatgaacatctgtaggttgagtaacaaatatttgtcaagcgagcgagtaaatgaataaatcaagcaaaaagcacagaagagaagtttatagttctcaacagaccaagacaaaaacatctcggattctgaggaaacatatcacccttcaaacactttctgtagcgacctcacaccttcacagccactacactgtttttgcccatgcttcctcacttgcccctcacacagatagccccatgagataaaacagagtaggcttatcataggcatctgacagatgtgcccaccgcctcttgtatttccttcttaacattcatcacatcacaaagactttctccctccagacttgtaagctcctagtgacacggaccgattcttgttcaccacaggatccctattgtgttgcatgaacaagaagtagagtatctccaaagagttgtctaaggtgacaataaacacggccaatgaaaagaaaccactttttgttgaacatctatgtaccaaaccaagtcagtaaggtaggtaccattctgcggataagtaccgtatacttaagttcagagaggtgaaattactcgctcaaagtcacgcagaataaacgtcactctgaaccctgcatctcagtcccacctgctgcagtagagacgccatctcttcctgcaatggggtcaacggcttggagactacaggtggccgctgcaggcacaacgcgcccaacaagcgccatggggatccgttgcttgagggtgcggctgcaagagccaggctgcgagagcttagactgccggcccagagcctctcgaaccgccgccaaccccccgccacccctaacagcgtccgccttacgggcgccgccatctttcgttctcccacaatgcaccgcggctcccagggatccctcagccgcgggagcggcaaactaggggaaagctcagtcccggaactgctagaacgaaccattcgcatatggagggggtgacccaccatctcagaacattaaaaaagggaaagaatcccctggtgaactacagtgaaagtcttattgagcatttaaatggaaataaaaatattcagtggacctaatgaagagtagatgactttcccttctgtcccctccccgacaggcactcatggtaccggcgccggcgcagctgtgactgtcgctgcagacggaaactgactggggtcaattcaagtcatgcaggctgtgagaaacgcggggtcgcggttcctgcggtcctggacttggccccagacagccgggtaacaaatgactgccccctcgagcccaccgccacctccaggactatgctcctactcgtgtcccttgagccacccgggccccagtgaccgttaggccgtggccctcaccgagcttttcttcccagcagggtcgtggccagaacgccggccgggaccatctgcacaggcgctcgacagctccaagacgctgcggccaagcagaaagttgaacagaacgcggctcccagccacaccaagttcaggtgagccccacttggaccagccctctggagacccgcaacccctgactcttgcccgacaccctccagagtcagaaccagtgaattttcagctatgtcacttgctatccgtgggaccttatgcaaataaatctgagcctcagccttctcatctaaaaatgcggataatgctgagagaggttgtgagaatcagatgagccgtggtacagagtaaatgttcagtgaacattcgttaaatcaatgagtgaatgtgagatatccataacatgtatcagcgttcttttcttctgagatggagatcttttcagaccaataaccttccctgcctccaaaacaaaatggggaggtagagggcgctagcgatggaacagatgttcctgcacgtcttacggatggtccagggtgggttttgtgctcagccctaggaactggcatcttgcttcccaccagtgccaccacctctgtatgctgtatacacatccacttaacttcacatccatttaacaaacatttaccaagaatctactatgagtgagacaccatgctaggtgccgtgaatacagatacaaaagatcattcctccccacaagtagttcacagtctttgagggaagacaaacatgcaaacattttaaccataatctgctcaataatat

SEQ ID NO: 62419 - DNA, 1342 bp, Homo sapiens
ctgtggcaagctatatccacagtccccaagaattcatctgattgataacacccaaagccccacgtctatcaccttgtaatagtcataaagcccctgcacctggaactgtttactttcctgtaaccatttatccttttaactttttgactacctaacttctgtaaaattgttttaactagaccccccctccccttcctaaaccaaggtataaaagttaatcaagccccttcctcagggccgagagaattttgagcgttagcggtctctcggtcaccggctaataaaggactcttaattcgtctcaaagtgtggcgttttctctaacacccctgggtacaacacactaactcactgtgtggtactaagtcctttacccttgctgggtctcagtttccctatgggagaaggtgcacatgtccctcaattccttgcgacggcctctaaaccagaaggggatgccaaggggcgggcacacatacccaaaagggcgcccccggaaagaaaagcctggggcggggcctcaaagggaagagaatgctgagggagggcgggggccgcggggcctctgggcatcagcgtcatgcagggaggagcctgccggggagggtctgacgggcttggaggctgggccaaaaatggtaagtcctcacctgtctggtccgggctcaaagagccagggcgagggatgccccagcctgttctgtgcgcgcctccccctgccccgcccccgccatgccccaggactcctgcacccgcggctgcacgttcccgtttccgccagccaccggaactgcggcccagcaaaaagggaagtaggggagagcacggcactgttcagccaacactaagagacaggtacagcgcacccttgtgcccggaggaaggatcgaagccgtagaggctccatggctccgaaggaaaaattaaaatggcacctaacctggcaatctctgtgagtcccaatggcagtgtctctgcacctgctgggcacatttgaaaaaatatgaatagaattaatttttcacctattgattagatgctgagaaacttcctactctgttatcttctagatggcgagcaccttgaagactgagattgtattgatcatctctgactaacagggaatttgccttgctagttttaagatggagttgattttaaaatgatgtcactctggctctcgtaggctcctgcttccctaacaaaaagaccttcaacatcattaattatcagagaaatgcaaatcaaaacaatgagatactacttcataccccttaggatggctataatatctttaaaaggaagatatcacatactggtgaggaggtggagaaatcaaaag

SEQ ID NO: 62420 - DNA, 1354 bp, Homo sapiens
tgtgagatggagtctcgctctgtcgcccaggctggagtgcagtggcgcgatctcgggttcacgccattctaccgcctcagcctcccgaacagctgggactacaggcgcccgccaccacgcccggccaaatttttttgtatttttagtagagaaagggtttcactgtgctagccagatggtctcgatctgctgacctcgtgatccgcccacctcggcctcccaaagtgctgggattacaggcgtgagccaccgcgcccggcctcgtctgtgttttttcaagttcagcatgttgagtcaaggctggggaccactgaatgaaggattaattttatatgtgagggaactctagtctagaatggagcaaggaacggcagagaataaaactcccctcgatcaaatccctccagtcttccattaaaaaattagccgtgtgacacttagcctgggcctgagaatcccggacattctcaggagttgggggagggtacaaaggtaccttaattgtcttggtgccaggctgtgtcctggtaggtccaaagtccagctgctgctggatcaagagagctaagaggcggggagctgcgtgcataaaacaagtaccttattcacatttagcactgggaatgtcgtcagcttcatactctccaacacaatggatcctaaacttcggcatgcctcaggattagctatttcatcagcttgttaaaatgctgggccccaccccctaattttcttaatcctaccccttgactttctgggcctcatcccctgactttctgggccccacagcctgattttctgattcagtaggtccaacaaactcccaggtaaatgcccatgctgctgggctaggacgacacgtggagaacaattgctctaaaaattgagcagatcaacactctctttcaagtctgcacctggcccagcaccatggggatccccacagtacccccaaaaagtcctcagaatgagtacacagggcaggcagaatggcactctgactgtagcataatgatttgtaaatgcaaaacaggtcaagtcctgtctcaagtgttttcagattgaaaatgcggagggggaaatgatggggtccttgaagtcagagcttggatcatgggtttttccccaccaggccccagcctaaacaagctctgttataaaggagccctcgtctttgtggaaggaggcgttttttgtttttttttcttcaagatggagccttgctctgtcatccaggctgaagtgcagtggcgccatctcggctcactgcaacctctgcctcccgggttcaaatgattctccttcctcagccttctgagtagctaggattacaggcaagtgtcaccatgcccgt

SEQ ID NO: 62421 - DNA, 3962 bp, Homo sapiens
tgcctactgtgtatattatttccttgaatcccagaacacccgaggaggtaagggccgatgttcccaatctgcagatgtgggtgtactcagtaagtcattcggcctttggtggtaccaggcttacaggagcccacatcccgacccaggtagaggagtggattggagccggggaacactgatgggaccgggcagggacgacaggaggtcagtctcccttcccttctctttaaaatttcccgccagtatggccggctcgcagcacgagttacgccctcttcaggagtccctccccttctgctctcgcccgcctccccgctgccaggcaggctcgaccaatcagaagaggtcttgggcgggcgctgccgtccagcgagccaataggcgggcagtcggagccgggcttgcccgggcatgtgggagctgccggctttccggacgccacgtgcagaccggaagagacacgcggggcttcaggtgagatccaggaccctgcaccggggcggcggggtcgggcgggctgaggccgcgtgtcccgggtcgcaggtccccgcgcgttgtttccgccccggcctgcggcggggacgcctgaactgggctgaccctgccctaccggcccgcagaaaagcaggccgggcgccgcctgtctccagccctcgctctgctcgggggtccagggccagagggggcggcgctggtcgttgggactcggcccagctgccgcggccagcaagtgaccaacgcccgagtccttcccggtgagatcaggcctcccacgcgtcacgcctgggagaacgccagccggcggggaggtcgtgccaggatagcagactttagttgttgtcgttgttccgtggactttttagcagcacaggggaccttatcgagccaggttttttcaggtttgggcgattatcagaattgtggcttgagggtaggggtcgtccgcgctctttttaaaaatctagattctcaggcccctttccccaaaatagcaattaggacggtgtgggagtgggcctgaaaatcagcctttcatcagatgtcatatggtaattaactacatttgggaagcccttatctaattcacagccctcggttgatggtgaagagacgtgacttgccccagatcatctagctacttagtgccagaggagggtctagaactgccctctgccctcttgatcagccagcaggttggtggctctcatgccaccgaggattctgacttcttggttcctttggggcctttgctccattgactctgcagctgggaccctttctttaggccagaccccctccctgcctgaaggccgggtgtctgacccccagagcgctgggtccaggctagagaaaggcttgtgtttgtccttgttgaaagggttgttttatctgagcggaacttctctccagcttcactgagctacatttgggtccccaaagaggtgtgtccttgatgactgttggttttgacgtgtcagcatgtagcaggaggagccgcggacaaaaccccacagaggtagtgaaggaattggcttttaatcagctggaagcatcggcagactagcatctcaaaatccgagcttgttgagtgcacagtttctgtcccttttaaggactcacaacactaaagattttacaagaaagggccatgattgattgagcaatctagggggtatgtgacagggactgcatgcaccggtagtcagagtgaaacagaacagaacagaacaagagatttcacagtgtccttctatacaatgtctgaaatctatggataacatcggttgctaggtcatgggtttaattttaactatcaggctaaggtcaggcaggcccaggcctggttttgggtctggttttgggtctggtgcgtggcgccgggctgcctgcctttggttttgcttccttgtttcttcttaaaacaggtactgagtataaaataatacagaacaatatgagggggaggtctctttctctcttctcttaagcaaggtcagggtgtttggaaaaggactactttcctctcttgaaataggaggctacagagaccttttctcagataacttaatttctggcttctttaaaaccttgccagtaggatcaggaaagccacccaccctactcctagcctcagcccctcacagagaaaggaggggactatccgccagccccctttcccaaattagttattagcagggtgggcattgggcttcttaggcttttttctcccattgctgggctgaggcagattaaggttctgaatttgtcagttctaagatgtgactgtcaatatgaggaagttggttacagttaagacctttttaaaagagagaccttttctcctggaaaggatgggatgagcaagcagggtggatgagtcaggatgggtcaggtctggatgagtcaagtcaggatgcggtgccctgccctagagtgtggggattctttatgcaaatgctggcatcatcaaacctggcatttcacctcacctcccatccccttcccatttctcttaatctctgctgctactgctcaggttttcatcttctccagacctctttctacacccttctgaagaggacctgccacatgctagcttctaggctggctgttggggaaggtacaatcaaggctctaacctgccttcttacagctctgaggtagactgtgtgtaccaatggactttgaagggtgtaataattctcaaattgtgctataagagctcagcacagagggatgaatttctttgctccccagctagacttagtgtcctgagtcagggctactgtgggatatttcagtgacctccataggtgcctctggggctcccccactcacttggccagtagagaccaattcaggggacaccagattgcggtaggggtggcttgtggaagggccaccagagtaggaaacagaagatgaaatggtgcaaaggagagaggagcgaggagcagtgcctccagcatgacccgccttatgctctacaccccagtgacttgaggctgctggtgggccctcttcctccaccctgggttagtcctttttaaggcctttgcccctaacatggccactgattcttctcccttctacctggaaggttactgttgtacatgcacacagatgtagcctcttccaggaagcctccagagaattgtcctccagcctgttttgcctccctagcacctctgcttcagcccttaacacactttatgcttggtttctgtctccaccatgaaactaaacttcttggagtccaggatccacctgtgcagccgcccagcatctggcacagtggagacccgagagagcctcagtatggcattggcctgtgcaacccagtgggacagagtttcttccagaagggcttctgggtggtggcggaacagtagctgagtctgaaagagcaggagggctgtgagtgggaagggaggctgtggcttgggaaagggcagtgagtccaggcggaggctgctctggcctgagaagagctggctgccaaccacgggctagagtctaacctctctgggagaaggagcagtggttattgagcccctactgttcagaatacaggaagaccccagcatacattgtgtcgtttcctcttcacacagtagagggggtggtaggatcattttacatgcctgaaaactgaaacttagcagtttaggtcatttacaaagagctgagttaggccgaatatggtggcccacgcctgtaatcccagcactttcggaggccaaggcaggtggatcacctgaggtcaggagtttgagaccagcctgtccaacatggcaaaacgccacctctattaaaaatacaaaaattagccaggcgtggtggtgcatgcctgtaatccagctacacaggaggctgaggcaggagaatcgcttgaagccgggaggcggaggttgcagtgagccgagatcacggcactgcactctagcctgggtaacgagaac

SEQ ID NO: 62422 - DNA, 2772 bp, Homo sapiens
ctgtctgaggagcaccacggggcactggggggtcctatggggattgtagaatcaaacctatgattggatctttagggggttactttttaagtgcatgtttccataaagtaacaggaatgttacttcatttcctcctaaatcagggtaacctttatgcatttgaaaagcataaagtccccacacagtctgaattaaagcaaaagttgcttattcaggatgggaatcaaaaactctcacacctcaaatttgcatccagtgaacagtaagcaggagcagggctttctcatgaagacgtatttcagtctttggttttatttttgaggtttgttaaagttgggcatccaaatcccacttggtgaaaatactacagacctggggaagttacttttcaaaccacagatcttcatgacactgggaggcagtcagattggagggatcagtgtggattctgcacagatctggggtaggaggcaagcgtgggtaacgctcagcttattgttggatctcaccacagtgaaagacaagcacttccctcattgaaagttgattttctttttgccccagttgtaactcatttgacattcactaaataccaagccctccctatctggcaggcactgttctaagagctcaaagtcctagcctgggagagtgtggacccaaggaagtgtggccgggctggtggggcctccccgaaggcctgcttctccttcaccctcacagagtcagccccactggaggcagagctcattgaggcatctggaacccacggaggcctgtaagggctccctcgctgctccttgccttccctgggttggaagtgggggctagccactcccaccacaagtttctcctgcccattccaataaaagcctgtatgtcccaagagccagcttccctaccccataagagaccactgagtatcagactggtagcaggctccagaagttagttgtgggacattccctgagctccagtcctggggatgtttattctctgggcggagggtgagaaaggaaacaaagatgttgcaatccactccacgaacgtcaaatgcgtcatctgaggagggggagggccggggcaaaggaggggcaccctgacatggagcctgccagctccgtcagccctgactcggcccggagctgagctccccacctgccggtagcccaggagatggagcagcccagcccacgtgcccggccttccgcccctgacttcacttgataacaaactagaaactgaaacagggtcgggatgccgatgccggcttggagttagagatgagtcaccgctgagagcagctgcagtagctgagcagtggcagcagagaggcagacgtgagctgagggcgcagaggcaggcaggtgagagcgggagctggagcagcagctggggaggcagcgggaggggccttcccggtccccaggctgcggggcaggccagaggccctgggacacacgggcagggtaaggcaggggatgggggaggcaagaggccagcttccactgtggccaggtggtgtcggaaacaaagggcagggcggagggtaaggccagctggggttggctgaggacacctggaggcttggtttgcccaagcgtgagaccgccccccatacccctctctccagcatctctgagggtccccaaggaacatggctgggagccgtgaggtggtggccatggactgcgagatggtggggctggggccccaccgggagagtggcctggctcgttgcagcctcgtgaacgtccacggtgctgtgctgtacgacaagttcatccggcctgagggagagatcaccgattacagaacccgggtcagcggggtcacccctcagcacatggtgggggccacaccatttgccgtggccaggctagaggtgagtgaaggcccggccagcaggggctttggaaataacccctctcccacttccctggcccctcttccctggtgcccatctgtgacctgtgaccccacttgtaagatttcccacactgctgttgggagaaagccggtggtgtctccatcacatcctggagaaggcttcctgtcttcagagaaccatagactcacatctggaagccgcctttggggcatctatctggatctggtccaacttgccggtcttaaaatggggaaactgagttcccccacacagtgacttggggtctacattccccattcttccctctaccccaggctgccactggtgagacctgtggggaaatgagaggattcttggctgaggctctggcaagaggctttggccctcccagtcctggagaacaggctgagcctcgggctgaggaccttgctctcaggctagcattctgacccagagtaggctgtctgctcagtttgaatcctgagttcgtggtccagggatttcctgcactcttgctcttagctgattgtgaggtcatctccccgtctcactttctgtttctctgaattactaagtggaaagcaaaacttaaaggtgtcaacacggttagccacccctgggaaatctcagaagggcaggcgagctcgtcagtttctagacaccatggtagggtttgaggaagtccaagaagaacacaggttcctcagcagcacacacccaatccgtgccaggctccaggtgctggggatgaaatgacaacaatagctactattgactgagcactcactatgcactggccgctcccctaagcactggccattcctgagctcattcactcctcacaaacagccctgccaggcaggtcctcaggaactgttaac

SEQ ID NO: 62423 - DNA, 1399 bp, Homo sapiens
aatgcatggtagaggcagcaggctctggactgctcagcgggattcagtgcagagatgtgcagacttgttagatgggaagaatcccctgaaacagttgctgacacccctccctggatatttcaattcagtaggtctgtgtagggcctggccctcctggatttttggatcaggcacatctgggaaatacttggagtagagtggaaacacagtggaaggtgtgtgcaggcagacagccgcacctggtctggcactcccctgcttgtgacctgggtgcacaccgccctgcgccccgctttgctggcgggtcagatggtatggaagtcaccgccttgcaccgttatcattgtgtgcctggtagtgccctgtcccttggtccttgtgctaataataacaactacagtaacaatgatggggtcaggtggatccagacacggcactgcagctttcagctgactagctgtgtgacttgggcaagccccttaatctctctgatctcgggctccctcctctgtaaaatggaattaagaataacctcattgaggagcttcctgaggaggtaaggaaagtgcctggcacagtgccaggctgctaagagatcaataaatgtcccatcccccagccccaccccagttctttccaggaatttgagagactcctccccctgtgtttgaaagtggcaaagtctggcacacttgcctcatgacactgactcagggcaggtcctgtggccagcaggtcacacagccccgaggccagcctgccagtgcctttctccgactcctgggctccagcaggtgcccgactccttcccttttcagacctgcctcagtctgtggagccctggctgctaaagggccactcaagcctcaccagtctgggccctcaccttacaaatgggaaaactgaagcccagagagggtctttgacatccctgaggtcacacagcaagttccagcatctcttccttcccagaatctttgtcccaaagagtggtgtctctttgctaaatagatggttctgttctttcccttcttcctcttctttcctcggcttgtcctctccctcttattctatttgtctcgtggtgagtcacatagtgcctcatgtagacccccacttcccctctccagactctcaggctcgggaagtgatgggtttcctgggaatccacaccatgatgactcgtaccttctacgtctgtgcccagctgtggctgcctctgggatggtggatgagttccttcagggctttgtgtgaactgggcctgagccaagcccctagatggggaaaacaggccacattgttcaggagcacaaaggatgttagcaagaaaagacacatgacccatggccgcccacacacccacatctctccacgccccgtgccatttctgcccgcc

SEQ ID NO: 62424 - DNA, 665 bp, Homo sapiens
gtgtcagggactccagggagaggcacacagacctggctctgtcctttcccagtagcctacatttccttctagcagaaggcaaagtcttatactccccactgaaacaatacggctcaaaagggcccctggtggaggaagcatacctactcaagttcatactaaaaacactgaacccagccaggcactgaactcagctctgaggggtatttgggtggtgtctgaaatgagacaacaggaagaggtgtcacagaggggaaaggcggggcacaggagggcaggtaagatcaaaaggccagcgggtaagataagaacctccactctgcagctctgcttagcgagccctacagttccactgatggccagcaggtggcattgtggctgcaaagagagagaaatacccagacctcaggaaagctgggttgagctgggctgagacaattaatgtctgtcagcccaaacccggcactctgacctcgcccaggctgtcccctggctctgcagaaatctgtccctttatggtctccccagctcttcatctgggaatctctttggaaaaggcagcaggaagcaccagctccaagccctgtggtccaagaagcccctgtgtttctctggagtgcagactcttaagagtttggcagggaaagctctggatgggtgtggtc

SEQ ID NO: 62425 - DNA, 703 bp, Homo sapiens
attcccttccttcatctccacttccctttggggtttggcgcagtgatgatggggtttctgaagatgaggtagggcaggggttacacagtgaccactgggaagttggggactggccgcctctggaactccaaggattgattttcatggttagcaaacagctgagagttctttgggaagcttcaatggtgaaaatgctatttttggtaagagggtaagaatacagccccttcttgtttagccatggtcgtggaatcacggtgggggcgtgcctggtgcatgggctcctgagaggcaggccccgttgggctcacccccattcctgctgccattccctccatggcctcagggtggcgctgctccctctccaactggggccatctattgccaccatgcggcttcccagtgaaacccgctattaataagaaggaatgaaaaaaaaaaaagaaagaaacaaacctgccagaactttccaatcacactgtcctaaaagctgaggactaagaaaacgaagatagattcaggggacaccgtgagtcaaaactttagtttgccaggtctgacttctttcctgcagctcttcgccctctacccagtccatcagggaccccaggactaggactccctagctccccacttacaaattaagcccaccaacatttgtggggcgccaggcaagagaacgaatggaagctcacatactcta

SEQ ID NO: 62426 - DNA, 7499 bp, Homo sapiens
ggcctgagaagctatttctgtccacactctgtgatgtctacaccttcagaatggggaatgggtttcaggggtctctgacagatagagctcatgcaatgatttctggtccggtgctgatcagccttcaaaggatgttatttggttacgctccataaaacttgagccagcccactgttccttgtcacaacctgaaatatgttgggaaaaatttacatggtaacaaatgccacttcccttctctgactaaatcgctcctctcatttcatcccctgctccctctctccgagccctatggggccttggtagggtggccttgtctgccctacaggggttgcatttcaagtcgctcaagtgttctattcttggtacacgacatgccattgcaaaagcagtttcaggctcatagaattttagaaatgggcctagtttcccagccggatgaggtgagtgggtgatgggggaagaatcagccttgattgaatgcctgttgagtgccagccactgttggcatttatcagagtttatttaatcttctcatcaactactattgttaccctcagttgccaagtgaagggagcatgcgggaaggttaagtgacttgcccaagcccacacaaccggtaggagccccaattccaggccctagttccaaggctacattcttccaggcggcctccaactgggttggttaagggttgaaaggacagtgggacaataactgaggcccgtattgcccagagcgtccccatcccccgtccggagctggaagaggccatagaccgctgcctccacatcttttcctctccttcgggttcggtgactcacgacccttcttcctctctcccgggatatgacctcaaatttcacccctgcgaaatttgagtacacgtgagtcagtcagtcggcctggacccataagagccccagctgagctaccagcagctgagctaccagccgacctcattcctctgagcccagtcgacagctgaccttacccagccctctaaagcagtttgcggtcacaattacccgtctcttcaccccgcccccatcgacatcaaacacgacccaccttctagccctcctcccctttccccgcccactccgggctggccttatccagtagcgtctgggtccctggactaaagccgtcaaatgtaaccaattgctgaggagctctcccctaagaatcccgcctccactctgaggaacagcttcgctgatcaatggatcccctcctagacgcaatgagcgcgcggggcaagtggagaagcggctgaactgcccaatgaacaagcggtttccgtggttaggggcgtggcagaagcggtcgtcaggggcgtggcggcagttacttgggcggggccggtagcggcgggagctgcactggccaggggttccggctgtatatccatgagcgccgctggcagccggggagctgcaggaaccagactgggggcgagctgagcacctgtagtcaatcacacgcaggtaaagccacggccgagcgagctccgcggagcggggatcgcaccccggacccgtcgaaccgaatctccgagccccgaggtccccggcgtagctcggcccatcacgccgcagcctgaggggatcctggggggcctgtcatctggcgccgtgggggtcccaggggctggcttgcccagtggtggggacagcccagatcgcggcgggggatacgccttcctgaggccctttgtccccttctgcccgaggaaccgaggttggggacaaccccgaccgcggcctttcccccattggtgctcactcctgggtcttcaggggcctggggaggggtctgccggttcaggctcggcgaagaaggtccgggatccgcacctggaaggagagggccgaggggcctgattacagcccgagatacccgagaggcctctgtgtttcggggctccaggggctcacgcaggaccagtgggtttaagttctagaaaggcagcttttgacccacttggaagcacatttaccgagttcggccccgcgaccggcactgttctaggcccttcgtgagcttttcccacagctagagctgtccagcagcgcaggaggctgcctgccaggccgggcagctagcgcctcgaccttggcgatgtccaagcagtggcctgatgacagccacctgtgtcggatgcttaggactcccaagggaggactgcatgacccatctgtaagggccttctctacccacaaatgcactctaagtggcctttgatgcctagcttgagaagagtacttctgggggtccattaggttccaagtggctgttgaattcacccataatgaattttgaggtttcagctctcaagagtgggtgttagcaaagagactggattatacaaaaagatagaggtttatttagccactgtgaaactccttgtatttgaactaccatggaccgctctcttaatcttcccaatctctcttttttggttgctggacctccagtttgtcagtttcacctgcattccagtaaccaaatccaaaggcatgttccaagaacaggctccacagagggacctggagagactgcaggtttggcagagtcaacaagatctgtgcccagagcttttcgaaggccgtttccttacagccacattaagcagagtccaaaagagaaatccttcactaccctctgtcatttgccggaatagagagaacataataatctaaaggtcaggaggcagagaaagaatcttaacacaccttgctgtgtgttttaggatgaattaatctttgaacatctagtcagaaagcagtccatatacagctggtagtcagcacggactgtgacattttagagctgaaggcaccttagatagagctcatctctatctaagtctaattaggtggactctcattcagtctcctcaatgcacaggtgaggaaactgaggcctggggtggtcacagggctggttggtcatcacaggcccatgactaagggttgatctcttgactgtatttagatctagccagtgcatgacttatttcactccaagcttagtttgcccattctcagtgttttaagttctaggggagtccagagaggttaggaggacagattttggtgcctgagtgcctggatttgaatcccagccctgcctcttactggctgtacaaccttgggcaagctacttaacttctctgtgcctctgtttcctcacctctaaaacagaaataataatgatacttatgttagaagattgttttgagaagtgcatggagttactacatctgaagcatttagaacagtacctggcacagggtaagcacaatagatttgctagatatgatattctgttgcctttttgtacatttttcttcatatccaccacccaatactctatcaagagctaatttttcccccagtccccttccccccacccccaaattcatttaacatattccagatttcattttaacacagacagctgcaaggggtttccaagtcacgttgcattttataccttacttatttttgtgattcaggtaatttagtttctatgttagttcccccttgcagttacattcttcttaggctctgaaccctttaaaattatcgttaaaagcaggcagtgaggggtgggaatccctcgaaatggtaaagtcctggatgatacccgtgtccatggtgtccttccaaatatgtattccctctcttcagccctcctcccaagcgatgagtgtgatgcagcttgattctaaatggatgaacatttttagattaagattttatgagccactgtattaagtgcttttcggaagttcagggatcatgtgtcaactgcatttaaggaagttacttagtcattcgaatagggggagcaccagcagcgcctgcctggcctggcagaagcaaaagtgtgtgactgatccgtgctggcaatctagctggttcactggtttatctgtgtttttcctgttcttttccaaagcttgaaataaaccagatggcaagtacaagggaatggtctttttcctctcattttagtcagggtcgttcacttttttccctttttactctcaccttcatttcctttatcgcctgcgtgggtctgacaaataggcactctcagtgtgccagccaattcccttttgatgaaaagatgcctgccactttcattttttgcaggaatccagtcacctttgattttctcttctgtttttacttgttttctagattgaaccaaagattatcacttcattaaatggcaccttctcatgctttatttttcttgagttgattctgaatttcggtttttgtttaagctgttctagagatcagccattttagaataatagttttcatttctttgcttgtgtattaatatgggcccctttctctctttctcactctcttttctcagtattttggtggatgagcttctcatttgctgttactcgttgctttaagcatttacgccttttcctggtaatctccggcaggacccataacctctgtagtggttctcactgcccttgttcagagctcctgccccgagcaggaaataatttctttggtcttatgggagacaggggtagagtctgtcttattttttgcctaaaatctggctcttttaaaagccccaggagagagacatttccaatataattgaattttgtgtggcagaatttctaccatgacctacagcttacagtattcccatttttattgcattgtgagttttgagtactccatgaccagtttcagagtatagatgatgtggggcatgagttgctttagcctttctgtttcatcttgggctaagctatccccaggaacagagcaatgagaagttcagggtgcctcttaaatgtgtctggtgtcaggattttatagcagcttttcatggttcagcctttttggccagtgcatgagtaggacatttttaagccctgtgctgctgtttctttgttgataccatacagatgctacattatctcctttcaggattttcatatctgcagattgatttttgttgtcttgtccagggcatcatatttttggattgaatgttttctgtttgtaaaatggttggtgtggacagacgataagctccaccattacccctgaagcttgtggactggggccatttgggtgaggggcttgttacacaccgactcattgtctgatctttcacaataaatagcagacaggtgaagagctttttagagaagtggaacgttggtacccttggatttgcctggtttctgattttcttttgttgtctttaagtggaggttcattaagttcaacaaattaagcatctggtgtgtgccaggaacacagttgacaagattaacaaattagtttggtttgttgcttaaaaactattttgttttaaaattgtttttaatagaaattttaaaattttttaattcaaattttagtttttaaaaataggcaatacattcacatgatgaaagaaaattttttaaaggcacaaaaggttaactagtaaatacatctgtgtgtacccctgacccctgatcctcagaggcaaccagtattagcgatttcttcatcctccagaagtggtccctgaacttccaagggattttatacatctgtaagcaaattcgttaaacatattctgtacaccacccctttttgcagaaatggtagcacactgcatacatgctatttggaaccttgcctttttcacttaatatttcttggcagtgtgaaaagagcttccacgtcattttttatgaaggccgtctattttagatatctgttttctgtttctaaggatgctaaaaaacagtcttatttaggcagcagctttgctggagatcttaaagatcttgtgaatatttggaggcaaatatttttcttttctgtgagagcccgggggaggtgcaggggagcttctaaaggtcagctgagaagggagagctggggcactggagagtgaggaacgcattggtccttgggcccttcttcgccttgccgtctgtgcagaatgtgctagcatttccagggaaagtttgccgtttgctctctgttctccagagaagcttcctggcctccccaagtcacatttccagcatcttttttcattcttttttttttttttttttttttttgagacagagtctcacttttgtctcccaggctggagtgcagtggcgcaatcttggctcgctgcaacctctgcttcgcgggttcaaacgattttcctgcctcagcctctcaagtagctgggattacaggcacacgccaccacccccagctaattttgtatttttggtagagacagggtttcactatgctggtctcaaactcctgacctcaggtgatcctcttgcctcagcctcccaaagtgctgggattacagacgtgagccaccgtgcctggcctcatttccagcatctctgttgcatttcatcccgtctcctgcaccacagcatcactccatttgtcctgcctttgggcgtccaagaggaagcctgccctttgtcacagcactttctgtttgggtagctttaagtgtctcaccccttcttttctctcaccccaggaaaaaccagctctcacacctgctcctctgtaaagcgtcttccccaagcccacacgtaattttgttgctgtccttgaaagtatttcccaagatctccaaaccgctttaaacttccaaggtctgagcctgacctggcctcgctaacaaagggttccactgatgccgactctaagaagaaagttttcaaggttcttcgtatttgaactttctatggctaggcttatgtttaaaataaccacactgatttaaacatggtcttatagtcttcagtggctcccaggtcttgcctctcgggttttttttcctctttcctttgaatgtgccttaaccttcgtcttgcttttatttacctctgagtctggtttagagccacctggaaattgaatggaatctttagtctattagtctaatctagagtccttaccttctggcctttgctcattgcagagcccccacattattagtcagttgtaccacagatactgtgttacataaggtgaggagagggaggtggtgttatcagttccactttttccaggctagagtgcagtggcccgatctcggtgcactgcaacctctgcttcccgggttcaagcgattttcctgcctcagcctctcattttatcttggataaaagagaagctttgaaagattgcctccctatgtgtacagtcactgtaggcatgtatttgtgtactgtttacttagtcatgtcaatgagggcaataaaaaacaaaaatcaggaagcccaacatggattgctacattttaattctttcaaataaggaaatacagcagggcttggtgtcactacgcctgtagtgacagcactttgggaggccgaggcgggcggatcacctgaggtcaggagtttgagatctgcctgatcaacatggtgaaaccccgtctctactaaaaatacaaaaattagctgagcatgg

SEQ ID NO: 62427 - DNA, 7479 bp, Homo sapiens
tactagattctaggatgagagtctttaccctaacttatggttcacagatttaatattttgtctgggcagccggtagaggagcttatggtctggaatgggagaaggaacgtgtgtgtgatccatgttacctgtagaagacatttaaattagcattgatcatgattgctcacaggcaagtcaagaccagactaaccaggcttgaggacccagacatttggctctggactgggatcttccagccttggtgaatgaagtctctcctttgtcttctctggtgagcacaccactcccaagttcacattgtgttgttaatttttttttttttttttaagagacagggtcttactctgtcacccaggctggagtgcaatagtgcgatcatagctcactgtagcctcaatcttctgtgctcaagtgatcctcccacttgcccgaagccacacaactagtaagtagtgtagctgcagttcaggtcaaatctgtctgtgtccagatcctgcaagtagcctctctaccccaccaccaatgtacatctacagaaagcatctcaatgaagcagaaatctttgtagaaatatttttccattctccttagatgttaaaaaggaaccttattggccaggcaaagtggctcacgcctgtaatcccagcactttcggaggctgaggtgggtggatcacgaggtcaggagttcgagaccagcctggccaacatagtgaaaccctgtctctactaaaaatacaaaaaattagccaggtgtggtggcgggcacctgtaataccagctactcgggaggctgaggcaggagaattgctggaacccaggaggcggaggttgctgtgagctgagatgtgccattgcactccaccctgggccacagtgagagactccatctcaaaaaaaaaggaaccttattttataatttcaccagccttttaatctaggttaaactacagttaatggtattgagttttatattttctggaccaaataagctcatgtcagttggagaataccatagacaattttgttgcattgtatattttggagagaatagcagaaatcatgagtcttctaatggtatttcagtatttaactgaatgtcaacaatcaatgggtagatttccatctactttctatttgcgggcctttcctttcttctgctacctccaacatcctgttttagctttgaatatatttctttatttgtgagacagcagtttctggagtagatctttgagcccagtgagatgttcttgagacaaatggggaaagtgtgaaagaaatatgccttgggacagtaactcctctgagcagtggaaagtgaaaactctcatttttggatggataattatttgcttgaactttgagatgttctttaaatatccaaaagctgctgacagcccaggccacagtgagctttctctcctgatgtacagtggcgtggcaattactcataaaggcctgtacctctccgcccaatgtaataatctggtaagaaacttctgttcagagaaccacaatgataatgctttaggttaatgccacagacttagtcaattagtaaatatttacagtgtccactatgcactcaacaccctaaatttaaatttgtgtagaatttaaacatgaggactgaattacaagtacataggtcagaacccccaacagagatgaaagagatatgaatcatcacttttatgcagagaagagactagcaaatgttctagttatagagggtggttacacagtgtgaaggtgagaaatagtatgatttttagggcctggaggggatgggcccccagtgaatatctttgtatggttcagcaggttgtacaaaactagttagatgccatcaagggcttgcagtggggctcaaatggtgaacgtcagtgcttgtccaacatcgccatgggtcaggttacttgtagccaagtaaatgcttctcacacctatgacctcacttcagcccctcatatgaacaacagtgcacagccctatgcgcacagccaaggcagcacctgtgtagcgtcattttccaggctgatgtctggaattccccttgtaagtaaagcactgaagcttcattccataatgactcactgccactgctccaaaacacacccctcttgtccatctgcccatttcctgaccgcccagcattcttgggccttggctcaactgtgagcccagcctgacgtctgcatccacccctccttctcaccttctcttctattccatctcttccagtggttcccagctttgagtccacctccttcttctttctgcctcctttgtttgaactcctctagtatttatagttggtacttcagagtttagtacttcattatatacagatttgttgtactattttccaattgttttatggatgctgtgtatcatacttctttcatagcccccacagaggttagagtgatgtctttcgtccctgtggggagtgaggtggaatgtcaggagggcgtagtttgcaaaacatccctcccagtggtactgatgccttttcgcaggttctgtcctcttcatttgcaagccactgctttatccacgagggtgctccctacttatgccagtgaattaatttttggtaagtggggtaattttctttcctaatctcagagtaatatttctgccattttttatgaaaccatcttccttgatggccagttccttgcctcccaggaaactgatgaggaggcaagacgaatgtattgggaaagcccagcggaggaagagctcctgaggagtgagtggcgtagctatctgcttcatgtggggcgctcctgctctgcagtgtagagtattttttaggtggactaggagcaaatgcctgcctgatacaggcaacgtttgcacaaaaacccaaaggaagaaggctgctggtaggctaggggtggcaggtgggattgcccttgggctttaaagaaggctgagaaaacttacttccagagtgggaggcaggaggagtgagccttggaacaatagtggagtgtttgtggtggacggacgggagagaggaacacttgagggcatgaacttacttctgtctctttacttgaaaaagcaatccactgagctaagaccctaaaatacatcaacccagagggcttcctttcgagtttttagtttttagatcattcggtatcctcaatgcaaagatgtgataaagtcaagctcaggactacttggggaccaattctcatcctcctcatgtgttacaattccttagcagttgctttaaaactaacatttttctaatcttgaaatatttaataaagcagctttctgctaaagagctgaaagcattttacgaaccttatcttgaggatatccgtgcatattttattattttaagtcattttttttagcctacagaatttcatcaacttctttccttcagttacacgtaaagtaacctcccttcccccattttatagaagaaaaaacaaatcttcataatgtttagataattcacccaaggtcacttggcagaatctggaatcaaacgcaggtctcctggttccaaaaccttcgcccctgtgtcattcagttatatcacatggactcttaagttaggcctcaaaatcctccaaaagtgcaagtgatctgcccagagctgtacagcacagaatgttcaggggggtaagggttggaataactccagatggcactggagacaagtagtgtagagacacaaatgggatcctctccctcctctgacatccagaatccagaatctctgggtctttccacttgggttgtgacctacaagttgggggcaaagctctttagctctcataatcagcaggactgatggcggaagctgggcagggctccctggaggcccagtgttgggctggcatgttcagcaccagataggtgcctatctcacaatatccctttttcatttcaggcacagatgaatccttcatatttatctggatttagctggtagcatttgtctcctaagacttggtcacagaggaatccatgtgaccttcaggccttctgctctaaactggcaggagatcctgtttctactcacagcgtccgaggtatttataaaacagaaataagtaaagcatgcctcaaaatgctgtgcacactatgtactgttgcccccagaaccttctcttggtcttggagggcaaggatcacagagctttttctgctgtctctccctgtgtaacagggtctggtggccgagccctgaggggcgctgttgctcccaggtggcagaattcagcatcagagagccacacagctgaaagagatggatgggtgagtgacctcagctttgcccagctggggtgagtgggccgagcaagtctctcctttggcaaaatcatctgggcttgttctcatccctgctgaattggcaggggaggagagggtcgtggcccattggtcattggtcgggtttcctcacaaatgcctgccatggtgaaatgcaagactgttagagtgataatgggctgcacgtgttaatgctgtcatcacgggccccacagtgtgtattagccaagtactgggggcactgggagccttgtctgctcccagtcggcgttgggaaaccagaacgctcaggaacggtgagtcccagttatttttattttctcattaactgagagtagctgtaagtccttttctgttgcaggtctgggtgaaactttcttctttgcctgccttagggagttagatgggttgagtggttcttcaggcaacggttgtgccaggcactgggtcttgccctcccacccccatctccatttcctccttctggaagcttatttccagacatagaagagtgggtggcatctctatggtgcccaggacaatcaatctggagatgccctcttcttcagttgtatccttctcttaaaaattccagtaaactaggcacttgagctcattgggttctggtaaactgcaattttgcttctgatattacagaatttaattatggtgtagatttttaaaaatatgtttaggataaatctcacaattcatatgcctgttctcttagaaaatctagaacctccctagaggaaacacctggcgtaagatttttttgtttgttctcaggtatggattcatggtttctcagtgaaagagaaaacaattttgcctgtgattttactaagtgctttacccattcgttctctcatagccagtactattctttcagcagggttatttgctagtggaagaggccagcttcctttcagtattttagtaagggcacgtaaaagtgcccgattaaatgttcctgtttaactggtgactcagtcttcagacatttttagtttggtaactttctttgtggaagctcatgggttagtagccattcctgacatttaaatgtgaggttcacgttttcctgcattgggtaacttgactccccctgagaacttgtagactattttctgaaattccagcagattgagtgtgtgaccttatgactttgtggaagaaatatggctaaataaaactgttatcacatgagtaggtttgcacagaaagacaatttcaaggacttatcttgaatacaacaaagggcaaccttgccgtaaatacatttaattatctgtcaatccctccagttctcttctactaaattgtgtgtgacttgatgatcccttcaccttgtaggacctggtttgtaagagatggactggatcaaccaagggctttatccttccttgttatggtaacccactcccgccctttcagggcagtccctggcttgagttagttaatgttcaaaaatcagtgtttctcagcatctctggaaaacaggattggccctattgtttccagggctttcccatcccttctggcttgaggtggtggtggtggtgagaggaggtcttttttttttttcttttaaacaatagagacggagtttctccatgtcacacaggctagtcttgaactcctgggctcaagcaatccaccctccttggcctcccaaatggccaggattatagatgtaagccactgtgcccagccgagaggtggtcttttaaaacccagagtattggccaggtgcagtagctcacgcctgtaattccagcactttgggaggccgaggcaggtggatcacctgaggtcaggagttcgagaccagcctggctaacatggtgaaaccccgtttttactaaaaatgcaataaattagtggggcatggtggcacccacctgtaatcccagctacgccagaggcttgaacccaggaggcagaggttgcagtgacctgagattgtgccattgcactgcagcttgggcgacaagagcgaaactccatctcaaaaacaaacaaacccagagtatttgagcaccgtgatgactccattccacagaaccctctgtgggaggacacgtggtcctagaccaacaccgatttgctaaaaggtgggtctgtgagctgctggctaaggtgctcactcacctcattagaccttaccgagagtgagaacagggccgggtcgccagggctgtgcagttcccgaagcctcctggctatgttctgaggctctcccatcccatggcagtgaaagactcagaggacacaaaggcacaactcagacggggatggctaggccttctccccaaaatcatctgggcttgttttcgtccctgcagaatggtttttttccccctatgatggctctgactaatttagttaaatggcagataaagtggggagaaggtggcccatttcctccttactttctctccaagggtgtcatgttgcccacatttaaggttgaccacttttatctggtgtagcaagttcaatagtgaccctccaaaatttatgtcccatctgaaaccagtgaatgtgaccttatttggaaattgggtctttgcagatgtaatcaagttaagatggggttgtacttttatctaagctgccaccaaagaggctgaaaaatcagaatgacatgggatggaaacagaccatgtttttggggtggtgtgctgtggccttctgctgtccttctcctgacatcctcacagggtactttgggggacaaagttttatctcagggcattacagtttgctgggagatccaggctaggcaagaggggatttttacctgcagggaagaatgggtagtctttccatgggcaggagaagcccctcagcaggagaggggtggtgtcaggagcaggggttccagctgtgcactgccaaggatgcattttagcacagaaaacaagaacaatgcatcttggaactgtttatgggacatgatgatcaccacttagtatccagtgatttattaagtctaacatggttccattttagaagatatggttccattttagaagaatcaagaagagtatgtcctggaattaattttaaactcattggaggaggcccaagcagttaatcagctagtgagttcattgctaatgagacttgtgtgtcagttaggaaggagtatgttttgtgg

SEQ ID NO: 62428 - DNA, 13830 bp, Homo sapiens
gataaattaattaaagcataatcacatgcattaaagctttatcacatatataattgttgtgtatgttgacatacatattttcctttccagtgttttaaaatttctccttagattttcttagttgctattttaaagctttgttctaataataaaaatgtttgtagtcattatgaattttgggaaatagaaaaaaagaagtcgccaatactcttataacgcagtgattttagcattcataaagatttgaatatataattttccttctatatctttagaaattgccaagtaaaacagtctagaagtcacagtggcttcaactgctcattctctcatgtaaaagaagtcctgagataggcagtctagatctgatatggtggctccattaagttgtcaagaattcagatttctgtctctctgccctgctgtcatcttaatggggctcctagagagacttcaaggtcacttcatggcccaagagggctgttagagttgcagccatgttttctgcattccagggatgcaagaagggaaaagggcagacaaagggtgaactccctgccctctaaggagctttcccaaaaattagatctacccctccagagctgaccagaatttagttacatggactcacctagctaagggaagccagaaagcattcaccagtcttatacatttccatatctttccctatgcatatagattcagtaagggtgttttcttgaagctgtctcaaatagtttgtggaaagagttaaggtataaataaacctcaatgaaaatatcaataaataaaaggcactacatcttgttatcctatcagcattgccactctgcctttccatcattttttctagggattttttatttatatatatatatattgattgtatatttttcaaatattcagtcaacacagaccttttcagggctagaagggaccttagatgcttttctccaaaggttgcatattcagatgcttacggggaccattcaggtaccatacattattaaagcgggccagggatcagtgttgaggtcaccactaatagggagtggtggggactgtggccacctggagagagcttgctgggtctgaagcggggcagccctgctcagctctgtccattgttgccgtgtgagaatgctggccctgtgttgccaaatcttctgattttgtttccaagagaaaccagaaatctagatttttatctgaaatctcctggtgttaataatatggcaatgaataaattaattttttttaaatgccagctgaatgcaacactgcctgccccatgggctgccagtttaggatctttgatctggtccatgccctgtttttcatttggcagccaagcctgtggggtcaggtggcctgtgatgtggctgaagactttgctcttccggccccacctcaccacagcctggtcctctatgactaatttgtctcagaatagggacagataataattggaagctgggcaagactgttctgaaggttaattgattctttccttcaatgggctttgtttttcttctgaggtcattttggtgtggtagaatcagaaaaaagaaattgggcttgaatcccagctctgctgtttacagctgtctgactttgggcaagcctctggtgtcttgtgtgtgtctcctgcaccatccattttcttgcttgcctctctttctttctcacttacctgccttcaagtagcacagcatggtgattaagaggaggatctcttgggccagatatgaaagctggcttttctacccaccagctgtatgacactgggaaagtaacttaaactttctatgtctcagttaccttgtctataaaatggggtaataatagcatctacctcatagggtacaggaaggattaaatgagctaccatatgtcaagtttgaagagcagagcttagcacgtagatagtgctgcataaacattgggctgtttcccccatgttctctcttttgcttctgctgctttggaagccatagatcttttagcagcttcttgcactaggctcagctcaggtcccccatctgacagcaagcacttttagcttctggcgcttctcagcagccagcctctggccatagtctgaactcagaccctacaagcaatgcaatcccctaccttttgcttttggccctgttctgtttctggtactttgtttttgagcccatctgtgccctattacttttctcagctcatatttttttctgtccctgctgtatgtttggaagagaacaaataagtcgactggctgtgctgtctcgatctcaagccttgctaagttatttcattggtcacacagagatgttacctgtcctgttaggcatttctggagattatgttgtgagataaaggttcaaagcagtgtgaattggctttagccagaattaggaacacagcagaaaacttgtcctagaaaccagagagagcctgtcagtcttggtggattcacaaagccttcccgcagcaggcttgttaaaaaggccaaacattcaagagtgtggcatacatgttaattaacaaaattgtcttttccctaaagactttaaatgcagaggaacttgactgtgcttacgtttcaattaaactgcttctttttcgttctttaaaacattaccatccaatctttttagcttttaggtttgtttgaataagagatctgacctgaccggcccaactgtacaactcttcaaggaaaattcgtatttgcagtgggaagaataagtaacattggtatgtattgctgagactcttatttttgtttctcctccccttatgttaggaagcagtgaatagaagtgggaagggaaggactgacttgtttaattcaacaagtccaccccaaaccaacaaggaaactggtagaaactacttgctgcattaccctgttctgtttccaacaaaggtgatgaggaagaacttctagttcagttctgtattaccagcatatagtcagagaatttctggtggattttagttttggtcctctaatagaatgtggagacttaaaagcctatattaacaagctgcatcatcttggacatttgtttagcctttgtttggcatccgtggcagggtttggacaaggtgaggaatggcagccacaggttaaacctattgggcatcttagtgcagtgctatgtacttttttaggccacagaccctttttagagaatctgattaaagctgcgaaccctctgcccagaaaactgctcatgtgcacaaactttcacatgatttcagggggttcttagaccgcaggatcccacagggaacccacagaccccaagttaaggatccttgttttaggggtttatagacagctttcaggggatatgaccccaggagtgaggaggagtgtcaccagaagttaagttttttttgttttgttttttgtttttgtttttttgagacggcgtttcgctcttgtccccaggctggagtgcagtggtgtgatcttggctcactgcaacctatgctttccgggttcaagtgatcctcctgcctcagactcccaagtagctgggattacaggcatgtgccaccacgcccggcaaatttttgtatttttggtagagacaggatttcaccatgttggccagggctggtctcgaactcctgagctcaagtgatccacccactttggcctcccaaagtgcatgattacaggcatgagccatggtgcccagcccagaagttaagttttaggaaaactgtctcctcacagaagttcagtgtagctgagtttatattcatggcctagccttgatttgaaattgtgtcagtaagtttttaaaaatccttgtcttgccctgatggtggaagactagttacggagctgtgatcttttacttccattcattactgaattaggaatccctgccagagattttctgccaaagtgacctcgagtttagaaaagggtttctgagtcctctctggacttactgtaggtcttaggaaagttcagtcggttataccccaaacacagttggtggagattgttttgttctgcctgtctctagcactggctaccagagctctcatgatgactgttgttagcagaggctacttgaaaccattccaggggaagctgttgccatagctaccttggctatgagagttaccattttctcttttttgttagcttgtgatttccctgatttttaaggttaacagctgatgttctgtttttctgccgagcagcaaggaaaatactggatttttgttgctgttgcttttgtcattgcttatgtttggttttatatgtttggaggtatgtgtgtgtgtgtgtgtgtgtgtgtgtgtgtgtgtgtgtgtgtgtgtgtgtgtgtgtgtgttttgtatataaggtaaagttacttcaaaagagaaatattgggagagcttgggaaaggccagatgagcatatacattttctgtattccaattttagattttgacctagtggtcaatttggtttacttttaacctaattttggactaatggctatagtcaggtagcctccgcagggggaaaaaacaaaacaaaacaaactagccgagctctatttcattcctgaaacccttagtagccaggatcgctgcgacctgggctgagtctgacccagactccagcactggggagcctgtggggagcagatggctgagtcaggctgaggttgctttatctcagcctgctctgcaaataaaggggtgaagccagcaggcagtacaaccacacctggtggcaccagcagtcctttccgggtttctgttcaaggctgtaaacacaacatttaacacacacctggggcaccaggtgcaggttaagcctacagagaggaaaaaaaacaaaaggatgacctgttaacaaaaatcaaagtgctacccctagtcctgcagccacctcttcgactgatcttatttttccccctccgataaaggacactattcttagcatttttcaattttctgatttgctcatcttagaaatgcttgtgaaattataaaaagaaaacacagtacccagtttatccatgctcagactgtttgtgatttggattatggccagttgattagtagctgtaagatgctggtggtgtctgcctgtcaggagcctgcggaaacatctgaattgtgacacaccgtcactggcagtatctcttagcccaccatgcgtctgtagggtggtgggcaccacccgtcctcactgtgcttgtaaacttagacctgtgcctctgctccccagatcaagatgaatgccatgctggagactcccgaactcccagccgtgtttgatggagtgaagctggctgcagtggctgctgtgctgtacgtgatcgtccggtgtttgaacctgaagagccccacagccccacctgacctctacttccaggactcggggctctcacgctttctgctcaagtcctgtcctcttctgaccaaagagtgagtagacctcatgccctctgtatgctcagctgctgatgtatttggctttgtgtgatgttcaaagaagaaacttctctcatcgtgtccttaaggcatcaatgggatatgacgtcactggtgttaaaatagccacagtctgattgcagtctagtgtttgaatcctggagggtaggagagaatcagatctctgttgcctgaaacattccttcctctacagtgtgatgtcattatccatgacagggactttgcagaaaatagtagtcatttttaggcagatatggaaaagttggacaatattctagtcctttaacgaatgctttgttgccagttctaggatggagaaactatcctcacccaaaataattaataagcaaaaaagcacagatccattagttgagtactctccatctgccttgttgaaaaatgtaccaagcattagctaagagaatgcacttaaagagagtgctttgtatgagtgaaccaggtttccctatagaagcccagatctgtatttttttttagatagagtcttgctcagtcactcaggctggagtacagtggcatgatctcgactcactgcaacctccacctcccgggttcaagcgattctggtgtctcagcctctggagtagctggaattacaggtgtgctccaccatgcccggctaatttttgtatttttagtagagacggggtttcgccatgttggccaggctggtcttgaactcctgacctcaagtgatctgcccgccttggcctcccaaagtgctgggattacaggcatgagccactgcaccttcctccagatctgtattttggaggcagcaggggcgggctctgcttctgacagaggaaactgtagttgtaaaatgaagggaatctgcactctgtgtcacacatactgttttcaagagatgcagtgttcactttttctctatagatgtcttctgaatgactgtgtcttcctccagggctcaggccaagcctcgtgcacagtgggtctgaattccccactccttttgtcatgctgcttcactcgctttgtgctttttcaagcttactccattctgcctgtgccttctcaggctgcagctactcagagagatgtcttcctcaagtgtgtccgttcagcacatgactaatgcagttgctaagacccagtggtggtagaagctcttccctgcatcctgatagcacctctcatcacctcttttggctgttggggacactgggtgaatgattctcttctaagagcagacaaataggcaatgaacatctgagagtctgggcccctgctttgtgtagttgtctagttaattttcacatgtactattatgtgctttaggtgttttgggtgtacatgggcggtattcttatgcagttttctcatagttgtgacagtgatgtcatgaccccaagtcaagagagagattgcgtaatagtggtggacactataaatgtcatcatactgaatttggaactgcccctgctgaggggactttttattacagtagcctccacagccaggcacaagagcaaggacatggtgttcttatatgcagtgtttgcagttaaaaatcagctctgtaaagggtgtgcacggtatatgttttgaaaatcatccagtatttgtcatagtcatattttgaatgtttctttttttctttcttttttttttgagacagagtctcactctgtcacccgggctggagtgcagtagcatgatctcagctcactgtaacctctgcttcccaggttcaagcgattctcctaccttagcctccccagtagctgggactacgtgccaccacgcccagctaatttttgtattttttggtagagacggggtttcaccatgttggccaggctggtcttgaactcctgacctcaggtaatctgccagcctcaaaagtgctgggattacaagcatgagccacggcgctcggcctgaattttttttaatacttaatttagatcaataacttcgactgttactgaaatttgcactcactttcagcttacagtttgggtaggactgctagacccagttcttttgtcatctcattcttagagagctcttgaaaaccaaagtatttaaaaccctgcaagtttctgtgcagatgagtgcaaatttccacccagcattggttcctgagtaattagaggaaggaagccatgcaaaagctgctattgcccaggctccagaaaaacatcatgtaaggtttgattccatactaattgttcaaagtgtaaaagaaagctgactgtggcagtttttacctccttttcttttttttccttttaaaaataatccagagacattaagcccaacagtttctctttgcttttttccctctctagcacattttcttgatgagtctaaggtgtgacctctactgaaatggctcccacccacctcctcctatggaagtggatccccagccccatctccttggacctcgtggctgtgtttagaaaattagcatcagcctaagccaggggcatcagcatggagccccctggtcattggctgattgccaccctctctcctggtgaagcccgaactagggagtggtggaggtcagcctaagttaaaggcaaacctgatgattgtttatgacttagctatggtttgaaggtgtatgtgaagggacaaattctccagaaccaatttccttccaaagcctctccctttgatgataggaccagccctcttagagcatgttggagcattacttaagcagctaaattctaaacacccgagcaatctgacttgaacatgacaaatgactaaagggcaaaaggattcactttattgcccccccatccttcaactcacctcttatttctgatttagattctaattttaggaatcactgtatcctgtgttcatgtctcatatcaccaaaatgttttcacattaccactctcttttgtccgcgttactactgcatttgaaatttgttgagtacctttcatagacgttatgccattcagtcttaccaaccttaaggttggattcatttttcctttcattttagggatgaggaaactgggagtagcagagagggaaactgaactcaaactggagtgtgacaccaggttggctgccttcctatctctggggaagtgaacagggacttttcttgggtacaagtgagagaactgaggcagaggccagcccctgatgatgacagcccctgggtgacctttgattcccatctgaccctctttctgtttctgtcactccactggaagctactgtcccccatagtctttttctgtgtcacatgactataacaacctcccatgtgttgaaagctaagggcaggaaacacgtctgttatgagggaaagtgcttctcctgggactttgaagatttttttcctacaaggaagcctgtctgcagccttcacaagcactcgcctaggctggaaagttctgttaactgatttacaacaagctgtgaatattagtcagtaatcctgaccgcgggtagctggttatgatgacatgcgcggaatcaggacgtgtcttcttactgttctggtatagaaaaaaagttgatgaaaggtgaacatcgaaagcatgctcgaggagcagggattactgttttccccctcagcattaaagtcaatttgaaaatctgttctaagatgatttacccaaagatacattataaattaatcttttaatgtctggaggaaaactttgcttcagtgggatgttatgtctcctgttctcttagaaacagatcaatatttacctagtgattcattttttgttctcatgaagtgtttacttttagtgaaacaagcagacgcccagttcggaattatgacaaaaatctagatagtcatacaaatctttttttttcaataaaaactttgatgcatattcatttttttaaatggaaaaggtagagcacacaaaaattatctataaatgttatagctctttcttttttcttttttgagacagagtctcactctgttgcctaggctggagtacagtggcgcaatctcaaatctcggttcactgcaacttctgcctcacgggttcaagtgattctcctacctcagcctcctgagtagctgggattacaggcgcatgccaccacacccagctaatttttgtatttttaatagagatggggtttcaccctgttggtcaggctggtcttgaactgttgacctcgtgatccgcccgcctcggccttccaaagtgctgcgattacaggcgtgagccaccacactggccctatagctcttttggaatttgtctaacaggtttttcagtttttagcagaaaacctcccacgtgaaaaaaaaaattataattctacccagagataatgcactattaatatgtgggcaatcatccctgtggttttccttctccttatacttgcccccacaaaatcacggtgatagatattgtttagtaacctgctttcaccaaaccatgatgaacgttgccatgaacattcacccatgctgctacctgtctactcacgtttgacttttttatagcttcagaattctgtcattcattcaaatttcctgatggctgctggcaacagttgggcagagaaagagctttgaattgaaatttgaactaggatgcaaacctaggtcttctacctctaaactggccacagaaccctggataaaatgatagcccctctggtccttggtttccttctatgtaaaatgaaataggtgtgtctcccatggtgcccttcagcacggacatcttctgattctggtacccttgctttgttagcaaacatcagagtggtctttttaggggaaggaccctgggagagggtccctgactgcagggtaaagagactggttttcttgtgtgcttgtcttcttctaactattcccagcccccgtactcctggacaggctggcactgtctccctttggcttttttttttttaagtactttttaaagctatcatttacatacagtaaaatatacaaatcttaagtatatagctcaggggctttgtgtatgtattcagctgtgtaactaccagtcccttgggtgtttacaaaagtgtactatgacctccctgcctctgacctacccatctgtcataatactactcgagttggcttcctcaagcaggccagcagccgaggcatgaacctacctgtccagcctcattactcacagcattctctcattgcctgtgaagtacctgacctttgggctgttgtttccccactatcccagatcccctcttttttctcagcaccaaaatgcctcttatcctataagaaaacttaaatagcatcaattctgcttttaagagacagagtctcactctgttgcccaggctggagtgcagtagtgcaatcgtaactcaccgtaacctcaaactcctgagctcaagctatcctcctgcctgtctcccaagtagctgggactacaggtgggcaccacaacacccagctaatttttaaaattttttttatagagacagagccccattatgttgcccagtctggtctcaaactcctggccttaagccatccttccaccttggcctcccaaagcgctgggatttcaggtgggagcccctgtgccctgccttaaatagcatcagttctgagatactattctctaacttgccgccctactcctctttagccagaatgagcccttcttccatcttcctaccatgtttccccaacatataacttctgtgtccgtttaaaatgttccatcttgttttatgagaatttgtgtctcttttctttatcactggaatatacaccccaaatcaagagccgcatacctggggagacagaacaggattcctggtggttccaaatctcaagtacaatgccattctgtatcttgttttccataaacaggtgtaagtgaacgatgttctcattttggcagacgccatgtgtgcctgcccaggagaaacaaactgcactgtatccggcttgttcaatggtgctctagggaatcaggtgtaccttcagctctgacagagctttgttgatctgggaaggctctaccctgtttctggaagaagatggattgcttatggtcttaaattaaggcaggacaaccccaggcatatgcataatggcagttcacagcctccacccttccctctgggcctggctgaagttttcatcaccaggtcccggttgggaagtagagacaggcagcaggtgccctgtctctggaagcctgctattaaaatgtacatactgccctgtgggaagccaggctgctgctttttcactcgttagcaagcttgccagtatgggctgtcttatagctaaagatgaaggcatttaggaggagtgtgatggaggacttggctaataggccgaaaaacagagagttgagttgtcttcactggatccaagagacatctagaagcccctgcagagtccagagaagggaggcagtatgatgaaaaccacagccacatgtatgtgggtactttcttccccagagatgcaaaggtaatcgctttcttctgcaaccagctgccacctgtattaaaaagaactggacattattgttctctgtggatttgagagacacctgaaacttaggggtgaggggcatacccactaacaccaagccaaaaattacagttggctctcctatgccatggtgccctctctggacgtgtccgcctggaagctgcttcaggtagtcataagagaatgggaggagccctgtggcccttccatagaccataatggattcatctccggtggttttccctttttctcttcactcaccggagtacaagctccaaacggaaatccaattggaatgctgttctcatcataatgtgtccaaacctttagtttcctgccaattagtcatccatcagccttggttagtgagcatttgaggatctacttctctgagactcatcgtggggaggcatttgtaaaagatcagtttttcaagctttttaattacggaagttttctagaggcactttttaaaaatcagtttcctcacaaatgtgcttcctagttatttctctttttttttctcctttctttctttctttcttttttttttttttttttttttgagacaatgtctcactctattacccaggttggagtacaatggcacaatcatggctcattgtagcctcaacctgctgggctcaagagatcctcccatctcagcctcacaagtgtctggaaccaaaggtccacaccaccatggctggctaatttttaaaaatatatttgtaaagacagggtctcacctgtgtcaccatgttgtacaagctggtcttaaacccctgggctagcgatcctccagcctcagcctcccaaagtgctggggttataggtgtgagccaccacacccagcccctaattatttctaataaagcagagcaaatctacttttgatttttctctcaaacagtaccaactccctctctattgctgttgtacatacttcttaacagtaaatatccatttttcttttatctgccccaaataagagctcagttctgtgtgtacgaacactatatttgtcatagatatgcaaaatatgctatttttgtcctagtgtaccaaggaagtattaaataattagaaatacactacagaaaagcactcattcaaatctctctgatagtgcaatatatggagttattttctggatctaaagagcacgggactccatatatgaaacggccacttcttccattttcttttctgcctacttgttataaagctgtttctttgcagaggcagtaccaatgcagaggctggggttaggagctttgagatggacagttgttgttttctcaatcttaaagcatcaggcaaatgcaacttcacacactctcttccagtcagattgccaccctaggcccctcctaggtaaaaaaaattctggaaccagcacagcttatttatttatagcaagttaaagctgaaaagaatttcattatctttgacttaaatttctcttaattccctcttgctcacagacattccacatcagatttagatcctttccttcttggctgaacactaaagctttgtccttttcacaggataaattcctaattgccaagagccttaattccatcgacctgattttatctgttttaagagttgtgcagactgggcatgggggctcatgcctgtaatgccagcactttgggaggctgaggtgggtggatcacgaggtcaagagatcaagaccatcctggctaacatggtgaaaccccgtttctactaaaaatacaaaaattagggctgggcgcggtggctaacacctgtaatcccagcactttgggaggccaaggcaggcggatcacctgaggtcaggagttcgagaccagcctggccaacat

SEQ ID NO: 62429 - DNA, 5679 bp, Homo sapiens
ttgcttgaacccaggaggtggaggttgcagtgagctgagatcgtgccattgcactccagccttggggacaagagtgagactttgtctcaaaaaaaaaaaaaccagttagttgggcatggtggcacatgcctgtagtcccagctactgaggaggctgaggcagaagaatcacttgaacctgtgaggcagaggttgcagtgagccgacattgcgccactgcactccagcctggcgacagagggagactccatgtcaaaaaaaaaaaaagagttgtgcaaatatttctttggatatttctggtaaactattaacaagtgattggcagaactgtagtgttctgatgtgcttattttgtagccaccagaccttcagagcatattcacctgcaaacttatattgttagaaaattcctgaaaaatggaagactcaaaatcatcttgattgaggctaaatattaagggctagcctcaataagtcaaacttttaggcaatttcatcttaaaattgctcatgtttctggtgaaatagcccaaaccaaaactgtcaaagtaagaaagttaaactgctgactctgggacactcttttattacttggctgaccaaacattccagtttgctcaggactggggcatgggactgtcagtactaataccggggaattccagggcaaacagggataagttgttcaccctctcaactactcactatcttggatgttgcctgcctgccctgtctctgctgtagcaggtcatttatgcaaggggccagccacatcaggaagaaaagtgccgccatctttgaggtctcctatattgaatcaagatcaccaagtctgagtctgctgcagaattcatccaccttctctaacctagatacagattgtagcttcttcttagagactttatgccttcttataggaattgccgaagcctgaaagatctaaaaaaaggttcggaatccaaaatagtcaagactcccgtgatttagttcagatggaaaaaggctcatcctttatgtgccgagcattctttaaaacaaccaattctggtttccaaaaatgtatgacccttataccgccctattcatcatacctgagtttactcttcagggccctactatgtctccaaaaaaggagtatatgtcttccaaaaggaagtatatgctacaactgattccatcacgtggtatcaaattcagtacatgtggacggtaagtgggccttggctccacgtgtaaggtcctgttttgagtcacccctctgtgtcaccccttcccagactcgatttcagaatccaccttggttcaccattcatccttaacttttagcttacacctcatttgctttacaggacttacatggaatcagatctacttttatactccttctcaatgtgtggttgactgaaaattgctccactatccgggagcaggaaatggaccttgttttctagaaagtctcgaatttctaaggatagccaacttttatcagcctctcatgttttactgaccctgtgaattcagaggttgccaattttgatctccactgttctttttctctgcctgcttctcagcatgccctccttcactatgatagtacactttgtactacaaaatagtatatactttatggtaaaataaaattaagacagtaaactgacttggaaaatatattctggagggtaagtaagaatttttcctaaactctcagtgccagtgtcatgcagtgatgtggagagtgaagagctgacggctgtttacgcttttctttgtctgaagcaacagtgagtgaagtgactggctttagaagcccagtcttcttcagcagcatcaagaatacttccctgcaaatggagtctgtttgggatcctgagctttagggtcagaatttattagatggtgtaatgtttacttaaggaaagcattttcctgagtttataaggaaatctacccctccatgaaattctagaaagctataactaatacagaaggctgtagtccttgaagacttgattttatgcatgattggatgagatgccattgctgtttgctaccccatgactgtcagtagtcagactgagaagtgccctctaccaagtaccaagggccgggtactcctcagaggccctccatctgcctgaggtagctgcctgcagtgtagtatcacggtgagccatggaaatgagtcagccattgtggcagcttgtgaaccaccctaactctacctgctgtcagtttctaatcatagagtgagggctctgggtcagcgtgggtgcatggcatcaaaccagatggcttaacttctgaggtagccattataagagtctgtaatccaaaacatttgggaaccctgcctggagatcagtggttgatccagaaccatctgtagcctcccaggaagggagagatttgtgagaaacagcaggttatatgtttttctacccttccactgagtactaatgccattgccatgaccaacctgactttcctgtgatatgtagcaccaaatcctcctgctggcaagaccctgaactggtgttttcagccagatcacaaaagcttgaacagtaatttcttactgatgtaaagtgagaaactccataaatgctttttaaaatgttgacacctgccaagccacagcagtatggacttttccttccttgggatttgaataaaggaagattcttctcagtgaatatatatatatacatatatatatatacacatatatatatatatatatgtatattttaaaaattagtcaattagtaatatttagtaacctgctcttccagtctgttcaccgtctgtacaccatactcagccccttctatatcacacacaatactttttctcacatttccaccttctctgtctgtcagaatcctcaggccttctcaaatcgtagctcttctagtagctcctgacttttacctgtctctgtctcattggctcttacctaaggacagggatggaaacaataactttccacatatgtatctctcgtcacacctcaagtgtattctgagaggcttaaggacagagactgtcttaaaaattctctgtcttccctgtggttgctgcttcttgtagagtcagtacacactaacttcagtagagtcttttggtaggaacatgtgattgacagagtgagtaattcaggtaagtgataaaggaatttagagaaagaggggatattcctgtggtggcttgactgatgaggtcttccataatcctgaaagattagttggctttggatagatgggacaataggagagaaggcacagatgttggtgtgagcatgaaccagtaaaatcaattatttaaacaagcactcatggcagaaaactggctttgctgcccaggccaacacttttcacccatccacctttgtccttttgtcctgtgggccttccaaccagtcagcaggataagaaggtggtagaggccttgctgccattgacacatatccacgttgtcaatgctttgccgtcaccacagctactctattcttgtctcctaattccatggatcttcatttggctagactttgattgtctctcttgtaactcccaaaaatgatcttggtgctgcttgcatcatgtttggccctgctacccagtctgccctttgctcactgtgccctttgattttgtttgctaatgggttttgggccccatcactggtctggtctctatagttgcttcgtggccagctcctcaccaggtccctatgccacgatctggtgagctgagagctgtttgattgtagcagagagccctatggtctgtgggggggaggaagaggagatcagatcacgaggagtctctaattcccagagaggaagagtttgggcttgatcctgtgagcactggtggtaggtggttggaaagggaaggatgggacaaattccagaggtcttctaaggtggaatcagtggtattggtgggtaatggaatggccttgggcatcagaggaaagggctgaatcacagattatgctgaggttactgagcggttgagagaatagaatcattgacagaaatagggaagtctaatggggaagctgctttctcaaggaaagttgtttagcttggggcttgtccacaggatgtgcacagggttatgtgcaattatggcattagaacttaggtgggagctcaagaccagatgtgtagattccagatcagctgcaggtaggggaggttgtgggggtgggcagagagagacactaaagactgatggctgaggcaggccatggctagggtggaagagacagagacaggcagtaagaaaggtagggagagaaccagcagcctccagttccatggcagccagagaaggaaaacattgaagagggtgtcagaaactcaggaagaatgagggctgaccaaaggccatctaccttggccagaaaggatcagggatttttgagaatgtgttttcaggagtgaggtgaataaacaggtcagcacaatagcaaccaaagaagtgagtcaggaaacaaacaccagagaaggaaggagaaaaaatggaaactggaggagaaagccaaattgattgaaggtttttcccctaagattgagagggtaaatccaggggcccaagtgagagggtgaagttagcgagctgttgccccccgggaatccagagtccagatcagcagtgagacccacctgggctcagatgccagccctgccccctgctggccagtggcttcaccttgccgagcttctatttcctcatttgtaagatgggtataatagcacttatttcataggttcagtatgctgattaaaaaaaaaaaaagaacagcatgtaagatgatttataggatacttggcatgtgtaagagttcagtaaatatagctgctattattgtagctatttttattttaatattatcagctagatcagttgtacaaatagcaaaagacataatgtacacgaaggtcacacaagcacacctgaatgtcagtaggacatcagtgggtaagtgggtaaaagatgtgcctagataaattccacataaggaaatacatgtaataagcacctcataatgttaagacttggtaacaatgaagccttaaaacatgaaatattatttgatattcagaggaaaatatggcaatattgtcaaaattatattaagttggacatcgtattagtcgaagtaaactagtttatactgtggtaactaattacctctaaacctgcacatcttaaagccacaaatgtttatttctcactcatgctacgtgtttatttcaatgggcaggagggctctgctgattgtcatcccaccaggaccccagctgatggaggtgacatctcaacacctgcttccgtggtcatcaccgagccaggaagagcaatgtcacacctcacacactggctcttacaggctgctaccggaaatggcacttggtcatttcctttcccatttcattggtttgggtgtccaagggagataatacagtcatgggttctcagtttctgtttctggttggtccggtaaagccccttcctcatccctgttttttgcttatcactagagacagaaactacaaaccatggctttaggctgctaaaagcctacaaaagaaacagaacaataacaacaaaataaggcaggttggacaagcttgagagcttgtccagcccatagcccacagactgcatgt

SEQ ID NO: 62430 - DNA, 1680 bp, Homo sapiens
aataaatgtttgctccctcccttaactatagctaataaacaggatagaattttatgcagacgttcagaacttagcatactaattatctataaaaatagagaataagtgaaaaaagcagaagacaattatatatctctatctgagcaccattgttgtaactatgtaaatactctgctttcagatagatatagatgaaaaggaaacaaaaatgagaatatttttgcaaggcttgtgaggatatgggtgatttttaagcttctaatttcttatagctatttcaaattgatatgaaattaagaggactctgaatatgcatttcatctttcatagttttgaaagccattatcttgttcattcctaataataagcagtgacaccagcactgtcctttgcatttgtcctttatatgtaaagagagatggactttgctttagtaggactttctagaacatgcttatctgcatggtttggtggcgctctctcactttgtggacaagatgaaggtctggtgcctaagctggggtttctcaaggatggagttgttgaccatctgagaaaatgttttcctgtgcccacataccgtaggggagggctgccatttcaacagggctaacccacagccatcaacagtggcttctatcagctttttgtaactgttcctctgacggaaagctccagggcagctgcatcatttccttcctcttacatttgtgctcaaggctcaccctggtcaagaagcctggctgcatttcccagaggttcttttatcagccagtagaacctatgaccttgtaccctccgtgttgcccttgctgtcagtcggctcttgtttatccttccatcttttctttgtgaaatatcactcagagatttgtccataggagtgctgaaagagcttcctccatttatgtcttgactgcttcgtattccataaaaaaatagtttgtttaaccagtctcctagatagaggtttcctttatttgtaatcttttgctttcacaatgttgcattgaatgcttctgtattttcatcacgatgcgcacctgtcagtataggataaactcctagaggtggaactactgggtcaaaggggatgtgcatggaaaattttgctagctgttgtcctcaagcctctccacaccagcactgtgagcacatttccccaaaacgttgccaacatcaggagttctactttttgatatttgccaatctggtaggtgaaaaatgttttctcactgtggttttaattagtctttctttgattaaagagactgtgtatcttttcatattttagaactctttttatttccttttctgttcactgcctgttggtggcctctaaccatttttctgatggtcattggtctttttcctaatcatttgagggagctctttatgtactagggaaattagccctttgtgatatgaattgcaaatatttgttctcagtttgtcatttgtcttttgactttgcccatagtggtatttgccatgcataattttttttttttttttttttgagacagagtctcgctctgtcacccaggctagagtgcagtggcgtgatctcggctcactgcaagctccgcctcctgggttcacaccattctcctgcctcagcctcctgagtagctgggactacgggtgcctgccaccacgaccggctaattttttttgtat

SEQ ID NO: 62431 - DNA, 5022 bp, Homo sapiens
ccaggttcaagcgattcttttgcctcagcctcccgagtagctgggattacagacgcccgccaccatgcctggcaatttttttttttttttcagtagagacgggctttcactgtcttggccaggctggcctcgaactcctgaccttaggtgatctacccgcctcagcctcccaaagtgctgagattacaggcgtgagccaccacacccagcctgaacgtcttttttgtctcccctttaggaaagatacaggttttcgtttctctttcgtatgggccctgtctgcctttgccatatcttcgaattttcctttctgtttagtaggcatggtcttccacctctctgagcacttcttagaaaactctgaggagttgactgaagcatctggatgtttgttcttatgtgcctccctacaagtttgcacaaaaaatgcatatgatggcattttctctcttggcttcttagggtctcctttgcccatgtttagttatttttcctcagcaaggcacagaattgcccagtgcccatctggctctcacttgccccagtgctatctctatggagctcattgtactgcaatggctgtgatatcgggagccaggtgcagcctcctcactctctccgctctataacattgctctccagccagcgcagctcctagttgattagcgtgttcttaaaagagcattctgtgtaggtaatccaggggcttcacatttaggtatttgagttttcctccactaggaatagtggcaaatataatgtgattttccagctctaatcttccctccccataacgctggcacagattttgaggtagccttggcctgggaagtagccaaaaggcactgtgttggacaaagagcagaccattggcatctatgtgcatgtcctcaggagagaggtgactaggcagatggggacaagacacgggtgctctgtgttctgagcgtcagcgtacatcctgtttggttagcacagagtgagtctgggaactttgcacttagcaccttggcagcccaggtctgggaatagtggtgccttctcctaaagttaggtcactaatctttgactggctgtttgcaggaccagttctctaacggatccagggttccagtggaaccctggagactggaactctggagcttcttaataaactgcctccctacttaaagcatggtgtcaaaaccaggttgaaatgcaacgtgaggagagaggactgtgctttggtgtgcctagggaggatgtgaccagttccgcgtgctgtttgtgaacaggaagatagtgggatcagatgcatttaacatgtggatacagttctgaggggttttaactggttttctttgaactttagaaaagcacatttatttttccttggagcaaaaaagtagtttctttttaagtggttttattgtaactcatggggctgttctcctaacattcatattttatagtttgcacgatatgcacaaaggtcacagatgtaccagcctggcccagtggcctccgtcctgtatttagaaaccagttcgggaacggaagaggattgctcttttgtttcctcaggccacttttggtcatttcaggcagaaacagtctctgcattggaattttcctgtgcagatcctgcaattcaggaatagagcatttagcaacaacagtgaaaatgtaatgtgtgacagctgtggagaagaatttgcctccagtgaggggaaaatgctgtgttcaaagtggatttctgatgagcctattaatgggtgtttgggaagctgaatatgttgctgccattttgagatgaaaggcccaaggtgtttgttcctgaagctaatgaggaagccctttcccagcctcagccttacctccccagtaggactggtgagatgtgcacacagggtctactccacatctggccctcctgaaaagaagggcttccagtgggggctgtgtcctagtggagaagggtgaagcccagtgggatgggctcacgaaggacctgctgttgacctgctggcttcaggtccaccaggctaggggtagataggccagaaaagaaaccagaggtgtctgtggtaggagcagcaagggccctggcttccaggcctgtggagcagggaggctctggcagttcaggatctggaaaagaactgacaaaatgttctcctaaactctggcccttgccggcttccttacctttcctgtgtgcacacacatgcatgcacatgcacatgtgcacacacaggaaggcctggaactcagtttgcagactcgtggagctgccacaaagcttcactcccagtgtttcccccaccactgatgcttgtcctcctgggtttattctcacccatgaaagtagggtaaaaatgtatccccaaatcaaacacctgtcacctttctagaagcacttccatcctctcttgctctcactgtcatcgctctcctggatctttggggagatattcagtatgattttgttaacattctggccttatcttagagataattaaatgtgaatattcaaattaattagcccccagatgtatcttctgcagaaaaaaactcctctaacaagaagtcagttacagttgtgagaaacatgcaaaacgaaagaaatgttttttttcaaagacctgtgaagaccactgtagagaagctccaacaaattcagttttcaatttgaagaaacattatttaatatagaacattttgacagttgatcagacaggagaaaataggcacaaagctgttattttaacttctggttgggggagttgatgagtcttgagtgtgataaagtaaggaacgctttggactgaatcagagacctgtcctctaatcctagctttttttttttctttttttttcctcatttttaaaacggggaagacaccattgctcagaattgtgaagattaagctagaaggccgggcaggatggctcacttctataattccagcactgtgggaggctgaggtgggaggattgcttgagcccgggagatcaagaccagccctggcgacatagcaagaccctgtctctacaaaaaaaaattaactgggcatggtggcatgtgcctgtggtcccagctactcaggcggctgagatgggaggattgcttgagcatgggaggttaaagctgcagtgagccgtagttgtaccactgcactccagcctgggtgacagagtaagaccttgtctctaaaaataagtaaataaataaactagagacatgactcacccagctcctgatggagagatttggtgctcagaaatatctctcctctctgagatcttggtactccccatgatgcactaagtgaaattggtacttctcagcctcatgattgtctccccatagtatcatcctattctatctctctgaccccattgcccaccgctcctgtctgtgacagtagctgcctgtgtattcatcatgcatcctaccttcagattacgaatgccaccagggcggtcactgtgtccggctctaatctctgtatgcctcacagcactcgtatttgttgaattttattaaatcaatatataagagccaaaataaaatataggtagaggcaggttcggacctgataacatctttggtttggccccaggtgccagcagcacactcctagttgggcatcctcagtccatgttgtcactctgaaaacaaatctgtttgtcagagtaaaggtcacctttttttctcagtggacaaatatttttttctgaaatgaaaaatttgcttttcttcccttgagtgtgtgcactcaagtaagcagagtggagggcctgtgaagatgggcattctctctggaaactgaggaaacatcccgagcctatgtctcctaacagtcttggcacctaactagaatctgaccggagtttcagcacgcagccagcagaggacatcaccagccatttgagtgtgcagttgtctggagcagccacgcagcaggtctctgtagccctgatggagagagttttcttcttgggagggcttcccaggatgatgtaacacctctgcgttttgcctcagtggctgaagagtccctttggacttgggttttgcagaaagagaggggagtctgagggcagagtgtaaagtgacacagccggtgtgtagagctgagcagcctgtgttaggaacagtcagagcctgtggacttgtgaggcttccactcacgtgctatgttagcagttcttttcctcaagctctactgaaagacctgtggacctgacattttatggtcacaagccctggagaagatagccattcattttgctggatgaccttttaaataaacctctagagtaagttccaggcaaatactggaggtggctgtgtttgcccaacagaatccagcaaaaacacttctctgtgcttgaaattccttcttgtacctgatgctttggaatttaggcaggtgataaattaaagatgaatttcttctttttttttaacgttacaatatagttagctattatcttgatatgctttctaatatataatggagttacatatgtacatttaacttatgcaaattcaactctacagattgagagagagacccccacacacacacagacacacacatacacacaccaccttatttgtgctgacccttctgccagcttctccattcaaaggagcacaggccccccctgtgtgtgatctgggagcctcacgtcacctctgctggtaccagggcctgtgtgtctctcctgcgagagagagcaccttactgtatcttcacgtttaaagatgtgtttttgttttccatttcctttgtttcacaacatggccttaacctcaagccaccagtgccatctgtgcttatccacagccccagccatcttcgtggcactgagggagaactgcctggctccctttgcccagagacagtgtgttactaagggatgctcagggcataactttattatagttaatagtttagtttcacttttttttttttgttggacagagtcttactctgtcacccatgctggagtgcagtggcccgatcataa

SEQ ID NO: 62432 - DNA, 977 bp, Homo sapiens
aaaaaaaaagttaaagcaggaagaggggaagagggagttactcctgagtgatccccctttgttgtgactagtgttgtttagtacttgcctgagccccagaacttggtctctttaccctttctcctgtttagtgccagcttctggcttggaagcccacgttgaccagctcctcaataaacagatttctatcaggaatatctaccagggttctccgtgttgctgaaaagcccctagttcaagataacctttaaaatggccagcatcagaatatatacatgctaatttgatatatttttaaaggtagaggttggctgttgacgactccagatatgtttggtctcatcacattggttctagataactaatatttttaaaggatgactaatagactcataggagtctctagaatgaaagcatctgtctgtccttatcatgtttgttttatcatccaaataagccctggacgcagtggccaaggccccagttgaagtctcaaccctgctcttgactagcagtgtgaatgtggccaagccatgaactccctagcctcaggatccctgtggtaaagtggggttaacagtatctgcccatttcacaaaattgtcattgaaggcaaatgagatcattttaaaaaggactttgaaaaactatgaagtgctgtatagataaataaaatagcagttttatttattatgccgtgttcaaagaaaaaaggtaaataaattcttgatgctagaaccactgagattagtacctcaaacatccttgacttcctttgttaaagagcttggggggacatccttaatgtttctgaagttgcaaagggagaggccccaggtttcactccgggtgacataatttctttgctgtagtaagattccagtggcatttgccttagcatgtatctcgttcttgcagctaaattagagcacggtaactatttcctctcattcctttttaatctgtgaaatcatgag

SEQ ID NO: 62433 - DNA, 3960 bp, Homo sapiens
cacttgtaatctcagctactcaggagactaaggcaggaggatagcttgagggtaggagttcaagaccagctgggcaacatagcaagtccttgtctctaaaaaaaaaaaatttttttaactaatagggtactctactgggtcaggccaggtaaacaaccctgtcatgtgggtgaggtcaataacacttggaaatcaaggaagatgaagaagtcatgaagattttcttgaagtgtatttattataaagagcctaatctttaatcgaggcactgcagcagtagacatgttggcttactctttattgacttaattgaccttctaaactaaacaatgtttggaatgtgagtgtttttgtcagtgattctgtaggggcccagtgaattcaggcagcattctgcttcttctgtctctctttggccgagtgccttatcccaacagtccagtattcatgttcagagcaaagaagaggtagatcaaatccactagccaaagaataaactgaaaaccagaattttccagcttgtgcttattctggcctccatatcataccttcatatcttgaaagttttatcaccagaaaatcaagagccaagtaacaaaggatcttattagtttgatcttgatttaaagagagaaaaaaataggattaaaaacaatatcttctatgtcaagtgaaaggaataaaaataacctggctctggctccccaaaggtaacgagtcccttaggatcatgagccttctaagaacttagtacccatctcccaccaaaacaccaagctggggcatttggcattgaaaatggcctcgaatatttaaattgcttttttcctgtgagtttaaacagggaagaagtgggcccttcccttatttctaaactcttgactctcgggcattagacatcaagctgtgaggaagtacgtgaaatcacagcattgaattctcttgctgggaggaggaaatctttaatgtccaactgggtttaatacaggaacttttttgttttttaaactatcttttggattaaggctgcagtgaaccgtgatcatgccactgcactccagcctgggtgacagagtgagaccctgtctcaaaaacaaaacaaaaattatctcttgggctgggtacagtggctcacacctttaatcacagtgagacctcatttctacaaaaaataaaaataaattagctgggcatggtggctcatgtctgtagtcccggctactctagaagcgctgtgcccaggagttcaaggctacactgagctgtgatcatgccactgcacagcctgagctacagagtgagaccctatctcttaaaacaaacaaacatatatacaaacaatcttttggaacctcaaggtaaggtcagaaaacttggtcttgcttagaggacgggacttcagtcttagaagggagggagaccccatctccctccatctaattacacattccaattgagacacttttgagagtaaaaagggactttattaataacgttataataattcataactttattaataactgcatcagaacaatacattccaggaccctcttggagagactaggatgtagggttacctacctttagcatgctgtagagatcacccatgatccaagacatctcactgtaagagcttcaggcagtgatttttaaggaacttctattttgtttttactgcttaatatcttacaatcttctattagatcataaacataggtgtttcgataagcttctcatatctaccattttcattggtgtagactcaattttgaattgtattcatagttatgaattgtgttgcctctgcattaaacagttgagttttataatggcagaagggcacaatgggaagggaggaggaagagatgggtgaagggagagagagaatgtgaaagtgaaggtagtgagtttgcagaactcagacatcgtagtaaaacacctggcaagatcgtctgctgagagccaggggccaggagcttcaggaagtgtgtcagggagtcatatccaaagcagaacagtggccaagagtggtgagttctgcactttcaggatgatatctgaatacttaaacctttagccataagagggcagttttaggcatcctatacctggggaaacaaggctgaaaacactcattttttaaaatccttatttcagagataagggcaaggccaactaatttgatagcacaaaggggccttaactttatttctacagctattgtattcctggatgactcagctttaagatagtttccccttgactttaagaaatgactcacatacttttactatggaagtgacaggggctgctaggcccctaaccgcccacctgtcagcgagccatgttagcttaactgtatttttctcttaggctaaacttagtgggaaagatattcaagtacctctttcatgtcccctgcttactcatgctggcgagtactgtgtgcctttattccagacgattcaaacttccttcttatccacctgacattttgtggcatatccacagatgccatgcatgggcctggcatggaacatacagagatgactcagagtctccatccacaaggaacaccaagtctcgagtccctgtattttagcctatttagtcatgctagtgtcatttggggaagtggctgttgaaataatagctttcaggcagcctttgccttgtccttctttaggtgtaggggcttgagaaaaaggtgaggggtcttttctgttcccagcaagttgcctttccaaaatggccgtgcaatactcatctgtctaaggcccagctagtgtttcagatttcatcttactttaaaaagcggcagcaagattatatagttacctagtgctaatcccataagaattaaatacatagagcctcatttaaaaacagattaatgtagctgttagtaataacaggccagggagaggccccaggcactaaaggtgtttggtaactgacatcaggggaggtcccaggaggaccttccagaaggctgatcctggagctgggcaccatgtctttgcccttcccttgcatgggagaggtggcatctcttcacagaacatccagcagtctgtctgacatcaggcagggttggccctttatccagatcagatgtgtttggatttaattaaattgaggctcccaaagtgcctacacaattagctgtaattgctcctcagtagtgtagcaaatctgagttttgtaactgtcccaatgacatctgaacatctgctctaggtctcaaataattagtctcaaacctgagtaatgatagatgggtctaaaaggaatcaaagctgggtgcagtggctcacacctgtaatctcagcactttgggaaaggaagccaaggtgggcagacctcttgagctcagaagttcgagaccagcctgggcaacatagtggaacctcccaggcaagttcgcccatctctacaaaaaatcagaaattagctgggtttggtggcatgtgcctatagtcccagctactcaagaggctaaggtggaaggacgtcttgagcttggggaggtcaaggctgcagtgagccatgatcatgccactgtactccagcctagggagacagagcgagaccgtctcaaaaaaataagaataaaaataataaaaggaatcaaatggttggggggagtaagatgtttaataattgaagcataaatctctggagtactattacctaagtagatttgtgatataaggcaaggggcttgggctttggggttgacatggtccaaagtctagcgttggactttgagtagacacggtcatgagtagacatggccctactcattatgtgagggtggacaagtcatttcatgtctttaaatctgcttccttgtctgtgtttaagttcctagaagagaggctgaacactgtacatctgttgtttcatccattcatttaggtaacactgattgagtgcccaccaagtatctggcct

SEQ ID NO: 62434 - DNA, 1611 bp, Homo sapiens
ccgagggctgggagtcgagtcaggttccagactgaaatgctccctgatcttagcattccttcacttgccatcccacaggcacctcaaatttggtgcgtccaactctgaagggctcatcatcaccccatcatccttttcctgtgctccctgtgttagtcaactgcaggattaactccccgccccccaaccccagtcgctcaagcctgaacattcctcaacaacgcccacaccccctcaaatccggatatttgggcttcctaaatctctacctcctaatctctttcacatgcggtccactcctttctgtccccattgccaaggttgggccaccaccacctatctttgggacaacttacagtcttctaaggggggtcctgccttcggtccgccccacctggctcatctcttttcaacagtttctgcggtcctcacctgcccgagacagcagtctacaatgcgaacacagtcatgtccttccccttcagcggttccccactgcccccaatatgaaaaggagttagaaacccctgccttcccactcccaccgagcaccttcgccttctgaactggccaggggctctgttgcttgctcgttgctctcagaccctttgcgcaaggtgctccctcaacccaaaatagaatctcggcccaccctctgtcggtcttcgccccactgtcagttgttcatttaacaaatattcgctgcttttgccaggctatgcaataaacgctggggttacgcaaggggagcgcaaaacaaaacaaaacagagaacaaacaaaaaccacaactcccaaaagtccattaagacccctagccacagggggcttacatctgaggggttaccgtcccttggcacaaggtggagtatgaaatccgcctctgccttccaggcttttccagtgccaagacctgcggggccaccaattgtgagtcccctcccgcactgactactccctcaacaggacaggagggaagctgaacctgtcgggacaccgcgctgggcacgctcaggtcccaccgcgcgtgctcatcggcggtccctagcgcgagttcggacaggcagcgcccccctccgactgtgagctgggacgctcccgcacgcttcccggcaccccttcagtcttcatggtacaccccgcccgcaggtacccggacggcggaagtgagccgcgggggcggatcttgttgttacgggtaacggaagtgtggcggcgttgggttgagcgggctttttggaagtttgtggcggaggtgaggccgaggtgactgcagagcggctcgcgaggtgctcgggctgtgggactgggcccctgggagggagcggttctgtgggggaaaggaggctcctgtcctgacttggcgttctggtattttctctggcgtggaaagtaggcgcgctccgctgtctcccgccgcctgcctcagctttcgcggttccctcctaggggtgtgcctcagtcggagccccttctgttaaattcttcccccttggccgagggtgagctcttacttctgagaaatttcccttaaccttgctttgcatttgttgtccggtcgcggtctccatcaccagctgcttcgtgttatagtttttgtatttgcgctcac

SEQ ID NO: 62435 - DNA, 598 bp, Homo sapiens
ttccacagttccagagatggccacctatcagcaattggtgtgacaggtaaagaatctactctatgcctagcgctatgccagacccctcacctacacggtcctatctaaattccatgagagctgtagctattacgcctgtcacggtctggccaggagcaggtgcccagaacatatttactgaaggagtggacagaaatcatgaagccagatttgactagagtcctgcctgacccagatcacagggtccttttcatgatcctcactaaatacctaaaggccctcagagcccagtttctacagacctgggagaggaagagcaggggccagaggtacagaggtcacatacccgggcattgctggcggtgagccatgtgggctccacagcccggcgagtgatggtgccggcagtcaccacttggggcaggatggccccatagaggccttcctcatcatagtcggggtgcctggtggggtgcaggggaaggaaatgggtcttagcagggtgctttggccttaggacctaccacctcacctcagttctcctatccctacaaccactcagcagaccatacctgatcacagcacggggcagagctga

SEQ ID NO: 62436 - DNA, 2176 bp, Homo sapiens
cccacgctgggagtcagaacacctggctttgggctccagcttggcttcttttactggctggaagacgtggagagagacacgtcctgtctctgctctcctgtcagtgaaatgggtttgaccatgcctgccttccaccccaaatcctaaaggagacagatgatataaagcgttattttaccatatatgtaataggtgtatccataatcatcattccttgagcatttactgcgtccccaacactgtgccaggcgcttcagttgcattttccgttaagcctcaaaacttgggaaacgtcaatacccctcctgggggaaccggggtccacgcaacttcgtcagtgaacccacgtggggaagccgagggcagcgagtaagagagcagtatctggagtagggcgacgcggttttgaaccccgcttctggctctctcgagctgtgtgaccttgggcaaagctccttaggccctgatatcctattctgtaaaatgggattacggattctgcctgtcacaccgggctgctgtctgggggacacagggcgcctatgtcgtgcggccctgctcttggcaagcgctcggcaaatggtggctgccattaccgcgaccggcgcgggcctagcgtcgagaggtgccagcgcccggattcgaacccgcagggtgggccgccgtcccccgggacccacacccacacccggaccacggcccacccggccgagagcgtcctgcaggaggagtcggcggccacccccgtgcgccccgccgcccgcctgcgcccggcagaggcgccgcggtgcgccctgggactagccgccgccctgctccgggcctcgctccctgactggagagggaggggccgcgccgtcgctcagcgacccggcctccccgccgccgaccccgccggaaacctcggtcctcacggtgcttcccggtctgctgctcccccgaccccaggcccacggcacggcgtcccccttcgcgcggcctacgcagcctcggggtagcgtgtggcctccacccggccggtccgcttcgctggcagccgcaacttcccgtctgcacccagctaggtcccgcggctacccgagaggcaagcgggagactcccagcgcgaccaataggagggccgccaatggagcggtccgcccgcggggggagaagggggacttctgggtgggctctccctgcggaacgcgcgaaccaaaggccaacctccccttctcaaggagcaggtggattggtcccgagctagctggtgggcggaggtgacgtttttataagttgctcaagagacggtaacaaccgacgggccgcgtggcctaatggataaggcgtctgacttcggatcagaagattgcaggttcgagtcctgccgcggtcgaagggaggttatgattaacttttagtttattcctccctcaggaacgaagtattgggacaatgtgaacgtagtcgccgccgattcccaccgcacttcaaagatgtgggaacgccaagatccgcggaagtaaccacgcccagcaagtccctgcgagattgcccgcctacgtgtctcagcggaggcacatttctaaaatgtaccaggtctctcgcaccccgacgcaggtggaggaaagtggagagggaggggcatcctgtacagaaatctcaatttatactcaattgatggttggcaagagttggggctcgcagccaaagcgaggctccctccctcgcccatccggtgctgcctcctcgtccagagcaattctgaggggtaaaaatgttgccttccgttgaacctgaatttgcccgcagatgctagcctccggcccacagcgcggctggagcttgtccccttccccagctgtttccagtctccgcatccgtcttgtgttgctccaggtgcttcaacagctctcagcgctcggtggttggtgaactgtggtaaagtgcacgcagaataaggtctacgtgattaagcaccgcctgggggttggggtctggaggcccagctgcacagatgaaagggaggctcagagacgtttgggaccaaccgagatcacacagctgattaggaataaaattcaggtcaagctgaaagtcggccgccaccgtccagcgtggatcccaggacaccgtgaacggactacagaagttgactttcgcgtttttaaggagtggggtgcagggaaacaatcct

SEQ ID NO: 62437 - DNA, 766 bp, Homo sapiens
agaggcttgcaatagagtctgctgataagcactggctggcttcttttatggacatttggattatgtgaaccaggaatgggacaatatagaactattattattattattttgagacagagtcttgctgtgtcgccaggctggagtgcagtggtgcgttgaactattattaaaaggcagtgtaacatagagtctaggaatttggactctgggctctcatcctgtttcagttgctgattagctgagacttgaggcaaattgcttaacctctctgtgcctgggttttcccatctgccgggtgaggatagtaagagcagctctggcataagcacagctgtgaagattaataacaaagtgcttggagtcgtgtttggcacagcatacccactcggtaatcgttaactgttagcaaattctcaccctgtgaacaaatctgaaaaatgcaaatcctaaaacattttaaacgttaatcaataaactcatcattctgagctggcgtccaaatggattgcaaactgtgtttgtcacaattgccacgtggtggcgtgcctgctgctggctctggggaaattgaattatgccagttctgaatggtgccagcccttcaggaggctggccaccatgagacgtgctagatgtcctgcagtacagcccaggggctgcttaggcgggaaggcacacagagaaaaagggccgggcttggcagaagggggttggggtcagagggctggcaggagcagaggacagaatcctatgcaaagcaggccag

SEQ ID NO: 62438 - DNA, 992 bp, Homo sapiens
gcaatccccgggctagtaggaggaaaagtggctcctctgggaacccggatgggccgaacagcagcttccggcagaggccctcaggtttcagagttctccaagtggggagaagggcggcctgctcagcccgcgcacccgtggcagcaccacagagggaataaaagcagggtaaacaatttgaagatccccacgaaggcaagagagtaaatttacaaactcatttgcgtccggaatacttgcttctttttcactcatacattccttctaaaatgtgggctttctgtgtacatgggcgcgcattcccaggactcggttccctgggtggaattcacccaggaatacaatcgattttctgaacctgcgtaaggccacaggcagctctgaaaatgaaagcgtttgctaagtgggggagatctcaccgatcgaacgtttaaaaatggctttgtcttcattcagctctcccgatttattctgtgttttacaaatagaagctcagagcttctgtcgcccagtccttgcatgactcatggcggtggccacacgggtttcagggataacgggatgtttagaaaatcgctgcatatcggagtttcctagcacgttccatttatactgaacgcaggcggccgctgaaaatccagcctcgactcttgctaatgactgggtaggaccctcggggtcctgcgacggtgctggagggtgttcccggctccgatgtggggaggcctgcgcggggactaggttctcgagaggcgagcgggcgcgccagagaacccgagactgctgcggggccggatgcgggatccctgggctgcggttctacgcagaaacgccaatggccatgcctccccagctcctcccagccccagtcactaggccggcgcctggcccggagatcctcccagagccctggcggtgccatcatgccggagaagacaagctcggccccgctggaattcgctccaaacacagatgctcatttttggaatatt

SEQ ID NO: 62439 - DNA, 567 bp, Homo sapiens
cagcctcggccgatcccctgggggtggccccttctgctcagtctaaaggctctggcctgtctaggaaagggccagaaaagcccttcaccctggtttcatcccttacctctctgtccacctctcacccccacagagggactgaggatggcgctcctgggcttatccatatgccccgggagcactcctgaaggaaatcctggcccacctagtggccaatggctttcacccaatctgttttcttctgggtttgacgaggcagtgactcaaggtccagaggtcctttcctggaatccagaagggcattcctagccccaggggccaggctcaggatatcagccctccagagagaaccagccctgctctagcctccaaaaagcccaggtccttctggtgtcctcgggagcaagctcgtttctggacttctctgcagtgaccgaacacttgctgctgacacttccttctcatgcctcttccttgcctctctcttctccttctcttccacccccttctcctgtgcttcctccttttctcttttctattttccttcctctcccttcctctctattc

SEQ ID NO: 62440 - DNA, 1505 bp, Homo sapiens
aggtcaggggcctgttctgcaagttagctgtgtggctgtgggtaagttactcaacttctctgtacttcagtttcttcatgaggtaaaatggagataataactgcactgacctcataggattattgtgaagattaaatgaattaataatatatgtaaagtgcctagagctgtgcctggcacatagaagtgccttgtgtttgctgttattggtctttagtcttctcctgtcctggactgggtactatgtcattggtttcagtcttgcctctcctcacaggactggggaactttagggtcagagtgcctgcgcctccctgcactcctgcctcctagtactttgcccagtggaagtcatatggtaactgcctaaccagttgtatttgctctaagaagaatgaatttctggccatcatcccatatggaagtaaacatgaactctggccttttctcccagctgggggataaggggttctgatctctgagatctctctccacaccctgactcccaataccaccctgcaccccagcctcctgccagctggcagcagggcagatcccaatggccctgaaatggaacagtgaggggcactggtggtgagggtagggtgggtggtgagaacagtggccttgtgaacacctgtggacagggggctcttcacattcacagggaaactgacaacccaggtgggtccagagggaagtggccagggtggacaaggccttcaaatctgagaaacagagttgttggggttgccacccccagggaagagaggaggagtctttacatgctgaagggggacctggggaggagagaagaccctttctgagtagcccaggaggcagggaaatgcatgcactgcaggttctgtgtctggactgataaccattgttcctaatgacctttgttcctgagcaatgtgtccaaggcttgacactgctgtgtgccacagccccatgctgacagtgaccacagcacacaccccaatgagctagtgctaaccgtcccctgacagtgccctcccttggttatcttagtcttctgcatccttaatgcatcatacagaactggggtggggggacagccagttcctgtttgctggttgaaggaaggaatgaacgggggcatcatgtggtgggggcagggcagaagagacagagggatcagatagagctgggttcaaaactctgctcctcatctcctagctctgtggcgttgggcaagtcactcagcttctctgagcctcagtagtcttgtctgtgaaatgggatacccagtacctacttttctgtgttgctgtcagttttggtgatctactgtgtaaacaaagggtggcacagtgattggtgcctctgcctaaaggctcaagaaacaaagtaagaacttctttccaaatctctgcttgtccctgaatctgtgtgtagtgagactcaccctttcaggaccccgtctttctggcacctctgagtcctctgctgctcccaaacttccagcctcagcctgtccc

SEQ ID NO: 62441 - DNA, 1315 bp, Homo sapiens
ctctcagggttgctgggaggctaaatgagctgaggcacataagaccctcagcatggtgcccagcgcagtcagtgctccctgccaggctgtgtcaatgttcacaagtcaagaacaaagaggggacttgaactacaaccatcaaacacaccgatggggcagtctgtgtgtgcaccccctgtatccctgtggagagaaactcaggctctgcagggctctctaaggaccttcactttaccaggaggagcttctcagttgcccacgtttgtcagatctacctgatcatgtgacccagtgctggttttggaaagaggggcctcaacccagatctctcccagggaggtgaggcaggagaatagggtccgaaagcagggaacctaaggccgatgcatgctgactggctatcagaggctactgacttttcaacccctcctttgtctgtgtggcaattgaaaaatgaaagtacctctgattggtcccctcccacagccaatcagactggtcgtgggcctactcttcccctccagcaaccaatcagactggttgtaggccactacttcatttgcgtagagtgaaccaatgggaaacctctagagggtatttaaaccccagaaactcgtgtaacccatgctcttgaaccacttgctccaggcatctcccaccctgtggagtgtactttcgtttaagttaaatctctgcttttgctgccttgttttgtccaattctttgttcaaaaagccaagaacctgggcaactacgcttaactggtaacatatgttggggaaccagccaggaggtaagcccaaagtttaggatttatttttctctttttcctctttctctcttcctttccaactcaggaccctcaggagatagcgcctatgcacagaggcaactgcaggtttgtggccagggctactctctggtgaaaacaaaaggtttctatgtggaagcgcctacccccaactgcccggcttgggtgagggaccaagtccttttctttttcagtctttcagcggccgtttcctagcagctccttagtaattgagggcaactggccaggaccactctctggtgttacctgaaggccaaggagtgaccggtgatagctgcctgcctggaagggggaagggctcttttccgtcttgtccagttatcatccctgaaccctccatgtgatgcagttggcagtggcagcccatccagggtgaactcatgtttcaggcgagttaaaccttgtttccttatgctaaattcttcccttcccctactcaactggctaaggacaagtcagagggtttgcgcagatggtttgtgt

SEQ ID NO: 62442 - DNA, 1164 bp, Homo sapiens
tgaacttatgggctcaagtgatcctcccacctcagcctctcaaaatgctgggattacaggcatgagccaccacacccagcctgccacaacataacttttatagcaggatatactgtgctttatctagacaatccctagtgttaggtgacgagcgatgaggtcattttttatttgtttagtattacaaatcatgctgtcatgaacatccagatatgtaagtctttgcacaactttctgtgaattcctggaggcagagctgtttcaatacatatctctagatgttcccctagaaagattttacgagacaaagcatgcaccctgtgagccaggggtcagtgacttttcccatgcactcttgccaatgctggctttaaaaaatcttgccagttgaaatcccagatttgtaaaagccactaatgccatgtataacatctgaggctaagcacctaatcagggtgcttggaacttgagtgtggccacactgtgccagcttggggtaccagggtatccccactcccttggcaaagaagcagccagacactgcatgagcaataccagcaatagggaccatttattaagttcctgcggttgccggatccttttgatatatatttaaattctcaactaaacacttgtgaagtggacattgtaggtacatgctacagttgaaaaacctgagttctcagattggctaaggaacttgctggagattcaaaccctgggctgtctgatttcaaaggctgtagtctttctactgtgccattctgcttgtcccctctggaaggagcgagaaggagggtttgacttcgtgcatgtgcattcactgctggggagaaaaacttcaagtacacggcaatgggagtaagtggagggagggagacaagggctggggtgggggaggctgctgcaagtagattcatgagcatctaggttccccacaggagcagtggcgttatgggatagagggcagtgggtggcgtggtccctgaagcctgggccgggagggggcaggtggaagacctgctcaccaggctggcctgcttaaaggatagggaagccggggtgtcttgctcattgtgagaactgccctcccatccagacctcctccagagtcccctagcacacctgtggtgctggaacccgggacccccttgggggactcct

SEQ ID NO: 62443 - DNA, 885 bp, Homo sapiens
ggcctgtgacaccatgccttgctaatatttttattttgtagaggaggggtcttgccggtcttgaactcctggactcaagtgatccttctgcctcagcctcccaaatcactgagattataggcctaagccattgcgcccagccaagacttatatttgaatgtctccctgaatgagagctctccccctcacaaagtggcctgtgtcccttgttggacagctttgctgagctgaaatttgcctccacccccctgttccacactctgccctctggaacaaaactgagcaaacctatttcctcatccatgggttggcccttcacatatttgaagtcaaatatgtctccctttagaagtgccgccatcatgttaaatggctccagttcctaacttcgtttacaaatggttcacactgtggtctggtgaccccctctcctggacatgctacagttttacattatctttcttaaaaatatactaccctcgcttgagcccaggagtttaaggccagcctgggcaacacagggagaccccgtctctacaaaaaaaaataataaataataataacataattagcagggcatggtgctgtgtgcctgtggtcccggctactcgggaacctgaggcgggaagatcgcatgagtccgggagttggaggctgtagtgagccataatcacgccactgtaccacagcctcgatgacagaatgacaccctgtctcaaaaaacaaaaaacaaacaaacaacactcaaagacagcactctgggtgcgatctgcacgtgctgggtgtagtggaacaatcgtttatcatttccggggtgctgtgctgttagtaatgcacctttggcagcagtcacataattaagttttaggtcacctaggaacctta

SEQ ID NO: 62444 - DNA, 890 bp, Homo sapiens
agaagggcctcttcatgaaaacagacaataggaaaacaaaacttattttctttgttgctggtggaattatatgtattgttgactctgttaagtcacacagtgtgggcaagagaagaaagaggcaggggtggggaattatgaaagatccttggtaataaattacgtatctgtgatgcaataaagtagggaatgagaaggcaggaaagggaggagtcaagcagggaggcttcaaaggagtaatacgctatacgtttaatacttattgatccaacctgtgcttttcaaatgtaaggcagtagagaagacaaagtatttaaagaagtggcctctgccctcacctcaaggttcagcacaaattatctgtgaggctgtgactggacagcaacctgagccaaagggcagttttcagccttcagagtagtggctttgggccagagggaacatagggctttgtgcctgaaagctctgccaaatcaaatagtcctttggctgctttagctgggagtgcagaatgtgggtgagaggtgagaagtggtgaaagggcctaggagagtcccgagggaagacagaagtgttagttttctagcagtagcttgcagggcatagagttctatcttctttccttctccgtacctacctgctttccctacccctccaccaagtgagagcagggacctaggtcatcttgctcacaagtggatacccaaaaccatgcatggcactcaaacattcattgttgaataaatgaattgtcaggcaacaatgctcagttgtgaatgtgctgggctgtacatctacgaagaacttcttcgatttttggcatccctcatgaatgtggaggctctggggtggaaaacattagttacaaagaaggattcacagggtggtac

SEQ ID NO: 62445 - DNA, 834 bp, Homo sapiens
ttgcagtgggccgagaccgcgccactgcctgggcgacagagcgagactccgtctcaaaagaaaaaaaaaagagagatatttgaagtcacaccaagtggtttgcttccctagccacaaatactaatccaaagtttctctttaaaggagatccctcggaagaatgttgagtggagagaaccaatctttctgtgcccggagagcaaagttaggaggggaggaggatctgtcagccggtgtcccgtcgtcggcggtctcgaggcggctagggtgccaggcactggggctttcgtgcacggggctaggacgggacgcgggtgcgttgggcccactcacgttgaatttagggtaaggaggggctcggatactaaactccctccgtaggagctggcaacgtccttcctgcttccatctactaggctatcacctcctttttcccgggtgcaggggaataggcacgggagccgagttagggcgagaaaggggcggaggccgctggcacctgactcacctgaagagtcggtcccggccctgggtctggttggtgaagcgggtgaaggcgtccatggcttctagcccaaaggccacgagtcgcacggggctcaggcgtgggtcctctggggcccgtcggatccccagggaacggtcagtcccaggttatccgctgagggggaggggctgagtctctccgccccagagggggcgggcacactttctgtagagcaacttcgcggacttccggttcaagccggaagttgtggttaccaaggcgacgcaacgccgcccggccaggtgagcaaaactgatcttacctttggatgccggggctcccctcga

SEQ ID NO: 62446 - DNA, 1368 bp, Homo sapiens
gcaggaatgcccccgtcgggatcgcccgtgccctcttccaggaaaggcagtctgccaaggaaccacttcgaaggtgctgaggccaaaaagcctcggtgctcacagagacggcgtcagttgtcccttgtcacttgggctcctcaggcagccactccagaggcgagaggggcatccaggtctccaacagagccagcacgtcgcccggaaggagctgtagggagagacggaacagcgcagccctcaagcactggtggccttgtgcgggtgtccgcgctcgtgggctccactctcagggggcccctagcgaggggagacccagtcctctgcgtggcctttccctgccttcgcttcttggagccctgggcatactatggtggccaggtggccaggctgccggcggggagcagcagggtgcctggtcctcaccttggcgggcggtggggctgtgcgcgggggcacggacgaagggggcgcggggaaggggacactaaccggggacggtgggcttggctccatcgcctgcccttcagggcacgccgcctcggcgaacagcgcaggcgggtcgcgcggctcgggtgcagctcgggctccggggcaggcaggcggggatccccaggacgccccggcgcggacggcggataccaggcccagcccgcgcccctgcccctgcccctcagcctgcgtccgtgtctgcatctgcgcggggcagtcgtcggggcacagcgggcagccccgaggggaccccgcgtcaccgcgctgccggcaccggcgctggagactctcctcgctgaggcctagcacggccgacaggtggccgatatagcggatagccaggcgcagcgtctcgatcttggtcaggctctggcccgcgggcgccacggacggcggtagaaagcggcgcagctcgtgcagggcgcgggccagcgtgcgcatgcgcagtttctcccgctcactggcgctctgcctctgcccgctgcccaggcggctgctgcgcgcgccgcgcctacctacggagggggcgcgggggtcccggagggtgcctggccgcgcggggctcgccacggggctgtcggctggggtgctgccccatgagtctggggacgagacgagggagcggccgcagtccttgtcggagggcggcggccgccgagttgggccccaggccgcagagagcatccaggactcggagagcggcgggcacaggggctgggccatggcagcggcggcgcgtctgggggccggcggccggcggccgctttatgccgagcccgaggtgtgaagtggccccttccaggccgcatcagcacatcaaagtgggctcggggcttggagggggcggagcctgaccctttgaatccacggcggggg

SEQ ID NO: 62447 - DNA, 1665 bp, Homo sapiens
agaaatggaaccaggcaggaggccactgcaacagtccagcttgagagaaagggagaggcagcacagagcatgagctgcctgatttcctgggcttgagctcttggcgtgtggggctttcccctctcatcctgcaaggttgcccgttgcctctgacacgccctgtggcatcaggcaagtcactctttctgagcttcagttttcacagttcctaaaggaggaactatcttgggtggtgctgaggtaccttcttcctctaaccttccagaagtgctctggttctgcccttagggccctgctgtcccgaggggctgtcagccacagctggaaggatgagaaaaatccaggcaaggttagagtagacacacagcattggggcccaggttgcgcattctactcggctcttacttgctgtgtaaccaagtgagactgacagataagctttggaacctccctgagcctcagtttcttcaactgtgaagtggagacaataatagacctacctctcagggttttaatacttggcacatagtaagtgctcaataaaatgagtactgaggccaggcatggtggctcacgcctgtaatcccagcactttgggatgccaaggtggggtgatcacttgaggtcaggaatttgagaccagcccggccagcatggtgaaaccccgtctctactaaaaatacaaaaaattagcctggcgtggtagtgagcgcctgtaatcccagctactcaagaggctgaggcaggaaaatcgcttgagcccaggaggtggaggttgcggtgagcgagatcgtgccactgcaagcctaggcgatagagtgagactctgtctccaaaaaaaaaaaaaaacaaaacaaaaaaaggaaaaagaaaatgaaagattgcgttagctatgctgactccacagtctcgaaaggctgagtcagaggagccaccaaggctgctgcctacagagcctcagcaccttccattcctgctggacttgagtgctgagggcaggcaagagcgctgggcagggaatcagccgccagagttctagttggttcctgctctttgaccttgaccaaggctctgcaggcattcctctggctctgtgtatcctcactgcattccaggatcagccatggaggtcctgatgagtgccagcattgtacactgccaggtggcatcgtcagaggtgtttgaaccagagcgattccatcttgaataggggctaggcaaaatgaggctgagacctgctgggctgcattcccaggaggttaggcattcttagtcacaggatgagacaggagatcggcataagatacaggtcacaaagaccttgctgataaaacagcatgcagtaaagaaaccagccaaaacccgccaaaaccaagatggtgacaaaagtgacctttggtcatcctcactgctcattatgcgctgattataataccttagctgctaacagacactcccaccagcgtatgaccgttcacaaatgccacagcaatatgcagaagttaccctgtatggtctaaaaaagggagaaaccctcagttctgggaaatccccacttctttcccaaaaaactcatgaataatccaccccttgtttagcatataatcaagaaataaggctgggcgcggtggctcacgcctatgatcccagcactttgagaggctg

SEQ ID NO: 62448 - DNA, 1267 bp, Homo sapiens
cccactcctgctttagtttagtaatgagtctcactcatctagaaatcctttatttacattttctcttagaaaaaaatatacagatctgctgccctgttgattcctcagatttagggtctttagggaaaggtgaaagagggtacagggcggcccccagcaaggccgttcattgtccatcgagagcttctgctcatctggccctggagctgggcttccctgagatcagccccagggcactgggcgacaggtgccatgccaggcctagggcggggttggcatgaggggcaggggctgggaggtgctcaggcagcctgggtcatcaggaactagactggctcacaggcagagagaacgtgggctggagactttgtccttgaggggaggacactggtgcctcgggctccaggaatggaggccctgcaccagccgctgggatggacacatgtgggcaccttgcatgggggccgggtgacttcaagggctggggactatttgctgttttctgtgaaccactggagcaccacctccttgttctccttcacccacttgatgttggctttcgtcttctccagggcttgctccagggcccgggtgcctgagccgaagcctgtttcctcgttgtccttcttgaactgctccagctgccagaaaaacaaaagattctcagtccggctgggtccctaacagccttgaggaggagctctctcaggcctctggctttccactcccactttagagtccccatggatgggaccacaccctgttccagggataggcaggacgtccaccttgctcccgggcaaagtccttgtgaacacagaggttgcaaaatgacaatcccaggcaaaacctggctcagggagattctggccttcaggtgtaatattttattataatatcaatccaatcaagagagtagagaggggctaatgaagcaaccagccaaatctaaaatgtggaaatttctataccacaaatgatccagttgcttcagtaaataaatgggtttaaaaaaaaaatactcctacaaattagaagagttatcagtcctggaggttctagccaggcaatcagccaagagaatgaaatgaaaggaatccagaaaggaagaagtaaaactatgtgtatgacatgtttgcatacataaaaattttaaggaatccattaaaaaatctattagaactaatgatttctgcaaggttgcaggatacaagagcaatacacaaatatcaattgtattcccatacattagcaatgaaaaacctga

SEQ ID NO: 62449 - DNA, 1589 bp, Homo sapiens
attagccaggcatggtggcaggcgcctgtaatcccagctactcaggaggctgaggcaggagaatcgcttgaatctgggaggtggaggttgaagtgagccaagatcgggccactgcgctccagcctgggtgacagagtgggattctgtctcaaaaataaataaataaataaaaataaataaaaaaattaaagggacaagtcagcaagggacagaggggaggtaaggactgcaaacaggaagatgaagtcaaagtctacagaaggagtcattcaacccccaagtccccacttccctccttgtagagggcagcacccctcaccaccccatgagagagattgaaccagggggctcagaaagtggggtcaccagaccacagtgggagggttgctggattgcaaagagggtcagaggtgaaagtttccatactgaaaggtggcaccccagttcccttccctcctgtgtcctagaatgggagtactaccagcctcattgcacaatacagaggcttactctctggaaaaactgccttgtctcgagagaacaaacccatggactaatttttgagggtccccagtgaagagttacttggccacccagtcacctcgcaatgagatcccccggacaacacactccaccttcccatggagcttccacttgcattttgtttgtgtctgtctcaaacccaaaggggtggctcagcctccaacttgaaaagaggccaaaacaaacacaaaactcaagaggaaacgagtcaatggaaaaaaaaaaaaaaaggaaaacttcataagagcctgtaataaatatcctctgagagtgaagagaagatattgcataggatgctggaatcagaaagaacacttggaaatttaaaaatacgacagaagaaatgaaaacaatttctaggtgaggtggtgtgcaaagctgagggaacctcccagggggcagaataaaaagtcaacaagctggaaaacagaagagaaaaagaaaactagaggatgaaagcaagagaaataagctggattacaggggttccagaaagagataactggaaaaagtgaagggaataaagtttaaagaagcaatacaaaatcttccaatactagatgatgtgaatgccagtcctgattggaaaaggtagatggagacgaggcccaaaccaaggcccaccaggaccgagagaagctcccaaagtttccagaagggaggaaaactggtcacattcaaataactggaaataagaatggctctgggcatcgcatcagcaacatggcaagcctgacatcagtggagcaagaccttaaacattcagagaaataatttcccaccttgaaacttctaaactcagctgaacgctcaatccagtgtgagagtggaataaagacatttcagatgatctaccccagaaaagtcacctctcatgaaccctttctcaaaaactcctggaagatgtattcccctatgagaggggaaaaaatcaaagaatccatgggatgcaggaaacacagtagagggaggcacctccaagcatgggagctgtgtggcagctctggaagagagcaggcagaataggactccaggaggagtccagt

SEQ ID NO: 62450 - DNA, 839 bp, Homo sapiens
ctgccatcacgcggtacacatcattcagcaccatgaggtctttctgcaaattccccagggccatcaggagactggcctggtagcggtggcccaggtctccctccatgccccccgcaccagacccctgggcagctggcttaccaagttccaggtgggctccgcatagtcagcacccaggtactccacgtaggaggcgaagccctcgttcagccacaggtcattccaccactctatggtcaccaggttcccgaaccactgtggggggaggggtcagctgggcaagccacgcccaggctgggcactgagaatccccagaactaccctccccagggctggccatctgccaggcacagtggggatttcaacaccatcgtgaccccttcctgctgccctgccaggcggcaccctcctcccttctcagcagcccggggcagagcctggacttgcgccgtctcctctcggagcccctgtttccttctccgcactccccgagatgggggtctacctggtgggccagctcatgagcaatcacagtgaccacccgctccttgttgctgctggaggaggacagggggtcgaacagcagggagttctcccggtaggtcaccagtccccagttctccatggcgccggcgttgaagtctggcaggccaatctggtctggggaggcgatgccattggcaggatgaactccgggagtggagctccatccactgcctccctcctcaaggacccccactcacctgattttgggagtgggtagggtgtgtcataatgaccagcaaagaagttaaggatggggcccgtcacgttcagggcataatcgccgtggcccgccg

SEQ ID NO: 62451 - DNA, 2278 bp, Homo sapiens
atgcctgcttctccacgtagtcgaactcactgacaatgaaggccagcaagtacgtggacatcttgggcgtggtgtggaactcagtgacattccagttggggtcttctggaagtggggtgctgggacctgggcagggagcatgtgtgtgtgaggacgtaccctcctgccccacaccccagcccagggtgcctgccccctggccctgtggccgcaggcagggcccactcacctttgggaagcatgttggacagggctgtcaggtccttggggtggataagcgtgatgttgaactcggccttcatggccggctcatcgaagcatgggaaggacttccgggcatctgcagcctgcatctgtgtagtggccaccaccctgccccaacaggaaggttagagggtgtgccagagctgggggtgtgggaggggctctgaggatgctaccaggcatgcagggaaaggggtacatggaaggctgccccagcctaacccctgctcctgctcccacccccgcctcgccgggagcctccggagccctgccaggccagctgactcgtgggggttggggctccttctggattcggggtgccagcaggctctcagggacctcgggtgagtttctctcctctgagcctcggttttcctgtctgtccaagggacgctctgtccctcatccccagctccctggtgaggggtggggaagccctcccagttcggtgcatttgcagctgctttgccagcagctggaggtgaagcaatgggccagtctcgggctccacagggttcaaaggcctgcaagctaagtccttccttggccctcagaatccagccttgcctcagcacctcggatccaccccaccgggcagcccagccggaactcactttctgacattgccctccatgtactcgctgcggtagaagcccgccaggtcatctgccaactccccctcgaactcgctgtccatctcatactggctgtccttcaccagggagcccttgaggtgcaccaccaggtactcggtgggctccaccagctcagtcttgtcaatgtcggggggctgggagcctcccacaccacgcaggaccaccctgtgcccctggctgagggtgtagttgagcttcttgctgtggatgatgatgacgtcagtggcctccttgcaggtgaaacggacggtgctggagcccttaaaaacgtacaggcccctgtcattgggggtgaggtacggtctcagcgtcacccggtaggaatcgggtttcagcgtgttggggaggcggtaacgattccacgctttactttggtccaaggtggtggccgaggcggggttggtggtggctgaggcggacggggtggtggaggccacgggggagctgttggcgttcttgttcttctcctgggagtacaccactgacagtgcgatgattgtgcacacggctgccacgcccaggaggatccccaggatgcccagggacttggaaatatagaagcccttggccatggtgatggtggggaggcggctcagggagcctcaggccaggcagagaacggagcagccccaggccgggcttatatccccaaaggggaggagccccacaacaggcagactgggcaaaaattaaccagggctccaacaggcgaaggtcactggactgggcaggggcacgctccgcctggggagaggagatccaggaacggtgtgtggagctgggctcggggggtgcctgctggaagcaaacagtgtctggttacaggctgcaggcggcctgggatcaggcccgagggctgaagggcaggcttccggctgtaggcccagtgggcaaagcaagcggccaggtggcattgcattgatctgcttgagagctgagagggtgggaacagcatcagaactgaggttagagtcagggaaggacttcccaggggcaagaggtgggaggtgcacagagaaggggttcccggctcctattaagaacacactggggtcacccctttggttgcatctctggaaggatgccaggggctcctcagtgacaaggtcccagcctcccttgcattcttcaagagcagggagttcctccaggttcccctccctgccgcttcttgccaaatactttttcctccattatcagctcacggaataaaatgaaatgagttgttttgctttttttgctgaaggcttcacctctttccagctgtgaccttgagcaggtaactttacccttctgaacctctctcctcataaataaataacagtatttgcctctcaggtttgttgaacagatttagt

SEQ ID NO: 62452 - DNA, 1305 bp, Homo sapiens
tgatgttggggttgctggccctgcgggttgtctttggtgcaggctctttctgccagtgagcaaaatgcatgtgttcctttcgctgtgaatttcttgacggggtagaagccgagctctcaacccacttcaactaaagcagcctttctatgggtttatgtatttcttccctgcctatgttttagtccagaaaacgtaagttcttctaaactaaaaccaaagccaaaaccaaaaaacatgaaggttgacaacgatcatgccagggcataactaagtcacagtcacagtgtggaagacacccacacttgtgggtggggagaggctccttggtctcagatgtgaagtgcaagaggctttctactctaatatgaagactccaggagcctgggaggggctgtggccgggagagctgagcacccgtggccgggtgagctgctgtgttatccatgctccatccccgaccactgggtccttgggtaggccccacccactcccactcagtgtccctgactgtgaactatgagactgggagctcagggacaacctggggctcattgtctgctctgagggagcagtgagcgagaagggtagggacgaggctgggcctgggccagggcacactctgtccccgcaggcccctggctttctcccaggcttctgaggcctccgcccatagctgcatcaccccagggtgcttcctctgggagccttggacattgcccctcctgcaagaacctcagaaggccccaatgggaagttgcctctcatcagcctcttcagcccaatgcagggcacacaggaggaaggagcagaggcatttgtgggtgggggaagtacacatagggtttgtgtggggccacagatcctgcctggcaactcctgtctgccaaatggggggtgattatcctggtgagacacatggtaaggtgaaactgagcacctactatgtgccctaccaggataatcacccccatttggcaaatgaggacactgaggcacagaaaggttaagtgatttgcccaaggccacacagctagttagcagcaggttccacagcttaactacatatgcctcctaaaaatgtcctcccatacagcccctcacatctactgtggccgtgccaaggggagttgaagaccacaggagaagacacgcacccatttggccagaccagggctgggagctgggggtagttctcagaagtagaacttgttagccagggagtgctgggggctgcttccagacacaggcctgtggaggacccacatcttgcctccaaggtgtgactgggaccactgtagggccagg

SEQ ID NO: 62453 - DNA, 1624 bp, Homo sapiens
gcgtttagagactcagggatgaagccacatcagacctcaggtctggctgagaccagggctctgaccacccccgaacacggcctggtgggttgcagtccaggggctgaggtgggggaggagtggggatccagtcacaaaaccccaggacatagcccacctgggccgtccctgcccaccgcactgctggggggggggggtgcgttctggagtcatttggggaaaggatcccattggccctgtttaggggaccttttcccagaccaagagtggattgcaatggggccctggatctgtctcagttgctcaccagggagggcgtggaataggctccacaacccccaaacctcggtccccatccatgccccggcatcttggccgggttgtaggagcgagggagaacgcgactgtaacgcgggcgttgagcacctagagttccccttcctcttcactgagagctgcggcggaggctttagaccgaggagcgagatctaaggttaaagaaagggcctctgagcccagtgttggccagagaccccacaggcgggccgggttcgccctttgccttcggccgcgccccacccaccagggacagagtggccgcggccgagccgggtccacccgccgcagcttagctccgctccgccgccctccccgtccgtcctccccaggctcccgtcgccctcgcccaccctggggccccctccccagatgggagcccctccgacccctgcgaggcccgctggggacccacttgaccgcgagatcgtagtgggagctcggccaaaagaattcttcgctttccctggccctcagtttacccatctgggaagaggggcgtcgcggccgcagaagtccagctccgcacgcgccaagcgctgggtctgcagctccctcggttcccgcgcacccaactgccccacgacccctacccgcgcccgcagcccccgccctcccgccccacttgcctgggccgccgggcgctggaacctggaccctggaccctggcgggttccgagctgcgccgccgccgtccctgcccctccagcactggactcctcctttcccgtctttttaaagggaagtaaccggacccgaccactactccacccgattcacccctagcgggccgcccgcccgcagctccgcccgggctcctcccccgtccgcccgcggcttcccgggagccccccagggctcctccgctcctccgacggcccggccttccccccggggcctgggatgcaccagggctcctgctgcccccgacggggtccctgtcgccgcagcccgcgggacccgccggccacatctggacggcatctgccgcgggggaggggctcagagcctcgccctgagtgtcccgcagggagccttgtgcatccggggcaggaagccagcgcatcccgtgcagacgggtggtgcagataacggacccgccacagcacgcaattcaactttcttggtacctgggactcgtagttcagaaggcgcagtagcacgaccttgcgaaaaagcaccggagtcgggaacacgcgcttctcatttttttctttttcctttatttgtttttgagacagagtctcgctctgtcgctcacgctggagtgcagtggcactttctccgc

SEQ ID NO: 62454 - DNA, 1060 bp, Homo sapiens
aaaggggagctgtgacacccagagaaagggtggcctttggcctctccagggcaggggagcccagggcagttgggcagagctgggctggggctgagccagttgggctgacaagaaggcttgggcgggacctgacaaggaggacttgcttcagggtgtcaacctgtaccaggctcaggctgcaaggccaggtagtgtcaccgtaaccctcacctggttgacacagggtctggacccaaggatttccttccaaccctgtaatatcattatgtactttaaacagctactgggctgcttgacagtttctagggctgaggcagggcccaaatggtggagaagaggcagctagaggccgggaactcagaaggggaatctcagcaaaaaacaccccgaaggagctgagtcctgcgggagctccctctacgtgaactgacgggtgttgtgggagcaggtccagccacacaaaggaagttccagtagagctggctcggcagttgacagtttaaatcctggcttgcctcggtgctgctggcttcggtccgcagctccctctagccagcccacacccagctggggagccactcagggctggacaggggtcagggaaagggcattcatgtcaagtgccccggaccaagaggccggagaaaaccttcagttccaggttgcctagggcaaaggtggtgatctttggcagcacaaagtgccctgggtttggggctgtcctttggcctccagtttcagtgctagcctgggagtgtccagagagatgaagtatgagatgacttgtccctcccaccacagtgcccaagtgggaggaggcacgctgacccatgcagccacacacacaacccacaggcctcatctctgactctcccaggcaagcaaaggagcagactgcagcagccctgagatgtggctgttgcctcggaaggaatgttgccttggaaggaagaggaagggatcccggcggaaggaagaggaagggatcctggcggcagagcccacatgtgacaccagtaacccccaacccctaaatcagctacctccatcctgattggtc

SEQ ID NO: 62455 - DNA, 1734 bp, Homo sapiens
ttgcccaaacctaattcagcttcatttcctttttaaagtacttgtccttccaaagcattcctcttacttttcacagagtaattttcttttctttttttttttggaaacagtctcactctgttgcccagctggagtgcagtggcacgatctcggctcactgcagcctctgtctcccaggctcaagcgattctcttgcctcagcctcctgagtagctgggactacaggcgcccgccaccacgcccagcttattttttgtatttttagtagagacgaggttttaccatgttgcccaggctggtcttgaactcctgagctcaggcaatctgcctaccccggcctcccaaagtcctaggattacaggcgtgagccaccatgcacagccagaataattttcttttctccctcataatttaatctgtatattatttaatcaaattacataattacagtaccagtttactggcataaagagatctggaaacatcacaactgacctttggtaagcaaaatgactcaagtgtaagtgagcaatggatgagcgaacagctgcccgtgttagtcctgctagtcagttcagaccttgtccactgaatatgaagttgaccatgaaagatggctaacatttctctgattggagatagatgggacttaagaaagttggaggctgccaagcatgggtgtgggagcaagcagtcaagaatcaacactgaactcatgtacctaaagaactggagatagagtcagggcacaaagaagggttctgttaaacaacagaagttggctgatgcgctgaccttgaggatgcctgcagaaatctaagtaaatacctgagagaacactgacagataaagtcacaaaccaacacagggaggctggtagggaaagaaaatctgagacgtgagtcatgtaaatggtattcaaaaccacaggaacagaaagaaagaggctaagtcttcgagaggcctaaactcagcttcacacagtgtgcattgaacaaatatgaattatgaagtaataataattcaaccttctactcagcaagcatgggaaataatgacactagcaaaattcactcagaagtgtttattaacagagtttaaacaaaagtgctactgatttttcagtacttggcaaatccaatggtaattcaacctaaaaataattacaaccaggatgagtttcatctgacataaagattaggataaccccaataaaccaacaggatatcttgatataaggggaaggcaatagagaaaatgcttcgggtgataaatctgaaatcttaaaaggtaaaatgaggcatagatactgatgttttccaagatcaagatacataaatttatgacaacattttagtgagtgaaagtcggtgtttttagctctgtcctatttaaatttttctcttggaacccctgaaaatagtcaagagtaggaatgagtactgtagtcaaaatgtcaattcctctaaagacaatctaacctgttatcgagtctctccactctcccccaacacctctggacatctgtgtctctttattttttttttttcttgagacatggtctcactctgtcgcccaggatggaatacagtggcatgatctcggctcattgcaacctccacctcccagattcaagcgatcctacagccttaacctccccagtagctgggactacaggccacatgccaccacacccggctaattttttttcttttttttttgagacggagtctc

SEQ ID NO: 62456 - DNA, 2431 bp, Homo sapiens
gcactccagcctgggcaacagagtaagactctgtcttaaaaaaaaaaaaaaagaaaagaaaagaaaagaaaaagaaacccacaaaattgggacacatatctatttcacatcaactaatcaactctgactgtcctgtattgtttggataaccaacaaagtattacatactgacactattccaaaggcgtttacaatctactagaaacagttagaattaaaaacttgagagcatgagcaagaagacaaacagtttggagaactacaataccgaagtttagagaaagcttcatcaaaagtaaaaactgggctggggctgggcacggtggaggagagacagggtttcaacatgttggtcaggctggtcttgaactcctgacctcaagtgatccatccacctcggcctcccaaagtgctgggattacaggtgtgagccaccgtgcctagtttatgagcttcttacaggtagaaaatttgagttttatatctttgtatctctatatttagcgcagtgtctttttcctaatgaatgcttaataaatgattgttgtttggtaatcagagaaaagacaaaaacactctcagacatcagtacttcatcaaggtcagagagccaaggtaaagacaaatgatttgcagaaagcctctaaggagggaggcactcgcctcccacatataaaaaccatttattctgttaagaaattttattttaagtcatcttaaattcatttgggaagtatagaagatataaatgcccaataatcagagaaactgaaaagctgccatgtgggatacctttcctaagattcaaccatgttttcttcttattagagcactcctctatttttctgttactaaaatttctagcttcccttctacaaagtgataataaaaatcaaacattaacttttcctctaagaaaatccatgaaaaaaccatggtcatcattggtaatattcaactagttcaggttctcctccctcttgggcacataataggatcatttccccatcccttgggtgggagcatgtgactgattttgatcactgaaatgtgagtgtacgaggatgtgtcacttcaagagccggaacacacacatgcccaggtagaagcatatgttgaggagatttccatcagcctggacctcagaggaactacagtcagcagacacaccacaatggccacatagcacgagtgaaaaaataaaccttgctctcataagccattgggattttggagtaatgcattacctagcctaccttgattgatacaaaaatcaagcctggaaaagggttcttagttaggaatcaagagattctgctttgctgggtgtggtggctcacacctgcaatcccagcactttgggaggctgagacaggcggatcacctgaggttgggagtttgagaccagcctgatcaacatagagaaactccgtctctactaaaaaaaaatacaaaactagccgggtgtggtggcgcacgcctataatcccagctaggcaggaggctgatgcaggagaattgcttgaacccaggaggtggaggttgcagtgagccgagatcacgtcattgcactccaacctgggcaacaagagcgaaactccatctcaaaaaaagaaagaaaaagaaagaaagaaagaaagaaagaaagaaagaaagaaagagagagagagagagagagagagagagagagaaagaaagaaagaaagaaagaaagaaagaaagaaagagaaactctacttcttatcttagagtaggctaatcctcttctgcaatataaggaataatagcaagaacaataaaattgaatctcaattccagcctttcagggtgcctataaatcagcaaccaaagcaaaatacaattcgttttatctgcaacatatccaagtaataccatgggtaataagctttgtttactgactacaaccttgacaaacactaggttttactgaaaacggctgcatatcaaatgaatatctctaaaggtcaaattgtgctgttttgtgtacactgttattctactaaccagtaataaggaatgactaacacaccaaacttgaagcagcaggtaatcaatgagattgtgcactgaggcaatccaaagttcaagtaaggaaagcgagtgtgtatatggcagcagatattcagtatagtctggaacaatccttgcttttgtttttttctttttttttttcttttttacttaaagagatggggtctcacttattgctcaggctgttctcaaactcctgggctcaagtgatcctctcgcctcagcctcccaaagtgctggggattatcgtcgtgagcctccacaaccagcccaagtgtccttccttccttcctttcttccttccttccctctctccttgcttcctttctctttctttctttccttctttctttctttttccctccttccttcctttttt

SEQ ID NO: 62457 - DNA, 1918 bp, Homo sapiens
cctcccaaagtgctgggattacaggcgtgagccaccgcgcccggcctgaatactcatatttttacctcgatgtaatctacttaataaaatgtaatctagctttaaaaatcttatgaaggagtaaaattattttttcatttctaattgacaaaagacaataaaagtctgaaaagggtttattaacttgtcaacagacgcaagagtagaaaaggtggagctgaagcctgaacacgttttctggctctttcccctcttcagttccaccagtcccccaattatgtaacattttgaaaccctgccatgaagaaatataatcttcgaagacaggaagcaaatactgatgtttatgtgtttgcaaaggaacgtgttgggaaaattcaaatttacgtaatcacttattgagcccttatgcggcagcatttataatttctcatcatttttccacttttaaactgattttcttcaaccctaagagtgaagggtatctagtctctggaaagtcccagccaacactgaagcaaaataattccaaaaaaaaaagaacttttccagttctggctataacaaaaactttcagaaacttaatatttcttcctcatgaaactgtggtcaacaaccaaaaagatgacagaatgtgacttcaatcactcaagttctcatcgaggcacactccccactgtcgcttctatctcgttcccagagacccacgggaaaatgtcacaaaatggcacagaaatgccaggatcaagaaaagggtcagcgagagcggggcagtagggcgggagacagaaggcctggcaccagcctgcgcctagattaaatgcttaagtagggcgagggtcatgctcggtgcaggagccccaggtgaccaaagagcggtgcccccgggcgccgagaggccaaagaggagggaagacatagtgggcgccctgaaggggcgtggtgaagccgggccgcactcacgaaacgctggtagaagcggactagccgtggcttcccatggttgttgaaaaccagaatcgcctgaatcatctttgccagccacggttctctcagcaccggctactcccagaaagctcctccttccgccacaacacgatcacttccggttggtgcgctgctgagagcggcactcggaaacttggccccggcgctcacgagccctagcacccaagggtccggcctctctgacgccttggagggcaggtgcggatgccgaggagagtggtcacctcggccagcgttggttggccagtcaggatgcgaatccggatctatgtccctcgcccagaccgacggctggccccagaagccgaaacgaccgtcagccgggttgccaaaacggagaggcggcgggagcttgcttttctcaccgcccgctccaaatcatgcactcccgccatccccttagcgctcgcagaacgttccgcggagtggagacgccggtcattcggccgttcgtcggttatggaacatttcgttcattttaatttttcagtattataatgctgcagtgaattacgtagctgtctctccgtgcagatgggctgttcctctatggtagacggtgaatggtggaattaaggaatttttagtgcatttccatttaaaatcccaaatcgatcaagttcttatttttgtttgttcttttaatgacccagtgtgggtgaagtggagcatgtccgtatactgcagatggagcagcggatacagatgcaaatcgatccagaggactgtttggcgatatggatcagaagcctttaaaatatataacagtccgggcgcggtggctcacgcctgtaatcccagcactttgggaggccgaggcgggcggctcacttgaggtcagcagttcgagaccagcctggccaacaaggtgaaaccccgcctctactaaaattacaaaaattagccggtt

SEQ ID NO: 62458 - DNA, 1084 bp, Homo sapiens
attcttcagcgcagttgtaaatggaatggtcccttcggcctcataaccctgtgacgacagggcctggccctccaaatcctcctcacccaggcaggccctgctctggaccagcccgcccgctgttcccgccacagcacggccactgtcccttctggggcagggcatgagtctgtgcaaaagcagcgcggcaagtagctggagtttatagttacgcgggtggggtggggccggaggtcggcgtgaggcgaagcccagccttcggagacctgtctgggggtcgggaccctctctcgagggcaggcggacaggcggggagctttaagccgatctgtgtcatggggtcgctgggcgggcgcggcggcaggggcgccgggagcggcggactggaggggcggactgaaggcggagaggcggctttggcaaccccagttttcccccacccgcatcccacccccccacccgatcctgttgcggggttcgagccggggcaggggaggccgacccgaggccgtgagcccaggcctacccctggtgggcggcggggtcccaggcccctggcagccggacgctctgcaccgccttgttccggagcgcgccgtcgtggtagatgcggctcattctcccgaccgcccgggcaccccggcacagagccggcgcactgggctgggggcgcggcgcgggaagtgctgcaggacgcgcggggacccgcgattcccagccggcggatccgggaatggcgcggcccggccctcaggcgttcctcggcgggatttaaagggaccgagctccattcctgcacgccaggccgcgcgcggcaggagttgggcttccgggaggaccctggctgggggcttagcacagtggggcagaaaggccatgcttttctcttgtctctctctcttcctcattcctagaggaagatccctgccccagcacacgcacaaaagggaaattgaggccccaagatcctattatagaagatcctttgtaggatcagcccgggaaggatgggtttctgggaagcaggaatggagaacagccactggggaggattgggtggtcagcttagaagctgtccattatg

SEQ ID NO: 62459 - DNA, 785 bp, Homo sapiens
gagcgagactcccactcacgaaagaaataatagaagtgtaaaatgtttacaaagcaggaactggagctgtggtatctgcctggatccttgagggcatttggctggtgccaagttcatgtgcaggtcacttggagaaccaataatccaaccaaaggactaagaggttttgggagctttaaatcacgttgtggagaagtcaataatcaccccctatccctcccctgctcctccagtgcaaacttctgtgattacgtctctctcctgagcaaacatagccaggtgcctgctcccaggggccttcctggatttcatgaggcccatcctctcctgattcctatttgttcctcaggcaggctacaactctgctgatcaggctgggccttgataaccagtcatcaagctctggtcatgttcctgagaagccacctggccatcttgatcggatgtggtgttcaccaatcccagcctcccagtgggacactggtcatctttgaaggaatgcttccccctcagtcagctcatcatgtttctggtgtggtgagtcactctggtttcaaccctgaacgtaatcttatttccaggtcatcggggcactacccagtcactccctgatttgtagtaatagtaaataaaagctaccggggattggtgcttatgtaccggacaccatgctaggtgtggggtttgagcctcacaacaaactgtgaagcaggtatttttatccctattttacagaaaagttagagaggttgacttgcccaggaatatgcagcaggtaagcctgg

SEQ ID NO: 62460 - DNA, 2173 bp, Homo sapiens
ggctctcctctccagaggacgcccctggcttcccttggggggggcggggcgcagggcccccgggccccctttgtaccggacagggccgggccccccatttccaagcgaggtctgcctcttccccgcttcagttaatctttgttccccttttctgctgagaggagaaaaaaaaaagagagagagagaaagaaagaaaagaaggaaaaaaggcgtgacttgattttcaaacgaaactcccacagcaaacaaaacccttttagagaaataagaaaggaggaagaaggaagaaaagagggaagaaaaaaacaggagaaagaaaacccttcaggctttcaattcgagtgggagagttgaaccgaaagaaagagaaagaaaggaagaaaaatcctctgcggtagaaagagaaaagaaaacttgggctgacaagagggaggtgttgggggtggaaggaagtgagaaaacaaaagagagataaaagggctgcttttctgtctctctcttcctctgcgagctggcttaggaggagctgttttgcatcccttcacgtcagccctgcctcattcccttcttccagggagggagagagcgcgagcgagagagcgagcgagaggaggggggagagagagaaagagaggagccggagggagggcggcaggagcaggcggcgggcgcgcgtggaggcgggcggcgggcgcacagcagcagcccgggcggtgggcagccaggagcccccggcccggcccggcccggcccgccgagggccccagcgcaggagccgcgcccggacccagggtgagtgtcccgcgcggccccccgccccagccccagccccagccccgcagccccgcgctgccggccggcgggggcgcggggggcgcgggggtgggtcgctgcggccgcggccgacccgccccccgcctctccctggggacggccgcgcgcaggcccgcgccgcgctgcaaacatgtcgtcttttcctttcacttccacattccctcatgccggagagctggagggagagagggagagccggggaaagagggagagatggcgtctggggtgggggggagggagaggagggggagggggaagggagagggagggagcgagcgaaagagggcgagagggaggagagcgcgcgaatgagagagagagagagagagagagagagagaggcaaaaatgaaaggaaagcgtcgcggcggcggcggcggcggcgcgggaggcccgggaggcgacggtggcggaggctctcgggcccgcacgtgggtgtcccggtgctgggtgcgctccccccacacccggcccgggactcaaagtttcaccccctcgccgccccgcccctacggctgcccacaaactttattctcggagcgggtggggttgttgcgcgtcccagccggccgggggtgggggagagctgagcgcgccgctggcggggctgggggcgtccccgagggccactggccgccgcacgctgggcgccgcgggatctccgccgggacagcgtcggggcgccgcgggccggggacccaggaccggcgctcgctgtctgggggcgtgggggtgggggtggcgggcggggtccctacggcccgtcttgagcctcccgcggctcagccccccttcctcctcgtcgccctctctccgtcttctcgcggtcattttcctaattggatggagctgtggggcgtgagcaccagcgtcagatcggggccctcaggctaccaggtgggcgcgcgggctcggggaccgacggggcagccccagcctccccaccctaggcgcacagatcccgcagatccggcccttgggccaccgcccccttcaccgcggacttgctaactagtgcgtatcgggtttttttccaacttgccttttaagatgacttttatgggcgctgcaactgcttccctccagtctaagctgtagtttggaaagatttaagaggccagggaggtgcttgtgtggattttaaccaacctgaaagggtcattcatgtatctctaggatttgcgagacggttagggcaaggcgtagcagtatccggggtgccttttcttttttcttgatatggagtcttgctctgtcgcccaggctggagtgcagtggcgcgatctcggctcactgcagcctccgtctcccgggttcaagcgattctcctgcctcaacct

SEQ ID NO: 62461 - DNA, 2683 bp, Homo sapiens
ccaatagctgggactacaggcgcacgccaccacgcccgtttaatttttaattatttttaggagagacggggtttcaccatattggccaggctggtctcaaactcctgacctcgtgatccgcccgccccggcctcccaaagtgctgggatcacaaggactcttcgaggtactcgtcctactgggtctgagggaggcctgccgggcaatccagtgagggaccaacgtcatggcccacccttgagctgcaggccgagtgcccacctgcaaagggcaccctgagcacctttcttgctgtgcaaaatggaaactcccggccggtatcgacctgcagtgtacataactagtccctgtgggcatctgggaaattcacaaaactcccccacaggtgtgcggagaaggactttgtgctcttgggggtcactcagccagctttgaagctgccctctcagtcctgcatttgtacacgtgtaagtaaaaccagtcaaagttcatttctgccaagtagagggctgggggtctgtgtccctattgcatcttcaccagggggcctagagaaccaatggggccacgtgggagaagggaagaagaaaaccgttcttaactcgttagataagagacagtgtattcctaatgtgatcaaagccgatggggctatctggttttgacttctgaaaacctagagtggccattcctttctcatttgttttaaagagaatgttattttctatactttctcattggttttattagctgaccctcaggccagggtaactgtgctgggtacctgccagtctcggagcagaacctctgatcggtcatctgtagctccagagaggtgcccacctggtgccccagtgaccttctggagctggctttcctgcatgagggccgtggggatagagctgctttcttttgggtagggggaattggatgtttgggtcacattttcttcctccagcctggcctggttgcctgtgtcttggtggagggggctgcagtgagttgaagtgggacgcgggctcacttgcttgtcttctcagagctgatacctgggtgagtcctcagcccacggtgtgtggtcagcgggccatttttccagggcttgggtcatttccattccaaccaggcatttcctaccagggagacttattttaggctcactgtctagagacaaggagacagacaaggtctggaatggtttttgagttggaggaagggagactaatgggaccaccagagattttgcacttctattttaggtttgccttgtggcccagagatatttctagcagagttgtgtttggaaagaagcacaacttctttctagaagggagtaaataaataaataaaggaggagtccagcgcatcttggaggagacaagtgaagtcagctccctggccccaccagtgctgatgcttggcgcaggctcataatctggcttgctgacccctcccataccctcgttcctcaggcctagccagggcctagcccgcggcaggactcattatgttgaaataaggaatctgtgaatgtgctgggcctgctgttaatggtgcttgctcccagccctttgacttcaaagctggaagaaggccttagagattgtctgaaagcaactgaggcaggaagaaagctctgtacccaggattacacagtaagtggcagagccagcactcaacctgagctttcagagcctgttcccagtgctgtttctacaaggccactgtctctgctactgctggggatcccgaatcaagctcacttcaaagaatgtagctatgagagcatgaaaccgtgcgctcacgccgcacacgagttgggtaaatggagcgcctcattttccagatgtgttacagaaactgtgctggaggatgtgactggccagtgagacaactagggggaactgggtgattcaggctgtttcaacactgacttcttcaaagtccaacaatcagagaagcagtttagtcatcgggattttctcacatcacaccattttttgatctggaatgctttcttcatactttgacttgtatgtgatttatttaggattggtcaggagagaagagaaggagtgtaaggacccaagacctgaactgatttccatctgtgggttaaatgtactagaacgtttgtgagggtagacgtctttgctttgttcattgcggagcccctgtgcctagaatagggtctgatctatagtgggccctcagtagatacttgctgaatgaatgtactggacattagggaagatttgcctgccagaaggaacccatgaatgacacaggcagggacagggaggtgattgatgggagctgcagagttgtgctgtgagtcattgcttcaaacaagctccagacaggtgaggcaggagggggctgggaagagaggatcctgaatggggtggagcccctgggtggagacttgtgcaaaacaataggtttttttagattttttttttctttttttgagacggagtctcactctttcaccaggctggagtgcagtggcgcgatctcagctcactgcaaccttcgcctcctggcttcaagcgattctcctgcctcagcctcctgagtagctgggactacaggcatgcgccactacacccagcctaatttttatatttttagtagagacggggtttcaccaggttggccaggatggtctcgatctcttcac

SEQ ID NO: 62462 - DNA, 779 bp, Homo sapiens
cctaccgtggcctcccaaagtgctgagattacaggcgtgagccaccgcgcccagctggggttttcctaccgtggttgtaaaaattcatttcttgtcgccacctagattaacaaatctcagattaagaactggccttttttcgcctcctctttgaattcactgtctaaagaaacggccattgccctttccgtaaaccaggacagaggtcatgtctgctttgcctttttgcaccttggcccctgcctgcccctcacctccccactcagctacagtgactggaagggcccacacaggaaagctgggccctgggtcttcatggacgttgctggaggatgtgtctccctgctggtggctctcagtcttcctgtgctcagtagggccttctggaggattctaatttccctgtcctggaaaccaccttgaaaatattcttaaatattcttaggtggatttaagatgtctctgtctagtggttttttgtttgtttgtttgttttttaatccatcttagatttgaatgcccaaggaatgaacagtctcttggatcttgtatctcttccttttgttttttagaaaatagcttttattgatttttttttcttgctacaaagaggttgatgattattgcagaaaatttagggactataagtaggcaaaaaagataaaaaccacctataattattaatattttagtatattgtatagcccccccagaatatttttcaatttcaaaagatgagatcatactgtttgtaccatcttattactttttctttcttt

SEQ ID NO: 62463 - DNA, 1192 bp, Homo sapiens
tctgcccatattacaggaagttgaggttcagagaggttaagtaacttgccccagttgacacagtgtcattattcaccaagtcccttctgacaccatcaaattacctgacatttgcctcttccctttatcttctctgtgcgtgaatgcatggaggtgatttgttgggcagtgtggacagacgggaagcaatctcaatgtcctccagtgcaagaattggcaggcaaatggggatgtgtgtgaacggtgtgactatgaacatgggtgatcgattacggacatgcaagatggaaaattgcttgtggcatccagataagggaaaacaagtaggacaccagattgtatacactgtgatcaaaaccatgtgaaaaacacatgcatgaagaggactgggaagaaatacacaagaagtggttgcattagggtgagaaggagtattcatgtttttctcatccgtctttttcaaaccttttgtaatgggtggttttattaattttataatggaaaatgttaatttaaaagcaagttatttacagtttagtaagctcatggcagggaaaggctgtgctctgtttattgctcttactttttcccaacgcctactcccatgcctggcaattatagagataataaatgtgggtgtggaatgagtgcccactgggaaacctctcagaggactttgacccaggaacatatttgcacagggtttccctcagctggagaaggtttctctgggagagcaccagccaggtgtgtgtcatgggatatatttacagggtggtgagctctcctggtccaacctaaaaggtcccagcaaggtgtaggggcccttctggccatttgacatcaccagggcagttagtgctgatacaaaccacagagaatgaacaaactccaactcaaacgggaatggattttatgtcattctgggactttcaaacttgataatagaccaagcatggtggctcacacatgtaatcctagcactttgggaagccaaggtgggaggatcgcttgcggccaggagattgagaccagcctgggaaaggtagcaagacccagtctctacaaaaaaattttttgttctgttttgtttttgagacagagtctcaactctgtcgtctaggctggagtgcagtggtttgatcttggctcactacaacctccacctccgggttccagtgattctcctgcc

SEQ ID NO: 62464 - DNA, 1281 bp, Homo sapiens
ggtaaagaggcccgtatagtactgggattttggatcccttgagtgaaggaccaggcagagaaggggagcactgctggaggatgtcgggggctgggccaggctgggcacaggcacatggccatggtgattgaccgcatttgcctcaccacttcacgtggggacctggcaaccacacaatggccctggggcatggtgtgggggctgagacatgaggcaatggtcttggtctcaaacaccccagcttccggctgctgggcgtcactgacttgctgtggcttcctggcctggctcagcattggccgtccggctcctgcagcagtgacatctccactctggacccatgagcccatcagctcttggtggacaggtttgcacagttgcccctgctgcctgtgcagtgagctggctgcggaaggcaggactcccagggctaggagggtattagcaggctggctttcgggcctcagcaccatcgtgcttcttatgtgccgggacaggatcaggaccatgttgtgcctaacatccggcagaccctggtagcttcttaaatgatgacactttccagcactcacatatctcatctgagttaggccgggctctctagctggggcgggaagccccgcacttcctaatacctggtggctgagtcaacaacatggggacgtgtatttggatagcaaacagcgatcagcagcggagccagcctgctgccttcctgcacccgccttctagcaaaaatgtcctctggaaaggtcagccaggactggctacataattttcaggaccaggtgtaaaatgaaaatgcaggtctcatgtttaaaagtcagtaaaatttaaagaacagcagagcacgaaaccaaatgtgagcccttccttctacacgtggggccccaggcagtggcaccattgcatgcccccaaggcagcctggagtcagcgtttcccagccttgtgaagtcctcatgcttccaagggtggcaggattgggtcctctttggtagaagagctgcttggcatcctgagacgcactcgccccatccggccccacaagcagctttctcaagagctggagtgacttccacttcgaagcgcaagcacttcaccttctcctttttgttcttctctaccctgtttccttctttctttgtgaactcagaaagctttgagactcccctcccgttcctcctttcttcccctccactcttgccgcccgccccccaccccctccgcctctgtttctctctccctctttcccttgcttttatctgggggaacccctttc

SEQ ID NO: 62465 - DNA, 2482 bp, Homo sapiens
caagacacagtcctggcccccctcatcctcttcacacaggaaccagaagggtcttcagcaacatgcatgggatcgtgttacttctggcttcccatgcctgagaatggcatccagacatggccttcaaggctctgtctgcctcggtgaccccatctccagccactgttcccagttcacatcggggaattctccggccctcctagagaggcagcccaggttgctaaagaggcacttcaagcacatttcaaagaacgcaagaattctggagaggtggagagcaggagaatagcacaagcaagagccagctccagggtcaggctggagatgggaggtcaggcatggtggggaggacgggaagtggggctgggttcaaagcctggctcagcttggaggacctggcaggggctcggggtgggggtggagtgtctcaatcctggtgcacactggagttattcgaagggcttttaaaaattatcaaagttgttccaggttcattccccgggtggcccacacgctgtttttaagtttagctctccaacccttcttcctggttctccccttcccttggaagaaagtccctggtccagcctgggtgttggcactggcatttgccctcccagggccactgggactgggaatccccaggagggctttcgaaagtgtcaggaaccgctccttccactggggcttttctccactgatgggaaggctgccttgctcagtcagccccaggcccctggacagaaggaactaggggagcactaagcataggtgtccctagagagtcagctggaagggacctagttcagaagaggaaactgagtctcagtcaccagcgagtaccaccactggtggtactcagagcttgggtagcagagcttgggcttttcagccttggacaccaccagctaggatggagtgagggctgagctggaatgcttctgaggaaatgatctctgacccaagcatgccacaattatgagagcatcttcagcactcataagcatcgcaggctggatctctttctctgacctttggatgtggggtgccagaatctgtgcttaaagatgagggatgtcgggcttctgccctcaaagaactctggatctcgagggagcagtgggcctaagcatagagtattctaatacggtcgctaggcttccagagctgtaagagacaggcttgagcagggagagacgaattccccgagggaggccttgatgaggaggtgaagaggcagtgagggtctggtgtctactcccctttaaccacaggcctggccttccagccagggtgctgtaccaaagtgagtgctggggccgctaagtggtgcccaggtactgatttcccctcgacccgcagtcggctgggctgggtgggtctgtggatggtttggaccagccttgcccgattaccccagtgtacggtccaaatatgattttctatgtgtgccatgcagatcaggagcactgtagcaggcccctctctctatcaccagtgcatcactttcatcatggagcaggttgggaaacaagccaaaggctggccccacagacacaaagaataagtcacaactcacccacgtggtgtgtttcctcctaactctttagtttgaaattttcaaacttgacagaaaagttaagaaccttcgtccagattcactcattgttgccattttgccacgttttctttatctcactctctttcacgtggttttgctgagtcatttgaaagtgagttgcagacagcccaccgttaagtacgtcagcaggtatctttcaggagtgtggacttccccatttgcaaccacggtgccatcatcacacctaagaaattaccactgtccaataatatccaatctacaacccattcatatttccccagttgaactccaaaaatgttttcgtatggctgttttcctgatccaaaaatcttcatgcattacatttgggtgttgcgtttctttaccttcttttaatctagaacagcctccctgctctgtgtgtgtgtgtgtgtgtgtgtgtgtgtgtgtgagacattggctttgaagagtccaggaaggccagctgtgttacacaatagatttgtgtaatcgaatatgttcaggttaagtttgcatagtttcaaaactcacctgataattgcttcattgtgtccaggaaagtcctaaggcagagaggctatctctttggctgtctgtccctgtgtgtgttgtggggcatcctgtccagccacccagaaaaagcaatggctttggtaacatgacatgttatgtataaaatgcttcctgccaggtgaggtggctcacgcctataatcccatcactttgggaggccagagggggtggatcacttgaggccagaagttcaagaccagcctggccaacatagtgaaaccccatctctactaaaaatacaaaaattagccaggcgtggtggcaggcgcctgtaaccccagctactcgggaggctgaggcaggaga

SEQ ID NO: 62466 - DNA, 888 bp, Homo sapiens
aactgtgatcggaccacggcactccagcctgcgtggcaaagcaagaccctatcgccaaattataataaagaaattctggtgtgcctctgagtcacaccagctgggaacatgctttggcagtaaccaggtgagctgacttgccacgtgggattatttactggaatgcaggcaggcacgcgggaacagctgcagtagcttaactctggttttggaacagctgaccagtgaatggcctgggttttctggcagaaacaggtatctcagttgttttgttttgtttttcagttgtctattaaggttgcttccagtagacgagaatgaaaccccgtcggctgctcttggtagctccttgctactcaaaatgtggtaggaggatgagcagcctcggccccacctgggatcttgctggcctctcagctccacccacacctgctgagtcagactctacacttcaaaaagatctctgggccatttgttgcagtcaagtttgagacccactggaccagactagtgcctcagagtctcctggagggcttgttgaaacaaagtgctggccccacccccagagtttctgattcagtagatctggggtggggtctgagacgctgcctttcccacaagttcccagttcttagcaaagcagccgctggttcagggacctcatgttgagaacctttgatccagactgcagagggctggctggcaaatcagctgcatgttgggagtcacctgaggaatgttttaaatgctgatgcctgagtttggacctgaggttcaaatgtaagtgatctggaatgtggcctgggatcaggatttttgtaaagcactttgggtgagtccatgtgcagtagattttgagagctgtattctagtggatctgccctgttg

SEQ ID NO: 62467 - DNA, 1835 bp, Homo sapiens
gtgggggcacctctcagtgaccctgcatgaccatggggacagaggcagacctgcaaggccaagccagtggcaggagggcaacagcaatgttccccagaggctgctgaggctctgaaggacacaggccttacacacagcactcctctgcacaatctctctgcatacctgcctgcaagactgtccacgccagaatggactactgcccaaagaagccatccttactgtgaccacatcagcattaccttcctcctcctcctcctcctcagccctgtcaccgatgacacctaccactgtcagagccagagtgaagcagaaacaccactggcctgggagatggaagacatggattctgttctcagctctgctgtgccctaaccgtggaacctgaggccagccccttacccacgcctgccccagcctcatcaaaggtgacctctgaggccccactgtccaccaggcacacacagggagactggcctcaggtgcagttggcctcaggaaagccccagctctggagcctcccaacctcccagtcccgagatgagtgacatggccaactgccccaccccaagtctggagaggccggtgggagaagcctgtgaccctccctggcccgcccacctccacaccctcgcaccttccacacgggcctcatcaggggtgatggtggcacacttgacagccacactgtacttctgggtggccagtgcagagtcaatggtgacctggtcatcagtctggtcacggtttgggagcccgaggtcaaaatactttagctggatgtccacgtggggcaggatgagctggggacagagggccagagcaaggcgtcaccccagtgactcagggacatgacaacaaagggcaggataagaagtctgcaggccatggcaggggacagtcagtcaaaacagggatgagtgaaggccagtggaggggcgcagcagaaagctggagtcagccatttctcagtggggcctggccagagctggcagaggctggggctttggagagaggttggcaggccaggccgcagtcttttggagggttcttcctccactgtgcctgtgtgcccccctcacatggcccatcaactcagccaaaccccaaccccaagtacatctagatttctctatacaactggtttcctcttctcaagtgctttgagatcttacagttggaagtgacagttctcaacctttgtcccatgaacgcacacacagtgtggggccttcacaaggactacatgctctcctggacatacatagaccacggcaactttggagaagccaagcggccactctgggacccctttgccatggtggctcgtcacaactgcaggctgggtcactgccctacacaccagccctgttcccttttcactccttttcaagaagtgaggcaaaacgtaggggatcaagatggaaatgatacaggattaaccttgaagcttctcaaagttgacagaacgtgtgggatctggcaccatcacaacacggactgctggggacaggcccccgcctgacgacttctgaacaattagtggaccagatgtgaaagaagggtagacagagggagagaaacagagctgctgctgcctaccaggacaacgggggggtcctagggacctgcagtccagaagaccctgtgggacagaacaatccctggccagcccacctggagagccacccacttcaggagggggcactaccttctccttgatgaactgccagataatacgggtcatctcatcaccatccatctccaccacgggcttcgccaccttgatccttttgtcggcatctagaagcagggacacacagcgcatcatgccc

SEQ ID NO: 62468 - DNA, 785 bp, Homo sapiens
ggactggggacgggaagtggggaggtattgtttcatgggtagagagtttcggttttgcaaggtgacaaagttctggtgatggatggtggtaatgtctgcacaacagtgcgaatgtacttaacaatactgtacactgaacaatgactaagatggtaagttttatacgttttttaccaaaataataaaaatttaaaccagtcaaaaaaaatcaggagattttatataaaaatctagaaatgcagcaggcactcactcatggcaaggatgggctgggctgaaggcggcctctcccttcactccatgacagccaagtgccctccagtgtggcccagggcactggagtttgagacccctgtctgctgttcagcctgtatggtggagatacagccatggtctgcccttctctgagagataagtggtgacaagctacctgaaatacacagagcagcagctaggcctccctgaaaacctccgaagtgacagccaccacgaatcttcagctgatgcattgcacaaacactgtcctcttggcgagagtgcaggatggaattacaccagtcaccagaggcacgttaggctgactctcctccctgtctggggctcctagcacccaataccaagtaaggatttcaaaacacatccctggcttcttgctgctcccagcaggaggctagaggtccagccgcaggcagccagccccaggcataactgctccctccacattcctacccatgctctcagcagaaaggctgctcagtcagcatgtcccagcaaaagatcagaga

SEQ ID NO: 62469 - DNA, 2555 bp, Homo sapiens
gcacacttaaggggcaagaattaagaagtttctgggttaggagtgaaggaaggctagataagtaattctgccactgagccgttcacagaactggtccgcactgccccaagctctaacttaccagaaacatcaccagcagtcgctggaagcctatggcgttgcaaaataggaaaagatgcgtgcaggaattaccaggcagcaaagacacggggctcttttagccccaaaatattctttccttgtcatcaaggggaatgccaagtattctgtctccagctgcgttgccaggtaacaagctggcagagtcgcaactgtagagtctgatgtccaactccaacaccaagcaatttccccattcataaccaacccacatggggacttctagaagggcctgcaactgactgctttttctgtatccaaattcaggacccttaaaaggcgctttgtgttcctgtttgtgtgtgtttttcgggttgtttgtttcttttttttttttttaccatcaaggcagaaaaaaagggagaattaaagaatgtggctaacttccaccatatttttgctgaaggtggtgtgctatatgggaatctttgggtcctggggcacttggaacctgggagttgttgggcagatccctgaggtagattcccagaggtacaaaagcagacatgcccctttctccttggcagggaaggtaggactggggcccaagcctccctacccccccggctctagtcagctgctcccacaatccggttaaccattacctcctctggccaggtcagggccagcgggccccatcccctcttcctcactctcctggctcactgcaaggggctcctggccagattaggataggggtttccatggcaacaggcattaggcagggccaagggacctacattgttccctgccttttgtagctgtgttgggtagccagggtgagggggcaggccgatgcccacacgccaagcaaggcagcctgcgttggcaacggaggctcgggctaagtcttgcttattacgacccgactactgtcttccctcctaagcagggaactaagggtacccagaagccgtgggaacgattccgcaaagtgacattttgcgcgggctgccaggtctctgcggcgagtgagccaggcagggagggcatgtgcctgccaaggcaggtcaagtcaaggagaggccccaggatggagcctcaagtgcagcgatgaaggcgaaggggtgggggtgggggcggccaaacaaaaggggaaaattaaaaaggacgctcctccagctgtcgtgtaaaaggctccaaaaatagctgacgtgggcctggtatcagcgcgcgcctggctgaaaaggaaggggaagtgcatgtctcccgcctcccagcctttgtctgagcaggggccgagccacgaccctccctctcgccaggggagcgcgcggggtgctccagccccccacgggtgctcgtctcgttccaggggcgcagggcgggcaggccacccttcgggtccgggacactctcaggaccccctcccgaaatacctaggggcgcgcggcagccccgagcccccgcccgcgcagagctggccgtcgcccgggccaccagttgccaccgtccctcaagtccccaccccagcgcctggcacggccgggaagcgccgggcgggggagcgcggagcgaagctgccccgcggccctttgtgcgcctgaccccgccgtccccgggctgcgggctggcgggacgtgcttcccggccccagcctgggaagccgccacgtcgcagctgggggcgcgcgcctgcctggaccctccgcgcggcactcacagtggcgccgcggctgctcttgcgaggtgggggctgtcagggccgccggcgcccaggccggccgcgagcctgaggctctgcagagcgagcgcacgacccgcaggtagccggccatcccaagctggagagcgaacgagcagggcgggagaggtccgagcgcgcgccgctcctcccggctgcctggccgcgggctaacgctgggcctggcgggcgctggccgcgcgggcaccaccggggcggggctgccgggcctgccgccccattgggccttgccggggaggaggcggggccagggccgccgacgcctccagcgtcccgcgggagccgggacccggcggccaggcccggctggtgcttctctgggcgccgctgaaagcccagctccgcaggagctacaggcgtgagacccaccgggacccgcgagcgggatcagggctgggggattagcagagccgcttgcgaggctgaccctctccaggatgccccatgtaaacctggatgtcagtttctgacgctttagcttaaacccaaaagccaatctgagcgaactcttgcttccctcgcctgccgggctgaacccaaaggcgcattagcccagtgcggctgcttcattcttgagctaagaccgccggcggcgtctgcgcctccgcgagtccgctgtcaggtccagctggtgtagagagagttgaaatctcactttgggccgggcgcggtggctcacgtctgtaatccta

SEQ ID NO: 62470 - DNA, 871 bp, Homo sapiens
gtagctgggactacaggtgcatgcctggctaatttttgcattttttgtagagacagggtttcagcatgtttcccaggctgttctggaactcctgggctcaagtgatcctcccaccttggcctcccaaagtgctggcattacaggagtgaatcccgcggggactcacatttcatccagccaacattccagggcattcgttttgtggtgtgcaataggcagacagtaacatttggcaacagtggtgagagggtattgggatagagcctggggaagggagacaagagttcctgagctagggacaggcctgacacagggtgctggcggaacccccaagagaggcaggactccagagatggtatagaggagatagaatcagcaggaattgtagctggtttgacatggggcatggccgggggaggagtcagagtgactcagacttccatccctggggctggaagaatggcacagccattattagaaatcagagaataggaggaggagagagttgtgggagaggcgttgacagcagagctatttatggtcatctccaaacttatttccctgccagctgtctgtgccccctcccccacccaatctgccctacctgctgcttccagcactgtcctcccaaagcccagtcctgagcagctactccacagctcagatacccacaggagcttcccacgccatacacaagcaactctgaacagcttctaacagtccatggcctccacctccctctcttctcgtctgctatttccccctccccaggatccctaaatgtagcattctcctgaattgtcactgcctcggtgccctcgcgttgtcccctccctccaccacacaggttctgtactgcccacagccagac

SEQ ID NO: 62471 - DNA, 1079 bp, Homo sapiens
cactgagccaaaaaggctccactgccctccagcctgggtgacagagcaagattccgtctcgggggaaaaaaaaagaaagaaatcagtttgtccaatgaggtgctggcaaatgtttaacaaccagctccagtgcggggggtgtgtgtgtgtgtatgtgtgtgtgtgtgtttgctaacttgtagcatttgctgatttcggtagtgtaaatatttccaccatggccaatttcaaactaccaacacagcatcactgaacagagttgtatatttccatctataatatttccaccatatagatgcaacagacataaatgtcctcaaatgcatagatactagtaaaatatagtaaaataattagaaagtgatgagtttgagtcttttaatataatcataagtttatataacttaatttttaataatggctatgtgtaacaactggcttgcaaaattcttgagaatttaacagttggctctcatgagcctgtacaagctggctccagacaccactccagccaccccatgtctccttttggatcttgtggagtatagcccaggacgtggcaactgcacaagagcttagggcagcttcaatatccttcttagggactccttcctctggcaattgtgtccccctcctggaggacacagccccagaggtgaccttttcccttccaggctccaagctgtttaacattctcatccaccagcacctccccccactgcagggcggctatttcaggaatgccgggacgtgcacgtagggcatcctggccagccacttgctggccagccacttgccgaatgcaccctgtcaggtgctcacaaggtcgtccagatggctagaaagagagcagcagccttaggaaggggctgcctgctcctaggctcacagccccttgatacttgcattctctaattaggaatgccttggccaacagaccctagaagtccactgccctcgtgtatttcaaaacctggatccaaactaccatttcttagtttcatctcacttctgcccattgcttctctacccctgcaagtgacaacagagacagtcataaataatgttggcaacttcac

SEQ ID NO: 62472 - DNA, 832 bp, Homo sapiens
acactcatcacctcccatagttaccgttgttacccatttttttaaaaaaaacgagaacactttagaggtactctcaaaagattgttttgtaaagttgtttttaaaggttgggatcacccagactctaattcaagtgaccttatgggagcccgggaagacaggattgtaagcaggtaaaggaaacctccacaattctgtttcttggtgaggagaaagcctgtcttgaaggaggtgtggaggaggcgggggccggcagccagttgacgaacagccagaaggtggcagtgtctacctggggaggggcagtgggctgagcccctggctggggcgagtcctttatcacaccacagccagggccagctgtgtgcagccccagattactccttgacaagactcagtcccgccaggccctccccgcaggcctgttttttatgctggtctggccatgaggtaaggctggatagggacaaagtgcccgagcatgacagctgcccaggctgggcccagttgcacagcttgggtggccctagccttcgagctctaaatcgagtctcctcctactcctagcccatggcagtcgggccccggacattctcctcactgcttccaggattctagagggctttccagtgcccctggccccagtcctgcagtgttgacctcctgagtccctgcctctcacttcccggtgatgtccctctgctctgtgcccatcctagaaaaaaaaaaaaaaaaagccctctttctatgctttcttttttctttcttttctttctttcttttttttttttaatgagacagtctttttctgtcacccagactggagtgcagt

SEQ ID NO: 62473 - DNA, 1229 bp, Homo sapiens
gaaggaaggaaggaaggagggaagaaagaaagaaagaaaacaataatccaatatataggcaagagcccttacttctctactacttacagtctagtgttcagagaatgtaggagtgagcccagagagcttcccaagcctaccatgtcgtcactgcctacaagagtccctgaagatggccacacaaaaccctggggcttactcatacatgttcacagtttcattttcttatcatattggtcagtttcatctacactggaacgtggttccacctatctttctgttctctgataagcttcagctcaaggggaaacatttctggggccacaggttctgttgcctgcctctgcaaagagcacattacgcaaagcagatgttctgtgcccaattcagtctctgctatcagaaaagctgtgttcagagccacatggagcctgcagcctcctgctttgcgggaatgtttgtgtaaaggttcctggctttctctttgtttacatctgactgtttacctttcagtcccatctcgtcttctgctcagtgaacagtttttgcactggcaggagccaggtcgaacagttccataaactgcttttttatggttctcagtagagcagaggtttgaaattagagaacctgaatgttggctcaaggaggacacaaactccctgaattagtgtccaaatctatgtgtgtgtgtgtgtgtgtgtgtgtgtgtttgtgtctttctagggggtggttccttattctcattggatttccaaaggggtctggaacccacaacagggtcagaacacctgggtatatggtgggccccaaggggccaccaaatggaacgttctgccgtctgctctttggaatattcttctggccaagagccaccacttccctgactccggcctttctcttccccactgtcaccaacaggggatataggctttctattgggcaccactcctcactgagaactgctctcagggctttctgagcctgttggtgtgactgcggtggtggcagcttgcaggagagacacctcactctttgctttgtgggatcctctgcttggtccctgactcacagactgaagctcaaattctagccacgcaccaaaaagtgaccgacagccgggcgcggtggctcgtgcctataatcccagcactttgggaggccgaggcgggcgtttcaccatgttggccaggctggtcccaaactcctgaccattgcatttgtttgca

SEQ ID NO: 62474 - DNA, 2579 bp, Homo sapiens
gatggagtctcactgtgtgcccaggctggtcttgaatgcctgggctcaaataattctcccaccttggcctgctaatccacagggattacaggcatgtaccattatgcctggttagtttgtttttgtttttgtttttgtttttgtttttgttttgtagagacagggtctcgccatgttgcctaggcctcaatctcctgatctcaagtgatcctcctgccttggccccccagagcgctgggattacaggtgtgaactaccctacctggccctagttgttctgttcagaagccagattacagaatctaaatgggtcatccagtgactagccaaatccaaacaggtacaagtccaaaagctgagatcatcgctgacagcagaatctctcccagagaattggtgatgagccattccggaggcagtgggtgggcaactgcccagggctatattcagtcctcgtggccatgggagggggctgcatcctgagtgtttaaaagtcctgatgaaatccagatgtaaggatgaatgatgctaaggagttggaactcggcatggtaacatggctgccttgggctttcttgacctgatgtctttagctatttggtccatctgattgtctttagttgagtttcttattcactgaacagctttgtacgtcctttgaatatttccaaattgtgtgccaattgcattttccactgtaaatgaatcaactggccttctgtttgtgttttgaaaaattacaagtaacgactggacaggcccaacggaatccctcaatctcccccatgcaacattcctcactaatgaccttcctggcctgagaggtggttaaaaatagtgccatctgccctcaagctacactgcttcaggtattgcgcttcataatccatgccctctatactgaacctcgtggccaggacaagcttccagggcagtcacagtcagagtggacagctgtcacctgtagttggccacagccctatcaatgagtagggcctgcaccaaccctgctcaagtgttctctgcagagagtgagcagcatacctggcttcgtgaggtggggacccttgtggctctgggcatccaaaggacttgatttctcccttggaagatagaggcaggggcaggaccagggcataagcagttatgctagtgaggtgtactctgatgccccccggtacagtctgaagtctgcaggagttgaaagacgtgtgcaggtgggccaggtatccctagcagtggtttctatttgtggcagccaaatggtgagagcaagaaggtggagaggaccgcggaacctttgcaaaggcaaaccagtgagagtaagtgccagatgggccacagtgccttgggggacgtaatggttgtatctccagagatgagtagatgctgacttcctatttaacatcaatccagtcccccaaatgcctccgtcggtgggcctggcattcttccagactcccttcaaaccatgtttccagcaagcaccctgccatcagccttactcccacgctgattactggctctcagcgcatgtatgtttcgtttacactgtgctgctgttttgtaattgtttgcaagttgtgtcatatgtgtatgttgtgtctaaagtggatagaggcctctgagatcaggatctagttttctcgaatcatcgtcctcctccacaaccaccaccaccaccaataactggcaccgaacacagggcattacgtaatgcggacaaaaatgcttgtaaatgagttcatgtcacagacactcagaagtttgcccccactgtaaacaaacactgtagaggtgaaaggctttgtttccaaggctcaggaacatggagagaggagccctctacctttgcagttcattcaacagactagggatctacttgccctcacagggctcttagaataaggaaaaaaaagcagaaggcatgttccgcaacctcacagaacatattcagctgggaagattgttcatggagttggcaaatctttttttttttttttttttttagacagattctcactctgtcgcccaggctggagtgcaatggcacgatcttggctcactgcaacctccgtctcctgggttcgagcaagcaattctcctgtctcagcctctggagtagctgggaccacaggccacaccaacactcctggctaatttttgtatttttagtagagacgggtttcaccatgttagccaggctaatctcaaactcctgacctcaggtgatccacccgcctcagcctcccaaacagctgggattacaggcatgagccaccgcgcctggccagagctggcaaataattaaaacaattttcagacatcccatcctaccaacttcacagttaagtgttaaaagaaattaggttggcggggcgcagtggctcacgcctgtaatcccagcactttgggaggccgaggcaggcggatcatgaggtcaggagatcaagaccatcctggctaacacagtgaaaccccgtctctactaaaaatacaaaaaaattagccgggcgtggtggcgggcgcctgtagtcccagctactctggaggctaaggcaggagaatggcatgaaccc

SEQ ID NO: 62475 - DNA, 2219 bp, Homo sapiens
tcccgagtagctgggattacaggcaactgccaccgtgcctggctaatttttgtatttttagtggtcttgaactcccgacgtcgtggccaggctggtcttgaactcctgacctcgtgatccacccacctcagcctgccaaagtgttgggattacaggcgtgagccaccgcaccaggcccaaaacagctttttcaaaaattctttactatgagattctttgagatatcaacctgtgtaacttaaatgacctattgatattctcagcttttcagaaatgtattttcttgaaagaaggaaggaaggaaggaaggaaggaaggaaggaaggagaaagaaagaaaaagaaaggaaggaaggaaggaaagaaagaaggaaagaaggaaagaaagaaagaaagaaagaaagaaagaaagaaagaaagaaagaaagaaagaaagaaaagaaagagaaagaaagaaagaaagaaagaaagaaagaaagaaagaaagaaagaaaaaaagaaagaaaaaaagaaagaaatggtgcaaattctccaaaaaggccaacgtgctgcgtggctcctggccacgagggggcatggtctccctagtcctaggctaaggaaccaacgatggggaccctagctgtgtccagcctcagcctagtggagttgggaggaatgccctcttggccaaggtccaggagttccaggagactccagacctcttttcctgtactagcaactccccgcagcagagtgtatgtctggggtgtagaaagccacgagcgctctaggctgaagaggaggtcatgtttaaattacagactgagcaggagtgctgtgcaagcagctttgcccaggagccagcagggcgggtggtgtctggggcatgaccttgggtggctgtggtgctggttagggtgctgggtggagcctggctggcgaggctggagagcatgggcggggcagccacagtacagatggggccacacaaagcttgtgggagccgctctgactggccagctgctcccagccctgccagcgctgggattgtgtggtgtgatcaaggcaaagaccatgcttttcagcaaggtcgtctgaagtctggcttcaatctccctccctccgcgttaccttttccaaaaggacctcttctccagcccagctaatgacctgctcttccagaaaatgacttaaactttgcttcattgattcatttttgcacttacttcgacacacagcaaacacttattgagcacatatggtagccaggcactgtggaaatacaggaccttgtctgtgacttcatagacactatagtttttgtttgtttgtttgtttgtttaacagagtctcactctgttgcccaggctggggtgcagtggtgtgatctccgctcactgcagcctccacccctctggcttttctgcttcagcctctcaagtagctgggactacaggcacgcaccaccatgccaggctaatttttgaatctttagtggagatggggattcaccatgtttgccggactggttttgaactcccgacctcaagtgatccgcccgcctcggcctcccaaagtgctgggattacaggcatgagccaccgcgcccggcgcataggcactacagttttatgcctttgaatctttattcatgtttttctatttgtggaaaattctcctcatccctctctgcctggccagattttaccatctttcagtgacctcctcatgcctcaccaactccagggtcccctctctgattattccaaagtgagaaaagggaccaggcccttctcattcactgttatatcctgagtgactaacaggtgcctggtacaagcaagcactcaaaaatattgacagaatgaatgaggcagtcttgtccctctctgacttcacaaccctgttgcctagaactttcacttccagtcctgcccatggcatttctcctactgaactcttgtgtttattactactcagtgctgggtggttgggttaggcagggctctggatttgccaggaacagaaaggaatttattggttcattgaaccacaccatgggaggggtagcaggaaccataggggtctgggaatacaacgtcaggacactgccactcacactggcttctttcattgatgtcttcatcccccactactgcagaaagcctttcgccacccagaaaatggctatcaaccggtcaggattcacatcctaccagcttagcaatccaagaagaa

SEQ ID NO: 62476 - DNA, 1884 bp, Homo sapiens
ggctagagtgcaatggcgtgatctcaggtcactgcaacctctgcctcctgggtgcaagtgattctcctgcctcagcctcccgagtagctgcgattacaggtgtgcaccaccaagcccagctaatttttttgtatttttggtggaaatggggtttcaccatgttgatcaggctagtcttgaactcgtgacctcaggtaatccacctgcctcaccctcccaaaatgcttggattacaggcataagccgctgcacccagccaataaagccattttcattctgaaaaagaattgaaaaaagctactgaataggccaagcatggtgacatgggcctgtagtcccagcaacacaggaggctgtggcaggaggatcacttgaggccagggactggaggctgcagtaagccatgattatgtatgtgaatagccaccacactccagcctgggcaacacagtgagaccctatcttatgaaataggaaggaaggaagaccactgaatagaaataaaagaatgggaagaagtcctgatacatgtgtctcatgttttcagtcagatccctctagggatgcaggtggaatctgtgtcacccatgaatggaccctttacttggggggcattcaaaatatgaaggtaatgaggactaagtagacatcttccaatgaatgacacagaaattataaacctcttggcagtctctttgaacaactctcatctttctcaggatcttaatgattcatgtcacaggcccttcccaaagattgtgtggtggctctggaggaaaaccgagaagtgatattactcgtttctggataattgtcagtgagtcagacctcgttcagcgctctggagtttccaggccgttaacttctctgcctgaactcatgagtcagggtcagtcagcccagagctgcaatgtgtacgtgcttcccggccctgctcttctggcccgcccccaagccttcacgcatgcacccctgcaggcacttaccagcctcctcatccgtatatcctggaaagggtgcaagcatgcctggcttagtcatccatccacaggaagtttgcacagccctacctgagtgctaagatcaggctgtaaactgccagaatgaaacaaaagagggaaaataaatatcagcactctcccataaattttgcaatagtcagctgtagtctagctgtgatttagagcatttgttttgtgaataaccggatgtgaataatctatatgtgaataacctatacgtctgtcaatagtgatccattatgatacattgtggtggtgggcaccttgtaatcagctactcaggaggttgaggtggaaggatcacttgagtccagaagttctgggctgtagtgctctatgcttatagtgtgtccacactaagttgggcatcaatatggcgacctactgggagctgggggaccaccaggttgtctaaggagagatgaaccagcccaagtccgaaacagagcaggtcagaactctggtgctgatcagtagcaggatggttctgtgaatagccactgcactccagactgcgcaacttagcaagactctgtctctaaaaaaatgtgtgtgtttgtataaaatacattgtagtgtatccagagaacagattaccatgcagctatttaaaagaacgaggtagagctatgtaagttgacatagaaagggtcagtttggccgggcacggtggctcacacctgtaatcctaacactttgggaggccgaggcaggaggatcattgagcccaggggttccaggctgcagtgagctatgatcacaccactgcactccagcctgagtgacagagtgagatccagtccctaaaaaaacccaaaaaccaaaaacaaaaacgtaaggtcagttttaagaataagaggaa

SEQ ID NO: 62477 - DNA, 1318 bp, Homo sapiens
taatttttgtatttttagtaaagacaggctttcaccatgttggccaggctggtctcgtactcctgacttcaggtgatccgcccgcctcggcctcccaaagtgctgcgattataggcgtgagccaccgcgcccagccccagggctggattttgaacccaggtttcctgattctggttaaggattttctccactacaccagaggtacccttttctgagcctcatctctaaaacagcagggtcaggatacagtcccttccagctgaaaatattcagtgtccgcaggaacttttccccctcccccatcactcctggcacgtctacaggccggaacagttggtgtatgtgccccatttatcggatggggccgataattccctggccggcgggatttcaggctgggttaagagaactccagccggccccatggccacaaaagggggagggtgggggtgctctatggttgggcatctggccgggtgcctgcagaaccaggcaagaactgcccatgaaagctggctggctgccgggaactcgttgtctttccatttaaacagacactggctgtctgttgagtttctggaaacatctgaccttttgcagagcatctcaagagttgtcagggagggctggagggaggcttctcactttctgtaaacggtttaacccttcctacaaaacccctaacaataaaaagaagagatcaatttccagggaactagaaaggtttgtttgtcctattttttttggagggggggcgggggggacagggtctcgctctgtcgtcatgcttgagtgcagtggcttaatctcggctcactgaaacctccgcctcccaggttcaagcgattctcctgcctcagcctcctgagtagctgggactacaggcacatgccaccatgcccagctcatttctgtatttttagtagagacggggtttcaccatgttgatcaggatggtctcaatctcctaacctcaagatccgcctgcctcggcctcccaaagtgctgggattacaagcgtgagccaccgtgcccggcctgtttgtcctattttgttggctggggaggtaggtcatgtctgggagcagggaagagacattgagcccagggacctcctgtgtagtttttttctgatcccctgtttctgggactggaggctgtggctccctggggagtgagggggagggggtgggtgagatggaagtcctggaggaaggggaggggctgaaaggaggcagctccctctgcccagagcagaggctctactgaagacaagagtttggctcactagagcagggactacttctctgacgtagtg

SEQ ID NO: 62478 - DNA, 1887 bp, Homo sapiens
tgatattatttttaattgtgtttttctgttgtctaactttcttgtactaaatatgtgtttacttttatagagaggtaacaaaagtaaccacttttttctttttctggaggagctaggcagcaattcccggagaggagaggctgcagaaggacaatgtacacttaggccaggcctgcccggccctggaacgggctgccacttggcctctggtttctgcagtcccttgacccgtcagttcaggccagctcagccacttacaagtccagaactggttgtttcagtaaccgccctgaaagctgccgttgctttcctggaagatagcaccgggacgcaagagtggagagggaggagccaaggtcacctcataaatgcgggatatttataaccctatctttcacccctcctgcagatctccgtttcgttttactctctgagcacgcccgcccactgcatgttaagggagcagtgagcagcatttatctcgggtggagacgtgggtggtttcacagagtgtggatctgccctcctctctctcacttgcctccttctgtaaacaatattaccattcttgagagctgaccatgtgccaggtgtgtgcctccaccattgcatttcccatcacagccttgtgagatctctagtgttctgatgcccactttacagatgaaaaactccaggctcagagaggttaaggaactcgtcctacgtaacacagccagttaggtaagagtggatctaggatttcaacccgggccagcccagactccagctagtgaggccgccccctgtggcccaggtccagcgaggccgagtctcccaaggtgaaggaccgcacagtcccttgggctccacggctaacttgggccgaccagcggtcgtggggaggcggacccgacaggccagggtggtcgtggcatcgagtccatcgttggtgcaaatggccgggggccggtggcggtggtggggcggggggcacggcccgcatcaggcaaatcccggaggcgccctctggacaattcccgtaaacacgggcagagcggggcggggctgggcggggcttggcgggggcccagcatttccggggacgccgcgccggactgaggctgtgcgcccgagactccgggtccccaggggctgcgccgggccggcctggcaagggggacgagtcagtggacactccaggaagagcggccccgcggggggcgatgaccgtgcgctgaccctgactcactccaggtaggcgcggggggtgcctggcgaggtgggagccgctgcccgggaggtggcggaccaggcgaaaaccgccgcgcagccgctgcccccacccttgcacccgcacctcccgcccggcccctctccccagaaggcgccacctgcacgctctgatgggcactggggcccgccgcccggggagcctgttgccatggcagcgcaggaggctgggcccgcgttcccatggccaccgggggcctttgagcagcgttcacatcgcgccagtgcaccacccctactcctaaacccgggacctggtcctggggggaagtcatttggaattcggaaaaggcctgggcccctgcggaatggtcgtggatatgacctccgagttaggccctttgtcatggcttctttcttctcactgagcaccaaggtgctagaaggagaaggctagaaggagaaggaagttgaggttctgggcatgaagctgcagttgcggctactcgggagttattctggtctagcagaaaggcgaaggagccctgggtcatctcgggaaggtcatcaaatctctgcccacatttcctcacctgtaatatgggtatgttatttgagttaaacacaggattcctctaaaggttgaaatgccttaaaattttgtgcgggaagcat

SEQ ID NO: 62479 - DNA, 868 bp, Homo sapiens
tgggtaaaagctgccagtgagttttgaaggcagtgtaagtgctgacccggggtggatgccctctgctgcagaaggcgctgccccaaggaagctcccagccctgaggacttggcagccattggctgatttgaaagaatacacagggtgtgccagctggtgtcgcttcctcttcaacatgtactgatgctgcagctgagctgctgcccagcccctggggagaagacaccagcagcatgcccagccagggcagggtggagagctgcagctgcaggttggcataagaggagagctcagggctacaaggggatggtggtggggggccaaggcctggagagctgggctgcagccagtgtatgtctgcgaggccttgctgggcagcctgccagtcagcacccgagaatggggaggagcttgagtgctaccccaggagggggcgggtgggacctttgggttcaagctccactgggcttggcaggaggcccctcccccacagccagcaaacaaagcaacaactcccagagtagaactgtgggagctccagagccaggttcccctgggtgggaattagagcaggcagacctggccaggagccgcctggcagggaccatccatgcccaaggacatggcctgcatgcagctgggcagaggctgtacccatggatgattaatgggtattgatcacttgggaggccagatgtagcctggacactgctggcacttgccctgcatctgttccctttgtactgggcagggtagagaagcagcagggatgtgtgttcatttgctttttacttttagccatgcttccctttattttctttcccttgtagctttttttttttttttttttttgagatggaatcttgct

SEQ ID NO: 62480 - DNA, 1295 bp, Homo sapiens
cgcatagcggggacgcagcgtgtccccaaaccaacgccactagcagagggtcccagaggagccggaaggggccagggcctgggcggcggtgggagggtctgagcagtgggggcggggagctgggggtcggctttcgtccgcgtcccagcgctccggcggccgccggggctactgatcccgggcttggcccctgcggcagcgccccgagctgccgcccctcgcgctgccagcgcccgggaaggaggaagggggaagggggcgggccggccgggctcacggccgacttcctccttcagccccgccctccgccgcttgcgggtgagctctgcccaagccgaggctgcggggccggcgccggcgggaggactgcggtgccccgcggaggggctgagtttgccagggcccacttgaccctgtttcccacctcccgccccccaggtccggaggcgggggcccccggggcgactcgggggcggaccgcggggcggagctgccgcccgtgagtccggccgagccacctgagcccgagccgcgggacaccgtcgctcctgctctccgaatgctgcgcaccgcgatgggcctgaggagctggctcgccgccccatggggcgcgctgccgcctcggccaccgctgctgctgctcctgctgctgctgctcctgctgcagccgccgcctccgacctgggcgctcagcccccggatcagcctgcctctgggtgagtgccggggacccggggacgcgggccgggggaaggaaggctgccggggacgtgcctcgtgcggaggtggccgtgacaaaggaccaaggaggggacctgtcggaggcacgggatccattaggaccccttcttttttcaaggcgctgcgcggagggagggagaggagaggggagctgtggggccgctggcccctttcttcagttttctttctgcgtagggatggggtctagcccgctctgtcgtcccccctagttcccttaggaggatgcactttcggcggggtccgcctgcccatctacttgtctttgatgctgaccagagccgaccgcggtgccgcccccgagggcggctcggggtagagggaggccactgcttgcagtcctataaacactggggttctggtattcccagcaagtcgcagcagggccgggagctgtggtgggcgggcaggcgcccgatcctccctctccgcccctccatccctggcttgccagtgcagccccaagccccagcatggagagacctccaggccctgggagcgaccagactgcggatgggggcagctctgggcgctga

SEQ ID NO: 62481 - DNA, 572 bp, Homo sapiens
aggatacaggcgagtcccacacctcctgctgccccttcatcctcacaccctcccacggggacagccagcgtgggtgcggcttgacttcccgctggcctctgctcgatatgctgcttattcctaggatgattgaaggctcttagaagagaagtccagtccttcctcataccagtgtatctcatgtcacacatagggtcaaacttctaaacctttattactgattagtacaaacacaaacggagcaatgacaacagcagtgaggagaggccctgacaacgagggccgcccctgcccggggtgaggctgcacagcgccagctccaggctgggccagcttggcccgcactggcaacacaggcttgaccttggccacagctcagcagtagaaaggttcttggacagggtgccaggacacacgctggggctgctgtcacaggacaatcttaaaggagctgaacaagagaaaagcggtgggttttctgctggaagaggagggcagggactaaacccgaacttgcccccttctccctttagacccttctttggaacgggctatgttccgtgtgtcagccc

SEQ ID NO: 62482 - DNA, 2441 bp, Homo sapiens
tgagtatttactgagcatttactatgtgcttggcactgattctagagatccccaagggatgaagaagttgggaaaggagccagaagttggccctaaagaattggccaggcacggtggctcacacctgtaatcccagcactttgggaggccaaggcgggcggagctttggaggtcaggcgtctgagaccagtctgagcaacatggtgaaccccttctctactaaaaatacaaaaattagccgggcatggtggcgggtgcctataatcccagctactcaggaggctgaggcaggagaatcacttgaacccggaggcaggagaatcacttgaacccggaggcagagcctgcagtgagccaagatcgtgccccagcactccagcctgggcgacagagcgagacgctgtctcaaaaaaaaaaaaacggagaaaagagcaaaaccaaaaatctcattctcaccttcactccagggatctcttaccctcaaagcctcctttttagcaaccacactgaactgtcctcctcggcctccacctccttcccatgagcttatctttgccacaggaacctggcctgcataaatccggcaaaagggcttccagcccaagttcaaatctacttactcagagtgttgtcttaagcagttaccaaacctttctgaacctgtttcattgtccagtacctctctcctaaagattaaattaggtaacgcaggcaaccatttagcacagtccctggcacatggtgagtgctcagaaagcgataacggttactgtattattcaggtaaagttgggagaaggagccgggctccccaaggcttctgtggtttagccactgggcaaggtcggcccctgccggactggggcaggaagttcggcagtgctgaagctagtggagcccagggtcaaagagcgcctaacttttcctggaggctgtaaggtggctccgcggtgccacgctggggcctcaggcgagggcggggagggcgtgccgggaggagggcgcagcccgggctaggtctcccggcctccagctcccgctcctctgcagacctcaggccagcccccgcccctccctcgggacagcgcccccgaagctgtctctagaggatcccggggtcggaggcagggttcaaggcagcacttacaggaggatctcctgcttcgtcaggaacgtcaagtcctggaaggcaaagccagagcggggattagcggaccgctgggaggccgcggccgccccgcagccagctcccggaccctgctcccgagaagaggcccgcacgcgagctccccagggccaggcgtcccgcgcacctggtactcggccagcagctccttggacaggcgactgcccgagccccccatcgccccgccgcgcgcacagctccgccaactcgcctcgagacgcagacaactttctcacttccgcccttgggccgcgtcactgcccggtccccgcggcaaccgctcctggggccaccacccccgggcccgccccctcctaaaagctgccaggcgttcccagccgggtttggcaggcgagctgccggctccaagcggtcctaggcgagctggaggcggggcccggggaggggcccgacgctccggggcggagcccgggactcacggccccgcctccggggtgggaggggggggcgggccacgccgcgcgcgtgcgtgctggctgcgtatgcgtcacgggcgtcatgacctcgctgtggccccggcagcggctgcggggaaagtcgcgaggtgcatccgcttcggctgcagtaggtggtggcggcggcagccctgggtggggtcccataggggcatctgagaagtcactggagctagcgtttccgggaaacctggagactcgctgagtggcgggggtcgtcggctgcccctctgcccagcaagggcttttctagatgttatcatcaggcaatcgctgcacctgtcgcagcccccaagccacctcttccagaagtaaccataaccttgcttccttcttaggctatttactgaggacccactggatgtcaagcattgtgcatagttttcttcgattgttgcaacatcccttgcgaggtaggttcccattttacaaagatggaaatacgtaagtccaaagggtgttagtgatttttccgggcgccggcatttagaaggtaatcggtccagtccaaggcacttttaaaggctctccactgctgttctcatcattccagctgacctgccgtccttttgactccatctcacccctagactgctgaccctttgctcttgtcccctcttaacctctaggataatgtttggcacatagtaggctctcagtaaatattatcgaatgcataataaatgaatgaacgtatactattgcaaaaggtaaggattccaaactgctgggaggaggaagtggaggttgtgttggtcaggctgggattaattcttgatc

SEQ ID NO: 62483 - DNA, 494 bp, Homo sapiens
agatgggcttggcagctttccctacttgggcaggggcccaggaggtcaagaagccagcaggagggtctccaaaccttagtcagtcttcctttccctactgaacattcccacagccctactcttgactcactgagcttgctttccacaggaaagaaaaaactgagtcatcccatgtggcaatgctggaccaggaacgatatgaggattctcacctgggaaaataccggcggatctaccctgggcctgacacagagaagtatgcccgcttcttcaagcacaatggctccctcttccaagagactgctgcttccaaggccagagaggagtgtgccaggtactttgaccgacattctcctctgcacacctaggtggggacaagtcctgaagctgcattgcttcccagcagggaaagaggaagccagacaccagcaaagaggaatggagctataaatcctatcagactcttagtgactcttttcagtttagtaggtttc

SEQ ID NO: 62484 - DNA, 2391 bp, Homo sapiens
ttttttgagacaaggtcacgctctgtcgccaaggctgaagtacaatggcttgatctcacttcactgcaaactccactcacgggctcaagtaattctcctgactcagcctcctgagtagctgggactataggcacacaccaccatgctcggctaacttttgtatattttgtttttgccacgtagcccaggctggtcttgaactcctgatccacctgaatcagtctcccaaagtgctaggattacaggtgtaagccaccgcaccaggcctatttaatcctttctgtacactagaccctggtgatagaaatggcagaaatacagtcccagcactcaagaggtaataggaacatggacaaaaagacataccataccaattacaatacagtgtgggaaagacagtggagggaagcatgagatgcccttcctctgtgttggtaattgggccacagttgggaaagaggtgaacaaatctcttctgtgaataccaactcagggacatccatgtttccactgcagaaggacaagccagcagaaggctagaagccataaaccgagtcctggcaggatcagtgccacccactttaaccccaaagcagggctattttctgcaaccggaaagagtggcatctgactcatggactgaatgcaccttgccctccatggtaaactctgaacacagagcagccaaggttcccctctgccctgcgtctgcacccatgctgcagcgttccagagcactcctcaacatcaatcagttcaggtaaaagcaggagggaagcactctacctctcctggataacctccccaggtttccaaagggcattaaatctttgctaaatgaatgactgccaccaagttccactttgaaaagccctgcccaggaaccccatttgtataaggcaaaatacaaagacaccaagaattcctcaataccctaagattaattggggatcggtaaagactagaagatgaagaggcgccaaggccagccatgtactcatttctgctcatcaagccttagcctgggtttatcgctaggtgatgggtctgaaccctaggtgcggcccggggctggaggccatccaggagacaatgagcccctttcccagagaagccgagtgcccaaggcactgggctgtcgccgtcagaagactgccgagcggaagccctgcccaccgaggtggcggagacaggcaggcctgggcagccgctggggcggagggacggctcttggaaacggaatccgtactttaattaaagtttatgcagttttccaggagcgtcctgtacctcatttcggccctcacgtttcagggaagccctctccacagttacaggcagaaagggtgggccactgagcagcgtgagcccagatcttacccccaccaagtgaagcgggaaataacttgctactacccagcctccggcccgccccttccacttccggtcttacccggctacttccgctgctgtttcgtagccgactgctgaaggctggtttgcgtcgacatggcggttaccctgagtctcttgctgggcgggcgcgtttgcgccgccgtcactcgctgtgggttcgcgacccggggggtggcgggcccaggccctattggccgggagccggaccccgattccgactgggagccggaggaacgggagctgcaggaggtggagaggtaccggcttctccccgggccctcagcttgaagcagggcctcgtgccccggcgctccaggccgcgcccccttggcgccgggtgtcctgccgctgcttgcgcagcggcccttgtttcttcttacccgttgttaggggcgcagcgtcaggtgttcagctcccctgggaccactggtcccttcattagtgacgtatttcatcatcagtttagagagttcggcatgcttacaggcagttattgttctaggtgttagctttctgggtgtacggagcagctctaagccggcaacatggcccggttgcccttgcgatcaaagagaagagggctgggcgctccatgatttagcctgaggctcttcaaacatccattctgcttccacgcatggcttctgccattggttctcttcccccagcaccctgaaacgacagaaacaagcaatccgattccagaaaattcggaggcaaatggaggcgcctggtgccccgcccaggaccctgacgtgggaagccatggagcagatacggtgagactcaggataccttgtttgtatccgctgtgatgagaagtgaaggatgctggagcccagaaacgggtttggcttttttgatactgcttttatattttcgtttactttttgtcgttgaaatttattatcagaaaagtagagtaatataacgaacttccctaaccctgtcattatctagatttaatagtgtttt

SEQ ID NO: 62485 - DNA, 618 bp, Homo sapiens
ctattgttttctgagccccagcagtggccagctgtaccataacaatcaagatgcatttaaaactttttctaaaaactagctctatcctttaactactgacttagccaattacctccttcttagagctactccttctctgggattgcccaggaacctgaggcatatgtcatgcacaaaggagtcctgtggacattcataccctttggagcggagcccaggagtccctagcggtggtctgtggctgtttctgcccttgctcttaaccaccacaaggtgtcactcttcgctgctcctgcgcgttcccaccaaggcggtaactgctggccagagaggaagaatttcctctgtccccgcactagctaatccagagtccttaccagttcccagggcttcatagtacccagccctttcaggcccccgcaaagcctcgccccgcaagcccgccgccagccccagcactatgtcaggactggctcagaggaacacccattccagacaataacaactttttctttcttgcccaggtgttttcaacccttaaaccagactgggcttgttctatttttactttttaaaattttaactcctctactatcattcccaaatgggcttgttcta

SEQ ID NO: 62486 - DNA, 697 bp, Homo sapiens
ttttgtttctaattttattcacttttgggtgaattatctggatcctttacaatgaataattttaaatgggtaattctaaaaattggtattaaaaattaatgtgttctttaaggaagatttaaaatacagataagaaaaatgtatttctgtactgtatttatgtacatatatgtgtatatgtgtgtacatatgcatgaaacagaaatgatggtgcattagtgggaaatgtttgaattgcaagtgcctggactttaccattcaaactatcttaggcaagatgggaatatttattgactcataaaacaaacataaggaaaattcagagttatttctggcctcagtgacccaggattcaaaatgctctcaaaagttttccagcttctgccctctgcttccctctctctgccttcgtctcattctctcggaatgcggtccagctggcaggaaatatggctgccatggcctacagactcacgtcttcccatctttacttctggaaagcaacaggtccttttcctttggttccagcttacaaagtcccaggagaggtccctgataggctcagcatgagtcatctgtgctcttcttgacaaatcatcttgggcaagatagcacagttctgcggtaggctcagtttgggttgagtgctcacctccaaaccagaccctgtgatggagaggagggatcaggtaagcag

SEQ ID NO: 62487 - DNA, 1180 bp, Homo sapiens
ggagacctcatggtgggcaccaggctgctccgcggtaggtgggtgaggccaggagattcacatctgcagatgccacagtgaggatacagcatttagatccctcggctccaaacaggcggttccgggggaccggtagctggggaattgggtttagcactttccaacgcttggaactggacatccacggctccgagtcctttgaggtcttgctcgggactacgtttcccagaaggctaggcgataattgacagctctatcagcctatggacagagaaaaattctagccatggaaactgaaaagccaatagcaagaggatgggggcggtactttccggccgctggctgtcgaagccggagtcccacctgtgtccccacagccctgtcacgaatcccggtcgggttctgggaggcacagcctcggggttgcgggccgggtgcggctcggcggtggaggactcacttcctgctccatccccggctgggccctggggcggtgagtgattcaaggagggagaccgcggcggcagcggcgcgctgctgaggggcgtggagggggcttgcccgccacccagacgttttctcagcggggttcccgcgctggcctttgggagcccccgggtcttgctgggctgtgggagaggtagctgtggtctctataccgtcggcgggataagtcattctcttaatcagttttcttgcttctcgatggtggtcccagggtttcagctgatctgtgaccctctgaccgccgcaccccggttagggcgcgagcaccgagaagaagaacggggttcggccccacgcgtgcagtcatgttcctattaataaacccggtgaacgcactggagcttctcacagtggcacttagtcacagcccctcagcgctgtggggcctttgaggtcacctgtgcatggggaaagggacgggctgggaaacagggtttctataaccgtggctaagacgtctcccctcctcagtggcgctgtctccagcaagtgggccctgcagctgtgttttgtaatgaatgtagaaataaaaattatactcaaaactcttttttttttttagacggaatttcgctcttgttgcccaggctggaatgcaatggcgctatctcctttcactgcagtctccacctcccgggttcaggcgattctcctgcctcagcctcccaagtag

SEQ ID NO: 62488 - DNA, 1514 bp, Homo sapiens
ctgggtaatctggtgactgctgccgaatctaagaggactgaggccaggttgccaaactgcggagagtggggttggagggctttcatggcagtttggggcctgcttgtgtccaacaagacaacctgggtcacctcaaagggtgtcttctccaaatattggtgcagaggttagctgggccggcaagagaagggagatgacccactattttgatttcaggcagcagacaccggcagcctttcggttagagttgcggatagggcagtggccttgggggcggggctataaacctgggcgggcattcccggcagggcaagctcagcgtgagcccgattggaggatgggctctaccttcttccttccgcctacggagaccatagcgggatgcagggcggggccgggctgagggggcggagttaggggcggggcacggtgactctggccccgcctctttccggccgctcagggcggtgtcgctggggcggtgccgctggggcggggcctgcggggtggggctgacggcacggggcggggcctcggggaccccggcaagcccgcgcacttggcaggagctgtagctaccgccgtccgcgcctccaaggtttcacggcttcctcagcagagactcgggctcgtccgccatgtccgccgcagacgaggttgacgggctgggcgtggcccggccgcactatggctgtgagtgcggggctccgcggcgcgggggcttcgggctgggctaattgcagacgaggcgcgattttcctgggggctcggccgggcgggtggggcagggcggctgccggcagctcggacccggaagagccgtcccggtggggcggcgggcggcgggcggggaggcccctggttcgcgccccctcggggtccgaggcggcggagaggacccccgaggcctcccgccttagctggggccgcggtagggggagccccacccagcgcctctcgccgcccaggctcggccgagattggggaagacggcctagagtgaggtggcaggatgaccgcgcagggcgtgtcccggggattgggggtctgggtacgcgggctctgcccgtttcgtggaaaggcgctgccctagtgttgcctgcggggtagacccaagggatagaccagggtccagacctgtccggtcccaggctagctacgaggtgccgtcctgggcaagtcacttcagttttctcgggcttagttccctcctcaagatttcaaaagtaaaatagtaataaagaaaaaaaaaagaagcagaaaatcctctgacttcctcattttctgttgtcggccctggacgtcattgaactgcaggcaggattggctaaaggaggaccctttgggattttgaggttttcggttttattttatattgtgggaataatgttcttttttaaaggatcaacatttcacgcatcaacagttatacgtgaggtattgtgccacgtttgtgaaattaaagatgagtaagatcaggccctgtctccaaagagcgttttaatcagagagtc

SEQ ID NO: 62489 - DNA, 578 bp, Homo sapiens
ttccacctgccacctgagggaaagtctccagttgtcttatgtatttttgtgtctaactagcttgttggacccttcctaattgcttcccttcttcataacctggtatctgctttgaattcagcttagaaaggtgttccttcctaccactttcttgtttgttaaagagttacctcatacagacaggagtggcaaattggattggaaattgctttggatcatttggcaagaactgtatttttggggttgtgggaggaggagaggcctgtctaaaagctctatttcttctttactcagaataccttcctgttgactcattggaaatcataacaaaaagcagaaggaatattggagaggcagctgccagcctagggcttggcttctgttggggcagctgtttggggatttagacacactgggctctaagaactgtgaggtttctgcagcagaaggaaatagtattactctgataggtatttattcataaggttaaaaagtgtcagactattgcttgggattattgatgagcaacataagaaactaaaaatattttctcaaatagaattaactggtgatcctaa

SEQ ID NO: 62490 - DNA, 1896 bp, Homo sapiens
tgctgaagctgccacaggagtggagaggccgtagggagacttggaaagaacctggaaagggggccggggctatggagccaaggctgcagcagggctggatggtgtttgtagtttgtgcagaataggaggcagtttttaaagccgagatacagctctggttgactggagcggggaggggtgggtgtgagaggtcaggaaaccagcggctggaggccgggggcctggagcggcagggctggcgggcagacgttaggccccaggcaaaatgggcgcaccccctgcgggggcccgaggtgacctgctcgaggtccggtcgcccaggttccacctggagaagaaaatcttcgtaatttggctgggggaggggggatgcgggcacaggctgtgttctccacgtcgcgtagacgcagaggccatccctgggtcggagagtctccgtggagtggcaccccagcgttccccgtacgccggggccactttgtcgggctgacgggggtccctccaggtggccgccggcggcgggtcccgagccagaccgggaagcggggagcagccctcagcccgcgagcgtggggccggggcagactggaggccgggcgggccccgccgagggtggggcggggccgggcgcacgggggcggacctcggcgcgctcccggccgctcgctggctccggggccgcggcggctcctctgccgggtcgcgccggacgactggcttcgggcggcggccccggcggcctgtggacggacgggtgggccgaggtacaggccccacggccgccgtctcccgcttctgcccgcgcagagtccgcgccatggccgcctcgccgggctcgggcagcgccaacccgcggaagttcagtgagaagatcgcgctgcacacgcagagacaggccgaggagacgcgggccttcgagcagctcatgaccgacctcaccctgtcgcgggtgagggcccgggccggcgcgggcgggggcggccacggccgcgggcgggacccgcgcggcgggtgagaggttgcggggccaaggcgatggcggggccgggcgggggccgcgcccgggaaccggcggctgggagggggaccggagcggccgcggcctcggcgtttccccgcctggcgacacccgctagccgttcgcgatcccgggctgaggtgggagggtcgcccggccccgtgtgcgggaagatgggcaggggtgaagcccgtggaggcgggcggccgtgcgagggcggcctgagggggaggaggacgaggagccccgagaggaaatcgcaaacagctcggaggccggccgggtggcgcggcgcggcttctggtcgctccgaacatcccccaccatcgagccctgctgttctgccggcgtggaaggccgcgggcaccccagggtcccacgcgctcgtggggggagctctgtgcacaagtccatccagggcccggccctggggtggctcgggttgttggaaccacgacgggattccgtgtcgagtgtgaggctctgctccttttactccttggaggtgctttatcgggtccagtttactttgttcggcccgggatatttagtgagaactgacaagcgtcgctggtgactggagagggacctggaggaatgagtaaggcgcgagccgggacaaacacctggagaggttaggtaaccgctgagtgaggcagtggaggatggagagccaaccggagtgtccgcgcagggttgcagagaaggggggtcagcaggagtggggctggccttgaggatcctgaatgctgaccttggaggaccatcgggaggatgggggaggatctgcagattctgggggactgaggcgggggagacagtttgaaggagagctgagagcagagttgcaaaccagctgagttgcagacacattattt

SEQ ID NO: 62491 - DNA, 1403 bp, Homo sapiens
caaactagcacgcccccttcctatctcagggcctggcttccccagcccccaactaaggtctcagacacgtacaaatggtgcccctctttgaggggctcgtacatctgcacatctggacctttcacatagtgatctgttaaaggcatagaatcagcctgtaatatgctgagatcaccctggtaatatggtggagtacagacagagccgggtctgtctggtttctggctctgtagccttttcccctgggtctcctggggccacttgaacctgactagccagcctctcacccatctctaggacccagcctgaactgaggcagagggactgaggctgcctcacactctgtaatttggcctcaagtcaccattgctggccttgtgcctcagctctgataactggactcttgtctggctcctgcgtgccagaatcccatggtaacctgcctcgtttccctgtgccttgtttttatcagcctgcctcccagggattgaaatcgtgccctgaaacacagtgaccaatgcactttcctgatgtcaaccaccccacttgcctttctgattggattccagagtaccttaaatttctcgttgttctgcagtgcctgtagtcaggaaacctctgttctggacacttttctctgtaaatgacaacttagttcttccagttacttgtgccaaaaccttggagtcacccataactccttgcattgtctcacatcccacagctaagccttcagcaaattcttggttctgttttaaaaatgtatctagaatctgactaccctggtcggacccgttatcattttgtccctggattcttgcaagagcctcctgactgggcttctggcagaggagtcctgtcttctttcagtatattctcaacactgccacctgactgatccttttaaaatatgagccagattatctcactccccacagtcctccagcggcttcccgtttctctcagggtaaaggcaaagtgcaaagtgcaggcagtccctgtagggcccccatcatctctgctcttagctgcttaccacacatctctccaacaccctcctcactcactccatgccagccacactggcctttttctctgttccttgaaccttgcttaggatttctctaccaggaatgctttttttccagatatgtgaatggcttacttcctcacttccctcagctcctcactcaaatatcacctgtcagggaggccttgcctctctaaaatctaaattccctccaccgtctttcctgcttgatttttctcctcagcacttatcacgatccagtatactatatatatatatacatatacacatttatttttttttgagactgagtcttgctctgtcgcccaggctggcgtgcagtggcgtgatctcggctcactgcaacctccac

SEQ ID NO: 62492 - DNA, 808 bp, Homo sapiens
atcaaattgtaggagttcttcgaatgttagagatacatgttgtcttatatgttataaatagctttcctcataccatcatttgttgtttgatgatgttttttggaaccttcttttattcatctagttagcgctccaggtttggtggttgatcaaatacttgagaatagggatttattcattcagctagtatttgttgagggctggaactctgtgggatgtccattcagtcaggacacctctaaatcctgacttccagtttacgtcactgatgatggctctcatccttggttctaccagattcttgaaagagaatgtgttttctcagagccaagtagacccaaacatttcccagactttggccacataatcagaaatttcaaaagagttctggaatttgtgggcttagctccaagttaccaggcatccgttgtcttccctgtgggcagaattcgcttttagcttactccaccctcctcagctacgcagcatgattggggcagacgatgaatacttcagatatcccctgtggggttaactccagaggcagcctcagaaactagacacataattcatatggtcaaaacctggcaggctcttctgaaatcgtgtgacttcctatcaggccaccagctctgcagatcctcaaaggtctggctgtcagaacaatagggaatgagagcagcgcccagatgctgcctgctggagctgcaggtcctgtttgagtctgaacaataaaagtcctggaatgaattaccaaggctcctgattgcaccctgcaggttcaggtttagtttgtggagatgtctca

SEQ ID NO: 62493 - DNA, 748 bp, Homo sapiens
tttacttgtgttgctttctctgctaagccagcaactccagttcccttcctttgcctatccccaccttattttcacctactgcaagctggaaaatgagatgcctcagtttgttagacctgggtggggtgtgatgcagaactggaggggttcctttctaactgctgtcctctggggttcttatccatttttgttatttaggggctttctttgctttctggctcaccactgagatggttgaaattgccacataaatgacccctggctcaagctagcacattgtcctcatagcataaaataatggtgacatcacattccggtgcagtcctctgtaatattgaagcttcatgcaagtacccattcccagtgttgacgatggtattccaggaaaatatgtgttgctcttgcaggagttttatcactttttttcttgatcacgagtcatcatgaggtctgtcattgaagctactaagagttgtcttatgtagaattgcttctgtttgagaatatcgattaggcacccctttgtacagatgctgaggttgtggtattctggatcaatactttttcaaagtattaaccatttatatgcttaatcctggttttctgcatgtttttaatatattttttaaaacttggtagaacttcttttttttttttttttttttttgagatggagtctcgctttgtcgtccaggctggaatgcagtggcacaatctcagctcactgcaacctctgccccctgggttc

SEQ ID NO: 62494 - DNA, 720 bp, Homo sapiens
ccctataaaaacattgcgtcacaggattcctttcacagtaagctaccaattttatatgtgactcaattgacgtaaaactctgttttaaatgaatagtatgtgaggtgatggatatgttaataacttgatttcatcattttgctatgtatacatatatcaaaacatcatgttgtacagtgtaaatatatacaatttttctttgtcagtaacaccttaatgctggaggggatgggagaagaaaatctgttttctatatttcacaagcacatctattgcacaatgtatacacattgcctcattatgtgagatttattggcccagcctaggatttggcttttgacaaccaaaaaggttgccctttgtgataccagtctcaaaaatgttaagaacgtaccccaagcatctctttaaaaaggattttggatttattgaccatgaatttatctacaatctgtttctgctttcatttgtatcatttagggactgatgatttgtatgttttccacttgtatttacatagcattccttttttcctctttaactcaggggttacacactctgaatgtctaaaatgatgagtcagtgaaatggtttgtgtgtaaggattcatagtaagagagtgggtgtcccatctacagggagcagccatgctcaacttgagcctgagatgagtgcggctcattgtggccaagatattttgatttatgggtgggtgcggtg

SEQ ID NO: 62495 - DNA, 838 bp, Homo sapiens
acaaaatttcatattattttctatttgtgatgtttcaaactcagtaagtgataactaaaataaacctagaatataggaaaatctcatgcagtgatgtacagtcacaccaaactctgctgttaagtagaaataaaggaaaggaaatggtgaattcacctgacagtttcatttaatcagtcctgtttacagggcggcagtggtgggtgcagctgtgtgaccagcattgtgccgaaggctttggggaacagaactgagctggattttttgggagaggacacagaagtgtgccaggagggcccgtgctctcacttcattcttctcagtactcgggcgcaggggtggaggaaggagaagaaaggcggggtgggtctcgctgcggagagctgaattcctggcagtgatggtagagttggcttcacaagcctagaaaccaggaagtgggggcagggcactcatgtttactgagcacctacccatgccaggcgctgtgctgggtaatttatgtgtcacttagtcctcaaaaactcactgagtcgttaatttttttaaccctcattttctgatgaggaaactgagtgtgtggtgaagtaacccaggattcagaccaggccccgctgatggcccagcctgtgctctcccctccctatgccacctgcgaccattcgcagtgatgaggaccttgtacaagggagccaggagttgtgggggcactctagggaaaccccaacttttcttgccttcaagcttcttgcagtttttagtctatttggaggcaaggataatgaccccagggaatgtttttctctcccctttctcccgcccccaggaacacaccaca

SEQ ID NO: 62496 - DNA, 1573 bp, Homo sapiens
cccagctaccctggaggcctaggcggggagatcgcttgagcctgggaggtcgaggcttcagcgaaccaagatcacgccactgcactccagcctgggccacagagcaagattgtcttaaaaataaaacaaaacaaaaactaacggagccctgaaaagggagcgcaattcatcaatccgctgacggtgatgggccccctggcccggtgcagcggacccttaggtcctggtgggggagtcggtcagtcaatgcatgggtgagcaaatgagtgaagcaacgcgagcacagcgctggcccggatctaacttggcggtgacagcccagccccgagctggacatggcaggcccctcggcctggccgttgcctgagaaccctaggatcacagcgttgggccggagtgggacagggccgggtagcgtcccccgacagagctgggtcagggccttgttgtggccgggggcaggcccggcagctgaaagcgtaagacccccggagcccggcacagcgctcctcaccaccgggaaaggcggctgggcctgaccgggctcccgcatccccccaccccggagcgtgcagccgccccaaacccccagcggcctccggcttccaggtgagcagcaccggaagggagcggcgccgcgtcctcaccgccgcggggggggctccccagccgcgtccccgccgcttcacgccctccgcgtggaaggacgggggcccggggacccctgcaaacggctgagaccccaaagcccggctcctctgcccggctgtccctccccggagctccggccgcacggccgcttccggcaccgaggacgccccgggctccagcgttcagcctgcgtttctggacacccgggatgcgcagggggttggacaggaccgccccaaacctgcgtcgtggggcttcgccctcctgagatcacccaggcagcctgtgcgcggccccaccacagcgcctgaggcggcaccgcctgagcgcgttcagaaagtaggcagtacttttatttttattcttattctgagacagggtctcgctttgtcgcccaggctggagtgcagtggagcgatctcggctcaccacagcctcgaacttccgggctgaagccatccttccgagtaggtgggactacgggcgcacgccaccacgcccggctaatttttaaactttttgtaaagatggggtctcactacgttgctcaggctggtcttgagctcctgagctcaagcgatcctcccgccttggcctcccaaagtgatgagattacaggcgtgagccactgtgcgcggctggtagtactttttgtaccttggggacaaaaataaaaacccaggcacttaagtggcactcctacagcagcagtgacttaataactggagatagaaaaataaaaaaaaataaaaaaaaatactggtgtctgaacaaagagacatacttagaaaattgtgttatactgactgacatgcctaattcccatcccttgtggggcgtggggggcggagcacttactcctcacccccgaaacccctcaaaatgataaaaataagtgagcaaaacagacccaaaacagcag

SEQ ID NO: 62497 - DNA, 648 bp, Homo sapiens
gaaagaaagtaagatctggcatcacagggcccacattcccgcgtgtcagcaataggctgaaacagaagcatggtttctcacgtgtccatggaggcatctgagtgtgtgcccactttcccggttcaatgacaatttgcacctgctcgtgtagaggggtacgggtgaaacagagaccagtattattaaggggatggagaggagagaccgccaaaacatcgcagagacacaccgtcggaaccaagagaatggggtgcagacgcctggcttggcctgtgggaactggcaagtctcagctctcaaacgcccgggcttttcaacccgccacagccgggttccagctgcctacttcctttaaagccttcaccgactctaaaacaccaaaaacaaagacccaactagctccggaagcccgagatgtaaccgtagtcatctgaccctcccgtccggactctgattgggctttggagatacgcgtccctcccggcgctgtacggcgaccccgccccagcagcctgagggggcgggaacagatgtccgagtgcgacagtattggtcggcttccccaggaagcagccaatcggaataggcaagcttccggcgggaagtgagccagggcttggcgcggcggccgtggttgcggcgcgggaa

SEQ ID NO: 62498 - DNA, 2714 bp, Homo sapiens
tgcagtgagccgagatcgcgccactgcactccagcctgggcgacagagcgagattccgtctcaaaaaaaaaaaaaaaaaaaaaaaagaaatgtctttcataatgtaagaaactagattttttttttttgtaatagggaagggttgaattctagtagaagctgaaacccagataaaaagattgcgaatacccaaatccaatcatagggagccaagtgaaggccatcctgggagccgcatgatggcagcacacagctggagctctaacagttcctggcacctagagccaaacggacaggggaactgggttttcacaatcaattgtattgatctaggaaaactgaaaccaaattactatgtggggcaagaggcttaccggaaagtgctgggctatctggtcctggtggggaggaggaagggtgcttgtgttctcaggcctggatctgaggaagtgggtgcagagatgcaatggcaccatccctggctgctggcttgggtctctgtgtaccttctctggggacccttaccaagacaggggctttggcaggcctggaagtacctgtgcattagagagggtttgggcatttgttgtgtaaatgccttagtgtgagtcagtccccaggagcctggttggcctcagctgccctgatctttgagggccagactcccaccctggagctgttgttaaggagggtggcagccaggtccccacaggacaccccgggtcatcgttttggggctggtacacttaacacatctgttgccccagcagtatgggaagctcagacctgttccatgacttggtaactaagcttgggctgagcctctgactccaggccttcctggccgccctatctcacccttctcattaaacaaagttggagctgcagattccagctccaacggggattaacgacaggcccaggacagggaaagaacaaacggcagtgacaggagaggaagtgggagatgaagtaagacaggacaggatgggaggagggtgaaaggccagagggagatactggccacaagtctgcactttcatcttttctttttttttatttttattttttttgagatggagtctcactctcttgcccagactggagtgcagtggctccatctcagctcactgcaacctccgcctcctgggttcaagtgattcacctgcctcagcctcccgagtagctgggatcacaggcacatgccatcacgccaggctaatttttgtatttttagtggagacggggttttgccgtgttggccaggctggtctccaactcctgacctcaggtgatctgcctgcctcggcctcctgtagtgctgggattacaggtgtgagccaccgcgcccggcatgtgctttcatctttttaaaaaaattttttatagaggagtcattatcatgctttcttgcccaggctggttttgaaatcctgacctcaagtcatcctcctgcttcggcctcccaaagcacagggattacaggcagaagccaccatgcctggccctgtgctttcatcttgaacactgcccagctccagcctagggtgaccagccagggacaccgcaggaacatgcggaactcttagtccttcgccaagacctgacagagtggcattgttacagtcctggacatagatcgttatcttccaagtggtatttttggcgtgtgtgtatttattcactttgatattgggtgagaggaatcagggtcataaggccaggtttggtgcaatttctcccaggacttcagggagaggggcccttaggagtccaggtctcaacagggactgtgaccaccacactccctttccactctctgccccaggctccacataccttccttgcccagcccagcaggcctggccaaggtgggcaattatggccaggaactgatggcaaaaagcttagtgaggtccatgctcccatcacaaacccttactgatccctggggtcagacagacatgggttcaaatgctgcctctaccacttccgatacatgtgaccttgagcaagttatttaatcccgctaagactaaatgttcttatctgtgaaatgggtagtgcttattttattatagagttgctgggagaattaaataaaaccttgcacttaaaacatttagcatggtgccagcgcatagcaagttggccattacgattattttcattcgcatcatcgtcggcttgaccaccttacaatttattgttgacacaggatttcactgcccaagtttgcatttgtgtttatgattgtgctggcatcgagtagtcctgtttaattgctgctggctaacaagaaaagaacagaggcggatttaatgcgtaaatgatgcgttgaagccaagtgaaggccaaatgatgtaacagcccgctgtgcaaacaaaagtattgcagtaattcaaatagagaaaggttggggagaattgagtcattccccagagcatggcagcatctgtatacatgtcaagctcaaaagcagatccgctctgagtggtcagtcccatatcgctaaaagtagcaatgtggtttcaggcaaacaacatcatccttctcattaaacagatattgttactttaaattttattgggtttgcagttttgtttatatttactaggtacgtttctccgatgtagatgtactgctaagtaaaaaagaaattgtagtatgctgccttttgattaaaaaggggagtataggccagccgtggtggc

SEQ ID NO: 62499 - DNA, 2066 bp, Homo sapiens
tgtatacctgacgtcacaaaaataactgacatcagcatattggggcgggagtaggggtggggagctgcaggagtctctttcccgtaaagaacgtacatggctcgagttgggggctgactgcctcagccagatagagccctgttggttctcaggaaaataatcttcctagagcactacttagaaattattccttctctctaaagctgacaagatcagggagatcggccctgccaggatatcttgaggagagaacttagcaagcccagtgaggtggctgtcgcagggaagcagtgttcccacctgtcccccatgtggccaggccaccaaggccccttagagagcactgcccactagtgtgcctgaaatgggctatagatcctctcctcccccaagcaggcaccaggtcccagggcgaccaatgccagcaaggccctgccagcctcagtcagcctggtccatgtgccccagggggttgcccatgtagtctgtgtggcatcatgtgaacaagttgggaagtactggcctcagaggactgtttgctgacctctgacctcagggcaagaggtcaaaggagcaggaatcttacaaaatgggtacaagggcacctcgtgggccacccaggaaccaggccacaccaaaggctgcactgaaagtacacagccatgcaaggggactggcagctctctcccaagagaaaaatcacctgctagcaccaagctgccatcagagcagaggctcagccatgaaactaagccaacagagaagggtcagaaaagccttgcaggccagccaaccgggagagcattcctgcttcaggaggagggagggtagaacacaaccccagcagcccttgttgctggttggcacagctgtcactgatgatggggtactgctcttacccaattttacagaggaggaaactcaggccctgggaggttgagtaatttgcctagggacatacaagagcatttcagagctgaatctgaatcgagggctgggctgatcaccaacactgcagcctcccaacaagtttgcagaggggaagggcagttcagcacttcagtagcatgaatattacaaaaaaaaaatcagggcaggcgcagtggctcatgcctgtaatcccagcactttgggaggctgaggagggaggggtcatttgacaccaggagttctagaccagcctagacaacatggtgagaccttgtctttacgaaagaataaaaaatttcaggaggcatggtggcatgtgcttgtagtcccagctactcgggaagctgaggtgggtggattccttgagaccaggaattcaaggccgtagtatgatctgatggcacctgtgaagagctgctgcactccagcctgggcaacagaacaatactgtttcagacaaaaacaaaagaaaccagaaaaatcagcatgtactactgtgagaacataggtgaacaattcttgtccaagaaaaagtcaaatgtgaatcacagctgagccacccacatcacgatggctgagtgaatctgtgtctgatttagccacagttcagctctcttgtagaggcagaaagcagagcggttgaagtgtgtgtaggctttctattcttatgtcccaggttcaaatcctgggtctttattttccttagtgactgcgagtccaggcctcagtttcctaatctgtgaaacagggatcataacagcacctgcctcaagggttgttgtgagcaatatatgaagcaatcattataaggcattgagcacagagcctgagagtatgagcccgtaaactcactgtgagtttcagctgttaactcaaagcagctttttgttgccaagtcgctggctaaagatgcccaagggctatggtctagagagaagcacctgaacccacctaagcagttgggttgggggatcccgcctggctgctccgccagctcttgtcctgcagaggcccccacttcgcaggtcagatgtgtggttcacctcctgtccagccttcccaggcctgcgcaggagcctaccacctgctcactggtttgtaagtcattcaggggctgggcgcttatagagtcactc

SEQ ID NO: 62500 - DNA, 5113 bp, Homo sapiens
ctgggaagctccacttcccaccgcctctgcctgggtggcagtcatctgagcctaggctagcccctccccctccaaagacccactgcgggctcccctggggccagtctccaggatgggtggggcacctgaagcagcaagtattgctatttttctgggctgacctttcttctaggcctgaggacaagtgggtaggtggggccagccctgtccctgtttcccctcaatggagttctcttgctcacagcctaaggaagaagcgtgagtcacttcctgcctcagtctgactgctggagtattgttctcccaactgtggctggcgctacccagtgtggcccctacaagtcttagttccttggcggaggggaagtccccactttgggacaaggccaactggacttatcttcccgctcaactttgaggacccagcattgttcctccagtttccagttcttgcagtgtttgtaaaggtgcccgaatcgtacctgatcccattcactaaatattatctccattttatagaggggtaaattgaggaagtccctgagaaattaacttgtctaaggtgtcccagcaaaaaatagtgccccagggatttgaaccggtttgctgattgatttttcaccagttgccttaagaattatcatgatttaacctctctgggcctcagtttcctcctctataaaatgcagacagtgatacatcaaaggtacttaaaggaaaatgtactgtacccacctcatggggcatgtggtgaggataaaacgggttgacacaggaaaagagctctcaatggtgcctggctcatagaaaacactcagtggattttttttttcccattacccgggaacctgtgttaaggaggccacaggctgatcctgtgcagccaggttatctcacagggagcgagaagagatgggcacaggctactctgcgaccttggaataacccagcctgggaagctcctggccacattttccttcttttctttctcagctcaagcagcgtcggcctcagccaagtagcacaaacgttttctagggcccagggagggagaggctccggctggtatattgcaagtagcttggattcaggctctgccaaacaccccagtctcttgcaggatctgaggtctgctggttgtgggactttgcgcaaattatttaaacgttgtgcgcctcagtttccttatctgtaaaatgggattaataatctcagcctgaaaggattatgtggattaaatcatgtacataagaaggagataatgtaaagtgactggcctggtgcctggcaagcggttggtgtctaaaaagaaaaaaaagctaaaaatattaaaaggaggtgggctacttctgctcatatatccacctgtctatacaaatgcagacgaagtcgtgactcctctaacagtaggccaagaggaggctggtcctgccgccgtgcagtcctccctcgacctgggagtggaggaccccaggtccgccgtccctgggcacttaacccggtcaggctcaaattcgtcgcccaggagtggggaagcgggggacggagagggccagtcccccaagagtccggctgaggcagggctcggagtgcctcccccaagcctttccctttggttccgagttcgggtctccgcggccgtcttcccggggagctcgcggggcgaagagccgagcccgggggcgggggcacggcagcggggcctgagggacgcgccgggcggccgcgaggactttgggatcgcctgccccacttcctacctgcccctaccaggagccggaggcagcgggcgccccagaaggccccgcagggccgccgcgcggggccggacgcgctggggcccacggcgctgggaacgcgggcccgcagtcgggcccgggcggcatgggcggccgaggggcgcccgagccgccgcggcggtcgcctggaaaagtttccccgccagggctccccagggtaagtagcgagggcgcggggcccggggcccggggaaggcaagcgcgtctgggagccgggcccgaggggagccggccgggccgggccgtggagctctgccccaggagcgggctccgcggcccgggtgctcgggccggggagggtcggggcactggcgccggtgcagccctgacccgggtcccccggggcccggctgcccgccggctttccggaactggccccggggccggccccgagggtggagctgccgggagcagacagggcgctccgcagcccacctgagcgcgccgggcccgtctcggccccccggccgtggctggtacttttccgcgtggggccagggcgagccctctgacctcaggaagcgcctgcggggcccctgctgggggcgggatggggagaaaattccgcaggcgccgggtgctccagcctccccgccgccaccggggctgccgccggctcgcccactccgcggccgaggagggcctgcgttccgcccggggaggggaggagcggccgggggcgaggcgggggctccttcgcttgggcctcgcccccgcccgcacacctgtgcggccaggactcgggtgcgggatccgcgggcgccggcggccggcgcaggtaggtccctgggctgccttctgccgcggcctggccgaggcccctgtgcccccgctgtgtggctggaccaaggggcggcctgcttgccagacaggtctgacggcagtcacttgtctggtcagaacccgctttcccatcatcctctaccccctggcccctggggtgcagaccctcatccaccggagagtgttgggattcctattctgacttgggaagtgcgaggagaacccgggtgatatggcctggtgagggcgggtgctgagcaggtgtggacacagcataggagattagccaagcctgacctcttctcaagcagggcagccctcgttttactatttcctatattgggcttctacggagcatttgatttttaaaaaggattctgtggctttttaaaaagtttgaaagccgctggtccagcagtttttaccaccaaggaaactgaggcccagggagaggaagtgacttgttaagatcatccagcaaatagtgggcagggactgggagcgataaattcacgggagcctcccagggctggtaacaggaccccgcgtggtgtctctgctagagggagagactgattgggtgtccgagtggccctcccgtggcctgctctgtggctgtgtcagagccagacccccagtgtctgggaaacagcagtcggtcctggggtgaggcgcaatttgagtggcccagagtggctctctgtgtcaggaggttctggtgctggagaaaagggctttgcccaagaacacagccaggaagagcacccacagctctctctggccacagcctggaacagagtcccatgtgaaacaagaccatgagaaatacagcaagcctccaggtttgagacaaactgggactagagggtgagtcagagtctgggatgggggtggggagaaacccattcattcattgttttcagttcttactcttttcggggatcctcccttgtcccacatgctgtggcagagccgtctgtgggggtctcattttctggaagccatccccacccctcaccatggctggggttgttggatagagggaggctggccctctttctttggggggactgttcagttgcgcctgacgcctgctttctttccgagtgctgcaaggtaattaaatagttggttaatcacttttaacgccaaacagctgcggctccatctacagtgtgctggaatctgggctagacccagatgaacccagcctcgatttgggggctccagcaggactcacagcacggtggttggtggtggtgggggcaggggggtggttgcatgacatctggacccaagaggcagctgttgtggcagcaagagagaggagagagatgaggccccgttcctatatggctctgctcccagggtcccacatcctctgttaaatgagggacttggggtggggggggcggtccttccatcccctagggctggggcgcctagctgcccagccattgatcaggccagctttctggaaccaaccacccaaagcaccatggggctgtggttccgaggcctgccctggaagtcctgtggagtctgcccgcagggatgtgcaggagctgtattgtagatgtctcctgccatcagctgtcaggttattttggtccaaactgaaaatactccaggaattgtgtgtggagtacccccagcctgcagggtgggactgcagcagtcagggaggccggttgtgtctaagggcagcttctggagaagcaaggagttttctgtggtgagcctgcctctctagctccccagggcctacgtgagctggggtgccttccttttggtatccggcagagtggccttggctatggaagtgctaagggcatccagggccctgctgctgctcagggagcttggcactgatatgggatacccccagcagcactgctgggacctcccctagcttcccccccttcctccagggccttggcttctggctagtcaggggcactatgtggggacagttatgtggccccgggcagagagaggtcccgccgtctgtttgctgaaggaggaaaaacaacactcggactattgattcagtctcaccttggcgctcctggctcagcagccagtgtttgccctggctgcctgggctcggattacgcaaggctggtgggcgtggagcaagcaagggggcagctgggggcctccaggcccaggcagggcagggcttggcggccccagcgttccccaggaaactgtaaaaacgagtctggggccctgactttgctgatagcggccatctcagccatagagggaggtgaagcctctgtgatctccacccccgcaccccctcaggacatggcccctaaaagcaccatcccatttagggtcacccattttcttcctaggagctgtggggctttgcgaataactccctatggctgaatctgctttgctgaactaggaaaccctagtgagttgtatagatgccattcatttaagaaccttgaaaagccaacatcttattcccatgtaaaacatacctaggtgatttggagaatacagtgacacaaaga

SEQ ID NO: 62501 - DNA, 2124 bp, Homo sapiens
gtaacttcactgttgcaaattcatcataaaataacgtcttaatctgttcgggctgttaggacaaaataccataaagtaggtagtttatcaacaacagaaatgtattttctcacagttctggaggctggaaagtccatgataaggcataagcggattcagtgtcgggtgagggcctgcctgtggtgcacagatagtgccttctagctgtgttctcacgtggttgaaggggccgactctcggggtcatttgataccggcactaatcccattcatgagagctctcccttcaaactctgttcacccccaaaggcccatctcctaataccatcatcaccttgagggattaggatttgaacatgaatttggggggtcacattcagataatgttatatataacttaaaaagaacaaaaatgtggaattcatggagatgttcattgcagtatggattacactgaaaaactgtaaacaacctagatgcccagtaaaagggaaacagccaagaaaagtctgtgtcttgttcactcgctggcaggaaacatagagcaggcacggaaaggaaagggactcgaggaatgcgctgtaccgacaggaggcagcacccctttgcccgaggggcgcaacgacagagacctaaggctacctgggccggagccgggtgaggccgcggagaacgcaccccgctacgcgtctgccgagacggaggcgggcgtttcgaccactgcccgatcatgcgcttactcaagtaggattccgaaaaaattcagtcgcgcgtccctcctgaggttccgcagctggccaggcccggcccgggctggtgcggctgcgcactgcagcccagcggagcgggcccgggaggagccgggcggggaccgcggcggccagagctcctgtcagctccgccgggcacacgcaggccggggcgggcggcgcggctgtccccgccccgcacgctgctgggcccggcagcttcagaggctggcggacccgcgcggggccggcgcagcggagcgcgccggcggcccggggcccagcgggagcgcggcagcggcgcgcggagcagggggctacgggtgggcgggcgcccgccttcgcctgcgtcgctgcctgcacgcgggccgccgtccccgggcgtgtgagagccggcagctcggccgactgggcccggagcggcgcggaggccgggcgctgacggtaacgggccgggtgcgcgcgcgggagggctccggctgccccgacagaggccgggctcgggcggcgggagtgcgagcgccactgcggcgtcagaggggccaggaagggacaggaggctgcctgaggcccgtacctggcgcctgtctctgcggtccccggggccgacgaagtcggagcgggtggggagggagccgggcgggcggccagagacctggcggcaggtgcctgccctctgtgatccaactctctccccagctccacccacattggcctagacccagtctctaagggctgaaaatattgcccggaagctcccgagcagaatcagatcgcgctaagtagggcacaacgcagaggcgacaaagctcctcggccccagggcccgcggagcagactccggagcgcggtcccgcccacgctcggctccgcagttagcgtcctccttcctcctgagcaggcaagcggagcccgagggcggtggcggcggggggcacgggtcccctgaagttgcctcgcagctgagcactgggccccgtctctcccttcccagggggccttcggcgtcactgcaggcttcctaggggtcccctaagtgctctgcaaaccgcggctggaagtttcccactgcagtgaacagtagagaaacagggagaacacacagggcttgctttatgctagaaacacaagcatctttcttctttattagaaagaaactcattctgtgtttctgagaaaggatcgtgccaggcactgtttctggtgagtgccagtttgacccgaaagggcactgagaaaggctttcctatcagtctctttgggttctggctaaacttttaaatcaaacaaaatagagactagcttattcacctgaaactagaagcacatggccgaggagcctgaacaggcacctcctatctaggcagggaagctgt

SEQ ID NO: 62502 - DNA, 2262 bp, Homo sapiens
catcatgtataccttataccaaattaaattgatttaaaaagaaatttaacccaaaatggatcaaaaactttacttgtaagagctaaaacgataactttgggaggccaaggcgggtggatcacctgaagtcaggagttaaagaccagcctgggcagcaaggataaatcccgtcactactaaaaatacaacaattagccatgcgtggtggcgcacgcctgttatcccagctactcgggagactgaggcaggagaatagcttgaacccgggaagcggaggttatggtgagcagagatggcaccattgcactccagcctgggcaacaagagtgaaactccgtctcaaaaaaaaaagctaaaacgaaagctcctagaagaaaacaggaaaagcttcatggcattagatttggcaacgatttcttagatatgacactaaaaacacaggcaacaaaatatataaagtggactacaacaaagtcatcttttcttaaaaaaatctcgttatcttactcccgcaaaactatttaaaaaaattaagttcaaagttctccaaaatgtaccataccctggggattactctgaactttgttcatttgttttcttttaattcggcttttttggttgcctttcacctactttttcgcagagccctccgctggggccttcacttgggcaaacaactatcgtagtcgaacagctttgacctaacaatttcctcgtacccaagatgatcgcttttccagacaacttaataaactttggctttaatggatgactggatgcagaataaaatacataaaaataaacctcagctgctcagcaacgactgaaaaaccaccaccgggcaatccctccccatggccaccgagcaaagttccaccgcctcccctacgccgaccgccgggctcccggggtcggacagccccgggccacttccgggccttcccggaagtccctgtcacttaacaaccgaagtaacccgcaatgcggaagggcgaggggattgcgagtcaccgagtttcccgcgcggcttgaggtactggggaaccggaatcccccaccggcccaatcatgttgctgctggggtctctccggtgcccagcagtggttgtcagtaagcgggcggcactcccttccgatacgtcttttcttttttcatttttgagacggagtctcgctgtgtcacccaagctggagtgcagtggcgcgatctcggctcagtacaaactccgcctcccgggttcaagcgagtctcctgcctcagcctcctgagtagctgggattacaggcgcgagccactgcgcccggctaatttttttttgtatttttagtagagacggggcctcgccatgctggccaggctggtcttgaactcctgacctcaagtgatccgcccgcctcggtctcccagagtgctgggattacaggcgagagacaccgcgcctggcccccttccaactttcttaacgggaaaggctgctaccatttcttgagcacctatgtgtcaggctccatcaggcacgtcacagtctaacctgataattacacaacccatgtcactgacaaggaagccaggttcggaggggttgaggcccgcaacctgagggaggtgactccgggacacacaattagtcctgctttgctgaaggaaagatatgcagcccaccagtcggaggctggagaaggagcagcagcagcttaaaccttaacccagagttatttttattttccagaacgtgttaggaactagtacttaaataatctcaagtccctgaggggccagagatcccaccatgcaaaatagcaaacagacccaagacttggggagaggcggtgagtgcatcagaaatggatgggtacatctgattcccaccacgcggggctcagcttagttagcaggagaccttcagactgagaaaaaatgcaagtctttttttggcctctaatatctgggaaggatggagggagctcaggagacacagaaaagatggcgtatgaatcctgtccggcctgaacgaggctggagttgtgcctctggatagcttcaagcactgatcagattgtcagcccccgctgcttgaacagatgctttagagcctcttccagttgccggtttgttccctgaagccccttcaccacctgcgctgcccactcgaagtattcctggactcgatgttctgaccatcctgcataagagtcgacagaaacttgctagcgtgatgtcaaggaaagcactgccttttccccacttcctggcaagcttgg

SEQ ID NO: 62503 - DNA, 1155 bp, Homo sapiens
atgtgtcttcagaaggcggcatccccctcccttttcccttacagcccatacgaaagcgtaccctctggggtgcagcgattcaggtccctcagattgtacagcttgtctgccagcttcaccagtttggccccggggctactgtggggcgcttgctccacctgcagcctctttctctccagcttgggcagagtcttgtcatctgttacctcctccaccaggcgccgcacttgtgccccaaagtgtagctccacctcatccagggtggtgtctgtgtcctccaccgtgtcatggagcagggccgcctggggacaagttcccactcagccctgagatgtcagccaagggttgcccattgctgaatggggcccctaatccccatcccaggctcctggcagagaagggggaaagttacctgtaacaccacaatgtcagtgattcccgcctcgtgggtcaggatccgtgccacacctgacggggaggggcaaagcaggaagtcaggtcggaggtagtcccaaggcggtgtgttgtgggttttggagagccagatgtggccccttgtggactctgactagctgggtgaccttggtcaagtaccttaccctctgggagccaaccgacaaagggaacgatcatgcctaccgttccaattgttatgaggcttaaacggtatatcgcactaagcttgggacaaaacaggtgctcaatgaggtgcacgccccccacgtttccttcccagtccccaccacccaggtgccgcagccggcgctccgcggccgacgcgcccaccgatggggtggttgatgtagggggtcccctcggggtccttccgccgctgctgccggtgcttgcgagccgcgaagtcggcagcctccagcagctgcgccgcctcagagcccatcgcgcggatggggccgacgactgcggccgcaggggcagggacggaacgtttacagcgccccctggcgccggggaggcccggggatcgtggaggctaattcagcgggccgagttgggcctgccccagatgaattcctctggagctgaccggcccgcgcagagagcaagtgatgtggacagctgccttcagcatcgcagcccccagctcagtgtgctctgttgggggtgcaagaagaacataagcctggctctttggga

SEQ ID NO: 62504 - DNA, 1122 bp, Homo sapiens
gcctgcacctgcgatccagagccaagcgccccgcccctgcccgggcgcgctccctccttagccctgcccctctctgaccccacctccgacgcaagagtggggcggggcagctgccggtggcgtcccgaacccagactcgccccgccccagagactgcgcctgcgcgggcacgagacaacctctccgcgatgactgtgagtggtccagggacccccgagccccggccggccacccccggggtgcgtacccaacccccgcgccatcaccccttcgcacccgccctgaccatccctggcctccttctccccatccatgaggctcgccccgatccctcctctcctctccccttagctcccgggctctgccccgaaccccctccgacgtttccgccccctttctctctacaggccagctcagtggagcagctgcggaaggagggcaatgagctgttcaaatgtggagactacgggggcgccctggcggcctacactcaggccctgggtctggacgcgacgccccaggaccaggccgttctgcaccggaaccgggccgcctgccacctcaagctggtgagggagcctggcgctcttcccctcgcccgcccgggccccggttcgcccatctaagctgatgcttgggccccagctggacattcacgctcccaggccatccccgcttgccagatgttttttgcacctcagggtggtgggggatcgggtgaccttggagagcgagagtacccctgctgcctggttagtgccccgagagggagatgaccattccttcaggctcctgtctttctcttacaggaagattacgacaaagcagaaacagaggcatccaaaggtaggggaatggtgggccctggtgtggagctgtagggcttctgtggtgggcaaggactctgggaccgctgcaccgtcacattctcctcctttggccccagagacacatctgccttctttctttcccactgcctcgggcctttccttttctgcagctaccctcaccttttctgaggctgaagcaccgagccccacattcgtcccccccaccttcttctggcctttcctcgagatctttccctactgctcttgcctggagacagtggcctcatgggtg

SEQ ID NO: 62505 - DNA, 1510 bp, Homo sapiens
gtaagtggcagtgtcaccgtctggtcccgatttcaagtcggacagtccctccccaacaccgcctaggaagttattaaaacgaccggaaaagaattccataatccgtttcttaacttgcaaagaaacaaagctatctttccaattcaaacaaaacgttaacaccgctggccagatataaagaaaaacaacgggccgggcacggtggctcacgcctgtaatcccaacactttgggaggccgaggtggcaggattacttgaagccaggagttcgagaccagcctggccaacatagaccgcgtttccacaaaaataaaaaaaaagaataaaacaaagaaaaacaacgataaataaacttaacagctttaaagaaaagccacgaccacagaaggtttacaacgagtcatctgcgccaagcagcggcacctgagacgctgcgggcggggagggtggggtccgagcgccagcgctgaccgcctgggtggaggccgccccgggccccgggcctcgactaccctgccgcgtccgggcaccggcgctcggctcccacccgggcgtctgagcctgcgggcacctgcggccgccggcggacagcgcgtcaggtctcaccgccgcggccctcgcactggctcgccgcctccagaccctgcccctcagcgcccccggcctccctcggcgccgactgccgtgacgatctaggcccgggaccccgcacgggtcccgcacccctgaacaggccccgcagccgaaacgagcgtcgctccctcccgcgtcccctcgatttccccgcaacccgcaccttctcctcatggcggacgctccaagcagccgtgagtccaggtccagacctactccacacggccccgagagcaacaaccacccgcaaacaccggcgatgtcactccgcgtagccgctccgcgagccgttgagccccgcaaaatttcaaaccgcgccacggggcgaagcctcgtcgcgattggcgtcgcgtcccgtcgctccaagaaaatccccgcccctcgggctgaagtcgcgggtgcgcaatcggggtggggactcgcgagcagggcctgggaagcgccggagtggcggcgggggatgacgtcactgtctgtgagtggccgggcgtggcctgcgcctcccgcttccctggcttggcggcagcctcaagggactcctctcccaagccagctacctcatcggagcgccgccccgcctcgccccgcgcagtttggattcgaagtgcgcgggcggggagggagttgagagcaccgcggctacctggcttccctgagtcccggctgccgggaacgggcgcgggggtgaataggtaagttagcgcctagtttccctcgctcatccaagaagcgaagcttggaatcgatctttggtgggactcttccccagatgtaagaagccatacactaaaggggaagggaaggaacattgagtcctgctcatgggcctggaacgtttcaacgccagttatcccatttaacctccacaatcgccatt

SEQ ID NO: 62506 - DNA, 1425 bp, Homo sapiens
aaatgatcacttactgtgaactcttcgggtacactagctctatcactcatttaccacctgtgtgtgataatttgtgcttcatacagctcctactggagtggtaagatccctaatggcaaagatgtcttaaccatctttccgtccctagggatgcctggcactaatggtgtctcccttgcctgtatgcggggttggggggtgatttccattaactctctggccaggttccaaacagctcttactactccctggattcattctggacctgctggggaagcgccaaggacaataccaggggccaagaacaagatcaaaggggcacggcaaggaagaaatgtgcatccaatgagtgctaaactgtagatgcgataaaggcgtcaggcaagcactgacctgctccagcagatagatgagctggtctcgagccagcctcttcagcatggagaagtcaggcagctcaggggcgtccggccgatggggaaaagccatggcagcggtcacctgcgccgcggggtggaaggacgcccttcgttctgagaaggccggccgcagcccagggaagcgcaaggggggctatccttcaggcctgggcaccgacttccagagaccccagatgggccctcgctcctcagcagcactccaggaatgaatggccacctccaggcaagagagctactacctcggagcagccttgtctcagacctgcagccaccgtgtctcgaccctccctccctgatccactctgcccgtcagcaggattccggtctacaccccgcagagactccgcagcgtacgaggagaaccccgccttctaccagaaaaagaagcgacttcctagatctcccggaagtccctttcgctcccagcgcttcgcgtaccaggaaggggacggcgtcctgaaagggacatttgaaaaacggaggcaacgcgtctattaattaggtggcggcgcctggggtcgcagcactccagaggctgaggtgggagaatcgctcgagtcagggaggcggaggttgcagtgaactgcgatcgcgctactgcaccccagcctgggcaacaaagctagaccttgcctcaaaaaaaaaaaaaaaaaaaaaaaaaaagacataatgaatgcatcaggctagctaacaatacctcaactctgatcaatcataccatcatatcatttcctggtgagatgcataggaaatacagagcatcacctattgccaaaaattgaacctaatcaagcctcaagatctaactaccagtttataggctatatagagattagcaggaatatgttaagacaccaaaggtatgaaatcaaccatatccaaaatgtaggaaattatatgggacaaatgatctgtcgtcttcaaaaaaatggcaaagtgggaaatgtgggaggggaaaacacttcagaataaaagagatttaaga

SEQ ID NO: 62507 - DNA, 777 bp, Homo sapiens
acccatgtaccatgggcacggagttgagtgctgattctgccatgcttcttcttctgtgcacttaccgtgttttgtacattcacattcatgacttcacactatgatttacattttgtttgtatgtttgcaggtatggttctctactaggcagaaagcttcttgaagacagatgaggccaggctccctagaagcagagcctggaatgaggattcttgttgagtgagtcattgaaggagtgctctcagggagaacctggaagggaaggaggaaagcgggacaggctagaggaagaagctaagcaaagatgttgtggctgcactggagtctaacttcactgtgatttcttggggtgctctgaaatgtaaataacactgtagacttgccccaccttaaggcaaggggctgagctttttgtgccacatatgtcattggcctgggctggctgtggaggaaggcatgacctcacaggcttttctggatgaggctgcttcccttcgctgaagccacctgtgagcctttggcagccactattcaagcagctggggtggggaagagtcagttccgttgtggctttttattttaatctctgtatccttggtttctggcactcagtaagcatgcagtaaatctttgctacgtgagtgagtctcttcctaatataatacttagtcacctgttaattaaaatagacagtacccattatctttgtttatgttcatgcaattaataaagcaaatattcttctgactagttagtttaacaagactaaatgagatc

SEQ ID NO: 62508 - DNA, 1256 bp, Homo sapiens
gtgatattagaaagtgaaggaagtatcagagaaaatatgattagctgttaaaatcatctacacaaaaataatgattgctgccaggtatttagtgcttattacaggataggcactgtcctaggagctttatgtactttattaccaggcccccaaactaccctataaagtggatgctataagaggttggtacacaataggtagacaaagtatgtaattaagataatagcaaaacaagggcaccaatatgtatatttttttgatatttaaaaattagcattaaaatagtagttctgttaaaaatcagaattttatggattttttacatttattattattttttaaaacttgaattacataggggattactaccacctttctagtgcagaggatttctgtaagtcttaatttcatttcctcttatccctgtgtattaattaacccagtttcagaactgaggaaactgcaactcagaaaggtcagatagccactggctccatgaagagtcaggaagctggtgacaaagaaatcggagggctggagggtaaaagcaggcgaaggtgatactcagaggagaaggacactggagaagtcagtcctgaacccaccaatgaggtaccgctgcagctatgtctggaattggctcaggctgccaattccagaaatccggaatgagccagatgaaaccgctttagcaatctccagcaactacccttctgtcagagtcagaagcagaaatctctttttccagtcttcttatctcttgccagtgcctcctgttgatagaatcgaccgggaagtaagcaggcgggagagtctcagaaatggagtttgcacatacccagcctcgtagaggagaatagagaagctgggtatgggttagagagatgatatgtaaataaccagaacacctatacagctggaatgtggtttggccaggctatttctttgtagaactaatatattttatgacaaaactgtactattgagctaatctatgtactttacttgaaaattcatgtttgagttaatttactttacttgaaaattcatgtttcttaggattgaaaactggttcatttgtcctctgattttggctttttattcagctttgaatatgatctttcaaaacagagaagaaattttctcatataggtgactttattaatattggcattggtgctcatgggttgaaatctcagcattttggaaccctgctgggatgttctgctgctactcattatgacattttctcatcc

SEQ ID NO: 62509 - DNA, 605 bp, Homo sapiens
gcctctgctgtgtcatgtaggttgtcagggaggtcggggaaagccagcagtcacaggcctcacccagctcccatgcaagccaaaaggatgatctcactttcactgtacccaccccccaacagcaccgagtctgtttccaggcagtgggtgagcagggctgagaactagctccaggctactcacctcccagctatgaaagtaagtagggctttcatgcttccccacctgtggagtctgcacacaggattcatgccctcccttgagttctggccaggagatttctcatgcggttggaattattacaaagttcagctggaggtttccttctccttgtggccttttcccagtccttttctggcagtcctccccaaggccccctgtgaggcaaggcggaaatggctacccaggggacgcagagagcccacggggcttttcccgctgcttcctctactcctgtatttcgcttggctctctaaattgactcagctccaggttagatcagaatcttcttccgtgttgtagaccttcaggttccttagtgagcatgtgtgttcagaggcagaagatccccctttctcacttccagagtttgggcagtcacggta

SEQ ID NO: 62510 - DNA, 1177 bp, Homo sapiens
cgggtgtttttctgggcagatataactgtcttttagtaatttctgactcttgacagaattagaacttttttcctcctgtgttgagataatctgctatttctgttaataaacatgtaaacttgcagctctggagagctgtctgacctgttcagattctcaagaattcttataatagatttccaacatcaactcctatgtttattctatcatatggatcctgaaattcatattctattgttagttaacaagcctttaaaataaatatagcatttatattcctgtaatatcttccactgtcaatatttactttaagttcaaatagagctttttccttccactgaacatttaagttaaatgatttataagctcatcatttctccattatctccccagaaacacttatacttgagtcactctcgtctgtgaacttttactgtcatctccactttacctctttccccaaagatttctcctggttcagttgagccaagtgaatggtccccttgtagggagcttttgtcatttttcaggctgttgctagagatcttatgttttgggaattctccagttgaaatctttttgggaggctgaatttccctccactctaaatgtccaaaggccagacactcccttatttaccccctggcaagcagtagggcattgcacaagacccaggcttcattagtcaaatgtattcaccctagactttgaatagggacctaggtagtggtgcacagaagctgcgatcaggaaggatctgttaggataattgcagcagtgccactggggccagtatccagcatgcagggtcagtagaggcagcaggacaagttttggcatccagagtgtaatgatagttgtggtgagctcacggggtgggccctgtctgctgtgtaatcccctgctttgccatgatcagttttctaaacctgcttctcttagcttcctggcagccagtgtgctatacacagggcacagagaaaagatacttccctaggtagacagagcagctagacagaatcccttctatgaagagttttatacatatctccaggctaggtctaggttaacccaagtggaggctcttcctctgtcctctccctctccaccacatttccttccagcaggcctccagtcctaagactggggtctttgcgtaggtcctctaccagcctgc

SEQ ID NO: 62511 - DNA, 3903 bp, Homo sapiens
ttcttccatgtaaaaaaaaaaaaaaaaaaaaaaaaaaggctggctaactaaacactttatgaaaaatccatacaatgtggtcatggggtaaatccaaaaagcaagcactaggaaaaccagcatataatattttacttataatatagacctatacttgtgtgaaaagtgcagccaaacgactggagataagtaagccattttcttaacaagagttgcctcttggcactgggcttacccagtggtttctctggaactggctagcaagagactattgttaaatatttagaaatgttgagagctagttgttaagctgttggtagcttcaaattgaacacaactgaagtatttacaccgtggaaactggcaaaggctatataacccaggctccctccctactgccccaaaagccagcttacaagcatattactcacttttcaggctttccatgctttgggtattgtgttttgtatttacccctttctactatagcataaattagctcatgaccaagaaaataataaatccagcaatgaattaagaaagagcaaaatgaaactaaactaaacttaaatgaaactaaactaaattagcttccagaaaacctgtagatgatctgaactggctctcccccattcttgctgctacggtctaaatgtttgtgtcctccagaaattcatatgttgaaatcctaactcccagtgtgatggtattagaaggttgggcttttgagaggtaattaggttatgagggtggagcctcatgaatgggattagtgtccatattgtgtctctgggccacagaagccgcagagagctgccttgctccttctaccatggtaggtcacagcacgaaggtgtcatctgttaaccaggaaacagatcttcaccagatgctgaatgtgctggcatcttgctcttggacttcccagctaccagaactgtgagaaataatagtttttgtttataagccacccagtgtatggtattttgtcatagcagcccaaatggactaagccacttgctattttctttgaactcagagttggctgttgggtcaaagaaagacatgaagcttcgtatgtgttctcagggtgcagcaccctgctggtctctgccttagggaatgtgtgtcatcagcctaaataaaggagaacagctgtatgtgcaaggatgtgggtcacatggcacattttcccagagttctttttggaaactgagccatcctttggtcacaggtggtcttacagtaacttgggtggcttacaatttctttattgctttgcttcattctataaatctaactccaaggaggacaaatgctagatttaataggatatgtaagatataattaacctcctcagcctgctcatagaagatgaacagtgaagttgaatttctctgcctgagcactgcagaggcagaaaaagaccacctccctgcaacctgtacatatgtggttatacttcgcaggtgcacaccgcacataccattaggcacatgaaattagagacacactcaacaaagtgctctattcacctgccacagtcttgacatcaatatcattatgagcacatagctttgatgggggtgagccgagactgtaataagacacctattgcaactgtggagtaatatgataagcagaccagataaaacaggcagctttcaatccaaagtccagaagggcacacagagacttttttttagtctcttgcctgtctggtctgctgagtcatggtcctaacttctgttgttggaaaagggagctttgtatcaaattatccttcacccagggaggcaaaacagccccgtttgtcctggcaaatttcctcctgtttgagtcactgaaattaaacattgaaaagacctattatttcctctgtccatcctcgggggagtgatataaaacagattcttatattcattgcctctgtttcttcctccatctgattctaattaaaatagctgagaaaatatctatggcctaattcggaaccagcagagcataagaatgatggctgtgccaaatcaaatcaagcaatatttattgaatagctccactctttgtcgaaattcttcttagcagttctacttcctcagctaactcactgtatccaaaatagcatagcttactgatttgggtaaataaataaataaataaataaataaataaataaataaatgtaataacagatgctatttgttgatcatatgttttgtgcctgctattaggctatgtgtgttatattcattatcatttaatttcctctgcctgaagcgtagctattattctcccatactataaatgaggaaacagagactctgaggagttgagtagcatggtaactaacaccatgtcccttcgcgggtcattcgtagtcagaattcaccaaaggcacccttctaataccttgccatgatgtttctccacactaacttctttatcaagatgattggatccactcctccatcttattttcaaaaataaatttgaaaatttcatatgcagttttggtgagagaaatggaaagacaaaaatccgtggagaaaggagcaatttgtgaaatattcaatccagctcgcactaaacatcacaaaagagaaatgcacactcttttgtgcatttgagtcaactttgagttagtacatcggccttagagatttaatgcacagtagccccttgcacactgaaaaggctgggaggaattaggtgtcagccttccaagactgcggcgcttacctgaatcatacaatgccagagctcatatgtctagccattttcactggaaacgaacataacaatctgtccctttatatgtaattgcctctattatagcatgatgtttcaagcagagctccacagagagaaaggggaaataaaacactttgtttacacccctggcaaacaaaaatgctttccaaacattagctttgttcttcccgttaaacacatattttacagcaaattcttcttgtaagttgttttctccaacgtgcaggtcaataaatgctctcattatggaattcatcagaggatgatttgttgagacattaatccaattcagcagagtctcctgaacaatctcctaatgtttacagactcttactttttttaaatttcatgatcaaaagagtgtagcaaatgctacatatttattatgctctttctttctgtgtgccaaaggttaatcacacagtaagtctgaaggctccatttccctgattcctttcaactttgagttagtacattggccttagagatttaaatcaacatctctcaattggaattaccccccaaattccatctgagcttttttgattgcacagcctttttgctgaaatcaatgacaaacatgacctcgagatgagctgcaaagaactctgtaggaaagattggtcaagacactttttagagcaaaacatcttcaaatttaaattctatgaattaagcacctactagggaaatatatctactgagtactttctcatgctccaaatattttcaagatctctcacagatatcattttcatttctatgtatggtatattactacaccttattgttcagaaaagaaaactgattgaaaggttatgtgataggcagagctagaatctaaaataaggattatcttgcctcagaacttaccgtctttccaccaggaaagcaaggtcagaaaactatgatcctgtggcctgtggtttttgtaaataaagttttattgggacacagccatgcccatttgtttgtgtgtcatctatggcagcttttgcaatacaatgagagttgagcagctgcaacaaagattatctgcccccagaagactaaaattttactatctggccctttacagaaaatggtgacctctactataaagaattgtaacgtattctagaatacatagtg

SEQ ID NO: 62512 - DNA, 1287 bp, Homo sapiens
ctgcctgatttgtaaatttgcgtttccatggcaacacaagtgtgtagttaaataatcctcactcgtctagtactgaattccagcaactcttcctaaaccttcatcctattccaatcccacagctgttgccatggaaatgatcagataagattcagtcctagaggtagatgggccaacagtgggagctagtcctggcctacatatagccactgaaatattaggttttgctttgcttcctcccaatcttcaaatcacagaaagcggtcgcttcaaatgagaggctaatttagcatgatgtcatgacaatcagtcttggggtttgggcatgtggagtaaatgaggaaaagttaacgccaaaacactgctggggaatggaaaaaatcagaaatgctttcctctgactcatttttggaaactttctccaagaatccattacaccagggtattctctcaggaggtgggtgtcccagatgcaattttcctaggctggtccctgccctaccaggaggttaggtcacacggggccactccccaggtttgacagccgaggagtacccgttcgttcgttctgcattgttcatgaggagttctgtttttcatagttgatgggagtttatagtgtgcctccggggttgactctggctgtgtcagcaatgtctttaggactgacagaatttttccgtgccgctatcaacatctttgtatcatgtgcattcttgcaaacagattgtttgggaagacctaaaatttaaatcattgtttctaagcaatatccagaggatattttgtttacatattatagaaagaagcaatactttgtctctttgaacagtgtgatctcatttattgtgaaatctttgctggatacttccctgaaggggaggggttaggccagagtccaaagcaattttgcctttcagtgaagcagattcctcgcagtgtgtgagccctaatatgtcatatgagaaaaagacacacctcacagtaaaatacgaaatcccagtaaaatatggaagggaacttgaagtgtctctggaaatccaatgagcagttttcagatgaagacgctgaggctggggtttccaatatctcacggtttaggactcatgggtttttctctggactccccctcatgctgccactgctttagggaaagatccaataggtacagctatctttatttttattctcctttttcctggacagctccagcagagttcctatagtgtggttcttattatttcctcttggaagcttcagtcatatatgctagacactgtttcataa

SEQ ID NO: 62513 - DNA, 1471 bp, Homo sapiens
gtcccccaatggcccaggtggaaggtgctgtttcctggtacctgtccagccctctgagcttttctctcagcttccaaacgctgcagttgagaactagcagatcctattggtagtgccctgtggcccacactccttggtaacggtgagagtggggagtaattaggagcggctgccatgggccaggcattcaggtcaaggccgaggatggtggccagggccacagagccaggggacgggtggggacccagcaggcctgcggctggccgcttgctgagcgctccagcagcggggccctgggcggatgaagggccggagaaggccctctgctggggccgcggcgatcttgcagcgcctggacaccgaggctggggcactaacggtccgtggggctcccgacgtattcctctaacttcccctttctgtcctttcggtctggggccttttcaacaccccctgtggccggggacagctggggcagaaaccggcaggcggcagaagcctcaagcagctctgacctctggcacctccccaagacccagagcacaacatctgtccccagaaatccccgggcggagaagagcgcgcgccaagcccttcctgggtactcagtattctcccttcctgggaacagcctgccctctgaggcctgggcacccgggttcccgagcgccgggtcccagccccgcgggggcgcctccgcaccccatctccgcgcccggcgcagagccgccagtctccgccgcggggccccgtgccccgcagcgccacctaggggccgggcgccgcctcccgccctcaggggcaccccccttactccgcaaggactccgggtctccccagttctcccggcagccggaccctcccagcctcggccgccgggccgccctccgcatcccaagcccgcctcccgtgcctccccgggggcgcaccggcagcgaggagcggctcggcgagggcgcgcagcggcggcccaggcccaggccttggggctggggctgagggggtgagagcaggcgcggccggcgggcaaggggaaccgggcgatggcagcggcgggcggccgcgggaggcgaggcagcggcggcggcgggcggcgcgacgagcccctgtgattggcacagccggagccggaggaggaggccaggggagggcggaggcgggggaggaggaggaggaaggggcgatcgcggcggcggcggcggcggcgaggagctgtgccttccacctctccagccccggcaggacgggggcggccgccgcgaacccggggcggggacagcacgcagcctcgaggcgcgcacccccgcccggcagcggccccgacacccggggcgagcgggaaagcggcagcggcggcggcggcggcggcggcgggggaaggatgcaggggaagaagccgggcggttcgtcgggcggcggccggagcggcgagctgcagggggacgaggcgcagaggaacaagaaaaagaaa

SEQ ID NO: 62514 - DNA, 879 bp, Homo sapiens
ttcgagaccgagtcttgctctgtcgaccaggctggattgcagtggcccaatctcagctcactgcaacctccacctcctgggtgaaggtaattcccaagaagctggaattacaggcgtgcaccaccacgcccggctaatttttgaaaagagatggggtttctccatgttggccagcctggtctcaaattcctgacctaaagtgatcaggtcactgatcactcctcccaaggagctggaattacaggcatgagccaccacacccagccctttgctggaaatcttaaggggagttcccctattgatcagacagagcagaactgctctgcccgagtgggcgtggggcccagggcccagccgtttgacctcgttctgcctccctttctctcctaaaagcatctcccttgaccttctgtccttgtaattaattcaggtctccacagagcacactgaaaacctcaggtctagtctcatttccattttatagaaattgatggtaaaagacacatagcataaaacgtagcatcttacccatttgtaagtgtgcagcctagtagtgttaaggacactcccagtgttgtgcaatctccagaatgtttcgtgttgcaaaaccgaaactgcactcattaaacaactccccattccccctcccctcagcccttggcaaccaccagtgtgcttccttctgtctctgtgagtcttgctatcctagttacctcctggaagtggaaccctacagtatctgtccttttgtgactggtttacttcacttagtatcatgtcctcaaggttcatccaagttgtagcctgtgtcagaatttccttcctttttaaggcagaatcatatttcattgtaggtgtaaaccatattttgtttatcca

SEQ ID NO: 62515 - DNA, 614 bp, Homo sapiens
aagtataaaagcattccattaaccggagttgcctttgttgaacagtgccttcctcatccccaaacaaatcatgatgactctgaacaaggacagggagataccaggacctaaatagataatgtgataaaactgaaatcatcatcagtgtcatttctgagccaaagagcaaagttgctaatcagcaaatgctggaggtatcagcctcagcccggcagcagttttacttgtgaccaagcgtggctgtgatgctttattctccaggagtcctagactctgaagattctgcaccctaatgaaaaaaatgaaggctacagtgaaagcacggcagaggatcgttttcctggaatgtccccagcctgcctatttgacattggcaatgtttccagaatttagatatctttattccaaaagagcactgtgattgagaaatggcgttattacttgccaaaacacataaaccaccgggacattcaaatgtattcattacaaggaggcgctgttataacccgacgtgatccatactgttcttactacattgtgaaacttgttgttgtgtggcatggccgacaggtctcctgccacaggtacactacaccatcagaacgtgccacaca

SEQ ID NO: 62516 - DNA, 905 bp, Homo sapiens
ggaaagaagaacagttccctaacacaagctgttaagaagtctgtagcatctctgataacgaatagacccacaagctcctggaagctgtcgtgtgtccaatgcgtgaaaatgtctgtgacattttcagtgttagtcttgaactaaggcccttgtctgtgtgttttgaaggtgggtgaacctcagagaatgaacctgttatgatttggggtaagaatcacgttggaaaacctctcgcaaccagcacactaggccttctacggccatttctgtaaggggacagagcttaggtaaaggcacacactcatacacacacaacaaagggccctgctaacttactcctcatgctgcttcagtgacctttgttcatgtcacattcctggcgctggaaaaaaaactcaaaggttgattggtttgctttttcaccttggacacatttgcattttacccacaaggcaaacaaaagaatcaggaagtaaaaaatggttgggagtgggacaggtatggtaccgaatttttaatgaacattgtaaatgaagaggcttgaatgacagcccaaatctagagaaggcactcagcaagaccaaccaaaagaaaagctgtgtcgtggtatggggccaccgtgatcagctacctggggcaggatgcttctgagacaggcctttcaactgcttagtgttagtatgtccttgcttatgaaaatggggacactcatcagtacgttaactactaaaggggagatggttctccaaccacttcataaaatatgtatgttctgttgttcctaaggctttgataatatcctgtacagattttggtttagttttgcaaatatattgctaataggtcactcttatagattattgcttggcccttcaaactcagtacacacacactgaggccctttg

SEQ ID NO: 62517 - DNA, 1205 bp, Homo sapiens
ccaccaggagccagtgacagatctgactcctaaaccagtgctctttccactacaacacaaagcccccgaagttagaacacggaactagcttcttatgaagcctctgcaaagccaacagagcgtctacctgtgggaaacccctagcaggagtctattgtttcatagagaagtgagccaggagttggaggtgagaatctctgcaaagttttgcctatgggcacaggaatctaggtttcactttaataattaaatgttggaaacctttcaaaacactcctccttcctacttcaaccttagccacatcagcaggaacttcccagccattcatcagcctttatcttattcattctgctgagcagggatgaaccccagctctctcacttcggtcccacccttcccaactccccacgcccaagtctttcagtggaacccaagactgtaagaacgtaggccttgtgagagtgaaggaaggatgctcgaacttgcccaggactcaggcttcagcttcacaatcccgaggaaaggaatgacatttccaaactgtcacctttgtagcgctgggtcaaagtctaaagaggacaaataaatagagacttctgtggcctcgttgtgcctattgaacaggagagctgcatgtcacaatcaatgagacctgcacagcttgtgaatcatcactgagactagttgtgtttttaatacctttaaaatgaagccacagcatctattctggaaatgtggcgtaggcttaaaaaccttgctccaaagaggatatcgtttcagccagcatgcagtgaatatctgtggctacacaaaaaaacaaactgtcccgaatgctggaggaggaaatatgacattgtgatgccaggcagttttctgtgacactcaggaatctcttcaatagagatgtacagtgacacttagagccccagaacacaaggtctgtcactagtaatttacataagataaggataaattattgactgggatacatcttactcatccccgacatctgcttggctgtggggttggtcatgtagataaatatccttcccagaaaggatatttggccttcaaaaaagtctctgggctcagagtctggtcccttggggttacatggaatgaaacccagcactttattgctttgactgcctactcttgtcccttcactgcaaagccatcatgctattaaataagcctaacaaaca

SEQ ID NO: 62518 - DNA, 1607 bp, Homo sapiens
tagagaagacggagcacaggagtagctcctcagggaggagggacacagaccacacccccagctccttggtgacctccaagggaaccagctggacggcagcaaatgggcttttcccccggctttttctcagctcgctgtgaacccggcccagatgcatcccatgcttactcatagagtaaagcaagccaggtatgaggcagttacaagccagcagttttttatgtgattgattctatcttctctggagatgccccaagattctctggaaacagttaggcctcagtatttcctagccaaggagcaagcttccaggaaatgagcgagtgagcctccaattgtatatgtagacgtaaaaacagcatgcatgcccctccaccaccaagcctttttcatttccaagcttttctctaatcaccaggatccaaacacctccagcccagctcccatccccgccctcctcctcagccttgggcccacccacctctgtcttcacaaaaggtgccccgctggccggcaccacagaaaacatccaagcccaaggtactcatggtttgtgtgtaaagggtttttattggagagcctgtggcgctgaagtgccaccaaggatttggaaggtcactttcagcagccgccatttctgccaggaccagtggcaagcacctggcagatggagcccgggtgtttctgcgtaaggcagaggaatccagcttttccatgagattcagctgcagttgtcgaaaaccctgtgtgagccagcagttccagttcaaaggttgagggggcgaacagctgcgaggtggccaggctcccgtgagtcaccactcaggcctgagtacaccgtggagaggagagataaagcagccacggctgttctgttgccagtcccacccctctggcaaacagatgggggaaaacagagaaggaaagtcaacaaagaaggtgaaatgcagggagcagagactacacgcaggccccccgtggctggcaataccatgcgtgctgggccggctgcgccaccctcacccagggcttcccacgggctctgctctttcctgcagaggcgaaactgccttcctggcaggcggaggctgccgagctcccatgccccttcccacatatcccaactcttctcagaaaactgaagaaccgaagatggaggtgagtcaggaaaggctggagttttcatccaaaaaaaaaaagagcaggacaataaacaggcaaatacacaaaccctggagcaaagccaggaaaaaagggggagataaaaaataaaaaaataaaaaacacctttctagagagagcaaaatcccagggtcccgaaggcactgctaatagactaatagaagcatctttgttgcagccaatcacctctagcctgggaacaccgctagtcaggaggcctcaatcaacctgagaagtcagcccaaggccctgtctccagaagccagcagcagatccctgggtcatgtcacaggcaagtcctcacttcaccagctcagaggtgagccactctcacctgaacctctgccttccggcagggacctcctgggtcctgtggggtctcctgggtccaggtgggttcctagtccagccccgtctagactgac

SEQ ID NO: 62519 - DNA, 620 bp, Homo sapiens
ctctgcacctcgcctgtggagctgacacagcaccagctgcagctcattttactccccgccagaaacgagggtgttatcatgtgatatttttgcctctttttataaataattcatccttttttgcacaaaagtaagatagcctgaagctagaacatttaaaaggaacgtcagccccttatacataaacaataaagtgctagtttgccagaaagtttgcgaaagtcccgaagctaaaatacacctcgttctaggtctatttttagcctggaaaaggctttccgatgtctttctcagttcacacgtgataagggctgtgttatgctttctctgaaatggggctttcccaaatcagttacatttgcacagggaaatctaaaagataacttgccaaataagcatacttatgaaatccaaatcccaagtacacaaatgctttttttaactccacaaaaataaattataaacaaattgataatggagtctacggtcaaccacggctatgagaaatggggccacagattgttaacgtttacaggagtctttttcccaagactgagagggagttttcctttgcagaaggatagcaattctggagctggaaattacaatcgtaagaacaa

SEQ ID NO: 62520 - DNA, 1082 bp, Homo sapiens
agttctttaatcctcattctcacaacaccaggccactgaggctcacactgttgttccattttgaagattaggaaatggagacctaatgaggttatctgacttgccccagggttggaaatgagcgtgccatgcagcccgtgtccccagggccgccctctcccgtgctggcctactttacagctggctagtatcgtcaaaccatggaaacagcgagctgttgccaaagagaaatatttctatgaaagtttctgaagtgtcccctaggagagcctgcagacgtcagtgacgacataatattgctgacagagccctccccaccaatcgtgctgctcagagagtgccacccatggagcaactttttaggagattcccacaggatggaaagtcctgaggtgcatacgtggagggaccccacctttgagctcaggtggaccatctgtccacagttcctttcacagtgcagtacttttcccatacacatcaaagttgctttggatcgagaggcgaagaccagcagggcagagctaagcaggccacagacatctttccccagaaaagctgagggtgagaggcagggcggttcaccctccggatggctgtttgtaaagtaaatattgattttgagccatcccccaacctgctcaggaaaacacaccagctgttgcttctgcctgcagctccaagtggcagtcactcccatgtccagaaacatcctctccatacctgtccccactgcaattcccacagctggcatcgtcagcctctccgtgacagtggagttagacctcacgtttgcaggaatttgtgttttaattcccaggcagagctcgggcctctgagggttagggacacagaaaaggtcagtttggggatggccccgggtggatggctgtttctcctgttccccacagtgtggagcccaaaccttcacccctgtgttgatgcatcctagacccactttggacatttccacctcacaagtaacgttggcagccacttcccgagaggcgctgctctgcgttcctgaccatttttttctcactcctctccagcctcagggatacaccctcctgtttgagacc

SEQ ID NO: 62521 - DNA, 580 bp, Homo sapiens
aattctgaaaaaatacatacaagccatcaggcaattttgtttatcaaatttcattaagaaaagatagtatctccactaattgttgatacatgctggtaggctggtcttcccgcctcccccctcaacatgtgtactgaaatgctaataaatgaatcatcaacagtaattacaaatattctggggatgtgatttcacagctcccattttcaggaaattgcatatttttgctctgtttgggtgaaagcatgtttatagtaacaacttagtaataaaagccatctttgaaaactattctggtttttttatgtgactgcagggatttttctcacggctgacagctaagattttaaataacatttgtaaaacttggacagattttctgttctgcttggaagtgggtgatttcacaatcccccttagtgacatcatgcttaacagaactgcaatgaaagcgatccagccccctgtgctcattcctcactgtggctgaaagatggttacagctgtggaaatggagcttgatttccctataccagcagctttgattctctgctttcagcactttttcccctgtgattat

SEQ ID NO: 62522 - DNA, 616 bp, Homo sapiens
catccaggagaaaccctgtctttaaactcagttctgccaccttagttgtgtgactctactttcttaacctctctgtgtttgggtctccttgtctgtaaaataggagtaataataggcagttgtagggattaaaccagataacgcaggcagcacactctatcagttacaaattattgtcagctgcaaaaacacataaggttttatttttctcaagtaaaaaaaaattccagaattgtgcaagctgctgctgatggttcagcagctccaggagttcacatcacagactccaggccttttcctcatggccccaagaatggccacactgttgtccagctgtcaggtccaaattcctggcaggaagtaggacaaaagggcgagcttcacaactcagtcagcccagcccttgaggggccttcctagaagaccctctatcacctcacttccctctctctcccccaaactcccacatggcttccggcttgtcactccactgacatggctctaagcttagtcatgattccacattgctaaatttcacagacatgttcctcctcttccttgacctccctttctcagcagagcaagagccccttcttgaaatacgcccttcttgtgg

SEQ ID NO: 62523 - DNA, 3034 bp, Homo sapiens
gcccaggctggagtgctatggcacgatcctggctcaccacaacctccgcctcctgggttctagtgattctcctgcctcagccttccaagtagctgggattacaggcatgagccaccacacccggctaactttgttgtatttttagtagagacaaggtttctccatgctggtcaggctggtctcgaactcccagcctcaggtgatctgcccacctcggcctctcaaagtgctgggattacaggtgtgagccaccacaccctaaaataaaattgttttaaaagtaagatctttaacttacacacctgcacatttgcaaagccctagttgttggggttttgtttttttgtttttttttttctttgagacagagtctcactgggattgcaggtgtgagccaccttgccctgcctgtgttttggtttttgttgtttttgccagataaagtaacattcagtttccacatattgggatatcactgggagaccattattcagcccaccacacacatccccaaatctaccaggttaaatggaggtagatttttaagcttcccaagtagctgggactacaggcatgcaccactatgtctggctaattatttttattttttatacagttggggtcttgctacattgcccaggctggtcttgaacttctaggctcaagcaaacctcctgcctctgccttccaaagtgctgggattaccggtatgagtcaccacactgagcaagggagaagaattttaagagtccctataataactccacacctctctaaaaaccgcactgctcgcccctccccactcccacaggttttggagtttctgactcctgaaagagaatgagtcacagacagttcccgtcagaaaagactatgtccctcccacctctcatttagttcccgtttgtttaggattcaagtgtcttgggcagttagatagctccccagcctacccagtttccctcttgcctcccctctactacccccagaaatgcttgtgcaatattggactgactcacccagaaataactcatgactctcctttgtttacagtttaagagactagggtgttgaaatatctcagcaaaggccactgagggactcttcagtccagggacaatgaaacactggacaacctgggaggagttaggtacattctctggccttctctcagaggggcttttgctgtgttgtaacaggcagtggagtgttggtaaatatttaacaaggcatctccaaggggaaaagccttaatatgtagtgtttacctattcctgtggtgtaaatacccctgctatggccagtttcaagctaccaacatgatgtcattgaaaccaaagttggaaagaaaagtgcatcatcattctgagcagctgactccaacacgccactgtagctccactgacctaagggaaaactgtcagtcttcactccataaggatgtacaggcccaggggctggacaatgtagctcttggaagatcacaatagagtcagtttcctaatttcagggaccaactgttactgctaagaataaatgggaggccaggtgcagtggctcacacctgtaatccaagcactttgggaggccgaggcaggtagatcacctgaggtcagagttcgagaccagcctgaccaacagagtgaaacctcgtctctactaaaaatacaaaaattagccaggcttggtggcgtgcacctgtaatcccagctactcaggaggctgaggcaggagaatcacttgaacccaggaggcagaggttgcagtgagccgaaatcacaccactgcactccagcatgggcaacagaccaagactctgtctcaaaaaaaaaaaaaaaagaacaaatgtgtaaaatagtcacagatctttacaatcccatccagcgatgaggttctaggtacaaaacaaacattaacatctttctcctctggaatcgcttgaaccaaggagacagaggttgcagtgagccaagatcgtgccactgcactccagcctgggaatcagagtaagactccgcctcaggaaaaaaagaaaaagaaatctttttcctctgaactctcatcaaacttctatttctacatctcttttgattttttttatttatctaacaatgactgtgccaagcaatattccaaataaggtatataccgtgacacaatccaacctcacaacaagcctacaggcaagtactttatgtatttatttatttgtttacttatatatttgttgacactgggtctcactctgttgccgaggctggagtgcaatggcaccatctgggctcactgaagcctcgacctcctgggctcaagcgatcctcccacctcagcacccccagagtagctgggattacaggcacacgctaccacacccagctaatttttgtaattttagtagagagggcatttcaccttgttgcccaggctggtctcgaactcctggactcaggcgatccactgcttcagcctcccaaagtgctgggattacaggagtgagccaccaagcccagcctggaacaagcactttttacaaatctgttttacaaaggagcaaactgaagcgctgagaggttaagttacatgtccaaagtcacaaagccctgaattgcctttgcaatgccccttaaaaagtggcagaataaatgcccaacccaagaagctcttcacatatttgatttagattccacataaaaataaaagcactatgtatacatatttacatatggcatatttatgatctactttatagttattttgtagctgttagtaatgaaaataagaacaattttatacatcatgtgctatggagagaccactagacatggtcattgttcaaaggtctaaacaggaactacatttctaagaaatagtttatttattttttttagagatgaggtcttactatgttgcccaggctggtcttgactcctgagctcaagcgatcctcctgccttggcctcccaaagtgtggggattacaagcatgagccatggtgcctggccctaagaaataatttaatatttcattattaata

SEQ ID NO: 62524 - DNA, 4982 bp, Homo sapiens
ttttagtaaagacagggtttcgccgtgttagccaggatggtctcgatctcctgacctcgtaatccgcccgcctcggcctcccaaagtgctgggattacaggcgtgagccaccgcgcgcggcctcgatctcttgatcttgtgatccgcccgcttcggcctcccaaagtgctggcattacaaacgtgagccaccgcgcccggccacaagttactaaatcttaccaaaaaaaaaaaaaatcccaactcagtcaccctagcaacctacatccttctctccccggaggtaaaactatgttaacacctgaatattcttccagagatattttatgcatacatggtacaagcaaaaggcacatacaatcgtatcattttacataaatattggcactctaaattcatggaaagtttgagctacagtttcctcttctataaaagagtggtagggaggattacatcacagaattatgcaaaatgccatggaatcagcactcaataaagacaagtctccctttccttaccctgagaagggctgtgagggaaaggggtcttcagtgtgcctcggaatcaccttgctgcctagtaatcacagcttctcgggccccacccgccaccgtcctcagaatttcccatttagaaggtccgggatagactcctaacactggcatttccaacgagctccccgacattggagatgctgcctggctggaggactatctgagaacctcaatgtctagtggaaacttacgtgccctcgattccaaccaggctctaccccatgaacaaattactcttgctgagcgccagtgtgagtagaaagagcttccatatcaaaggctgctaggaggattacctaagataacgcaggccttgctcaagacaaacgttcaggaaatcaaaatcggtttggagatgaaatgggaaagacaagagcagctccaaggagagaagaacgtccagaaaaccaagaaataggactggtaaagggtgctgaccaggtccctggagctgcaccccgccccgtgcgcctccccagccccccggccgcaccgtgcccaccccgcgctcgtcgtccccctcgcccccagcgccaccctgcactgcggacccgggaccgcctgggaaacgccctggtctgacatggcttggggctctgggcagaagccaggtctgaaaaccaaggttggggcctcatgtgttagtctggaagcaccaagcaccgcataccaaaatacctcgaggcaaccgtatggcttttttttttttaattaagttgttcccgggcggtggctcacgcccgtaatcccagcatgttgggaggctgaggcgggcgcgtcccttgagcacggaagctgaggctgcagaaggctgtggtcgcgccactgcactccggcctgggggacagagtgagcccctgtctcaaaaatataaaacaaaataaaaaattaataattaaattaaatgtgtgtaaacatgtaggtgaccttctagccctcggtgaaccagactaaaaaacgctcccgcactaggcgtggtgcccggagcggccccgccctcggagcacgcttgtgcgccaaggctggtggcggaacgcggacgtgctgcaggcagggaatgaaatggcggaggaaggcggggcagggcgcggccggagctccgcggccagccgccagggggcagccgcgcgtctgcgtcccgcgggcggctagaaccagtcctgccggaagttggggcggtgccttcgcttccgcggagccgtgccacgtggccggcccggagggacaggggaaaacaacaagatggcggcagccgggggcggggtcagcccggcgtccctgaggctgcgagccccttaaagggccgcgttcgaggagccgggcgagatgaactgagtggttttacccagccgtgggggctgttcgactgaacatgggcctgggcggggacaaccgcgccaagcggacgcgccctccgcctggtcggagttcatcgacccaggccctgcggggaatcccgcggcgcagttccgcaaagctgccagcgtgcttaccagtcggggcccgtttcttttgtctctgcgtttgctgctccgtgcaaacaaggaggacagaaaactctttatcgtggcgttttcttcctgagcgagagattaggttgctgcaaatccaacgaggcgagtcctcttggatcgaattaatgcattggctcttcccttcgcaacagctttgatgaccgtttcccgcctttgtgcaaagcgttagaacaaaccctaccttcctccaaacgaaggagaaaaatctcaatgatctgggttttaaagtaccttccccgccctgtccaaatgctggaattttttttttttttttttttgacggtagatgggagctgccctaggaccttgaatgtgtgctaaaatctgaaattctgttaatttatatcagccaccttggacaccttttcaggaaataaacatttagacatcggtcgctgtgtattacaaaatgcaagaaataaagcacaatcgtcaagtgctgaaggcccacagcttccccttcgtgtccacggatctagtgctgaaagacaaaccctttgactccgccggggcagttggtccagggtccattttcatttctcaccgtttttgttttacatgagtttgagatgcaaaagagccggtgtgggtaaaaatagttaaccccagctactcagagtgtgatggtatatttagaataaaggagacatttgtccttggttttatttataaatgtgtcatcttacatttgggattcggattctctcatgcttgctaagaaatttgtgaggccactggcatgtttctgaaatgtgacctttttcttgcttatttaaaacaaaatagtaatacttgcctcccaaaggtttgggaggttaatgtaatcaaaaaaaaaaaaaaaagcctgaatgtaataaggcttccaatggagggcacacgacagtgacagctggggaaaagacattattttcttcatgaagagatcccttatggtttcttcgggctggtagggatttttaacacctgtgctgtgatcaaaattgtattactattaatggtataatggtgtaatgtgaaggggggcggcggagggcgtggtcaagccttctattataaggcttaagggtggatttttgacccaatcagaggtttaagagaattttcctttagccactcctttgtgtatccatgccctctgaggcttcacttcagactcgtccatcgtttggcaaagaagcggtggaaagagtttctaaagaatcctttaatctagaaaggtcaggaaccctccctcccctcagtctgagaaaagaatgcaactttccttcatagcatttcctccaaaggaccctgccccatttgtgtccttatagtttgcagtgactacctccttttttgtctcattttgtatatatggttcagataaaatatcggacaactttttctgcaaatgccattggcataccggagcacaagcttcagagtacagcctcaggtcttaagttgtctccagactttcattaacataggcttcctgttacaaaagagaaaatgtattttaaattttaaaataccttattctaagaacttcagttaaaaaaaaaagaaaaaatttaaaagaacccatactctaataatgcagtcactcgttcttagactagacttaagtttgttttggggggattatactgtgtgtacaatttgttatcttgtttacttaacgtttggaaattactgttatatttcatattactgaagcaaattgtgctcaacagaaaacatgaaaaatacaaagaaaatcacccaaaatgtgactaccaagaaataaccactattaagctaatcatctgtacaactgtatttgtcttaaaataatactagacatagttttataacctacattttgtatttacgtataatgtacttttttatatcagtaagaattttcatgagttttacagtctgcacagtattccagcagatgagtatgccgtagttaaccattaacagttctcttattggacaccagatttgttaaataggttttgggttttgttttgttttgtttgagacaaggtgttgcccaggtgagatcatagtgcgctacagcctaaaacccctgggctgaagcaatcctccagcctgagcttcccaagtagctgggactacaggcacaatatgctgtatgcagctcgttttttgcttctgtaaataatgctggcatgaacattttaatagaaaaagttttgtacagatttctgtaaaataagatttacaatgaatcttttaaggttttttgatacatattttaactctccaaaccgaattgttaattgtattgcctccccaacctagctcatgtcctagctcaactttaattgccctcactcttctaaattgatattggttttttaatgaaaattgtaaattgtatattctctatgtatttttttatatgcatgtgtgtccaataaataccggacatggacattaacttcaagttaaatatttaaaaggactccttcaccgtcaacctgcttaatacacggaaacctgtttttctttttaactagttcatttctatgtggagatgtgaggcaaaggaaactaattgctaaaattttctttctgatgtgcagcaaggatataaactttgccctaaaattatttaagtgtaaatgaacgtttggttttgttgtttgtttggttgtttgtttttgagatggagtttcactcttgttgcccaggctggagtacaatggcgctgtctcggcttattgccacctccacccctctgggttcaagcgattctcctgcctcggcacccggagtacctggattacaggcgcgtgccaacatgtctggcttgtatttttagtagagacatggtttttccacgttggccaggctgctcccgaactcctgacctcaggtgatccacctgcctcagcttg

SEQ ID NO: 62525 - DNA, 1681 bp, Homo sapiens
tttttttaaaaaaacacctaaagtttaggaaagtataagaggccaaagaaacaagagttcaaagaaacaagagtgttatacacgcacacttgcagaaaggtagtaaaatatctgtatagttctggctgtcaagcttttggactgagatatgcgtaagcaaggcaaaaagatcccatagtccaggaatatcaaccagtccagtttcccaaggaaactaaaagtaactgaaaatgagaagggtgccatataggaaaattgaaggtggggcataattattaatacactgctttggaaatgctggtatggaagattcatatatggacttcaaagcatacatgtcttatacttagctatgggaaaattatcatcaaaatcttcatttatacaaatcacgggtattagaaataaaatcaggtattgtgtacagtcagatcccaggtttacacaaactagaggtttcaattaagtttccttcattttataaaaccatgacacaagctgtaaataaaggagctctggctttaggccttcttctgtttatagacagtaaattttaatcctctgtccctgcagaccaactcaaagcagtaaccttggctaccgttgccgcagaagaaacacaccctgcagatttccagttctatattcagtcttagaaaattggtcatgttgaaagggaaaaaacaattttactttgcctcagttattgacaccaagaagcactcctcagcctgttcagaggggaaacaatgagtcattcatgctgtcagcccaggtggtgcatgaattccagacagaggccgctgaattaacccgtggaggcgtctctctgagcagagcccgcaatgcgcctgcttggggctccctgcagcctctgggggaggcagggcggcccagagcaggcctgtgctggaaaggaacgcgaagccctgtaaccaagcctgtacctctgcagtgctagtcccaaggggcctccgagctgtttgtcaccatgtgattggctcaggagaggggtggagaaatgaaaacactctgcccaggatatatttagttgaagtgcagctggggaagtgcttaaacaagggagcttttgtccttatgttgaagtgtttttcttaactcctcaagggtgaaaaacttgagccacgtactgatcccattcccccccaccacccccaatatattttctcttctttaggaaatgctcttattctgaaactttagaattttctagggtttgttgcataagaggaaactgaataattctgatgcagaactgacacaaaatttaaagcacaaacttttagtgggagacacagttaagaaattcaaataatttcttaacacattagaagtttgcattcttgccattaattttctgtaagttcaaactggaaattggctattttcaaacggctttacttgaactaatttatggagttaaaaacataattaagtgttataagctgacagagccctgtttcactcgagctgattcacggtttccagtaatgaaagatatccttctgcgctgctgagcacagcttctttgcaacagatgactgatgagccgtgtaacggctcctgttcacatcctcctcaaaaaatggctgaaaactgccaccttgctgcaaggctttatgtaaatactgtatattagggcacattatctattattaag

SEQ ID NO: 62526 - DNA, 4397 bp, Homo sapiens
tttcctaggctctacatgtatgtaacattttctgatgctaacccaggggcagaggctcaaaagaactgaagagttgtttccctcacccctaagcccctcctctaaaaaaaaatccggtaaaactaagcatctggtgttcctttcattttccccaggtcccctgccaaaaggagcaagatttctaaataccggcaacgggagagagctacctcttttttttttccccatccatttcaggaaagtttaggttttcatttttttcctatggtcttcttagagttgtttccacgttaaagtaggaagaagtaacgaaaaaaaagtgagatttgccgaaagcaaatgaaacttgttttgcctggttctctggaaggaggttgaaaaggtagactatgatttttcaggttcaaactgctactctaacaaacattgtcctacagggtggaatccagtcaaccggtattgagattgattcgctaaggcctcaggacactggacattctttttaattgttttttttgatttccatgacgacagctcacaagacactagacattcttttaggctctcaggtaaatgcgcaacaggcagtctacaaatccacaaataaatcgcatctcaactcggatactggggctagggaatgtgctgatggtaaaaccattggtcctgactgtgtgaccttcatggaaggcctgggtgcttagaacaaatattttgaggatatggctgcttgcccaagggctgtgggcctgtatcttgtttgctcatcatcctgtcagtcatttttttctttccctttttttaaagacaaaatctgaacctagaaacaccgaagccagagctttttctagacgcgaatccactatttgtgcgaccctgcactaaccattctagcctggcctagaccataccaggaaccctccagctagcctggaggggtccgcactgcggggaaaaaagcaacagctcagctccaaccccaaaggttccatcaccagccaatcgtggcccggggcttctcaagaaaaccagaaacgcctacggacagtgaatggcactaaggccagcctatccgcacgaaggaggcggaaggggtggtgttgaaattaaccaatagaatggaagaagttgttgttgggagggaggaagacgccagctaacgtgcgtgaggccgctcccggataggggatgcaggaagctcgtggagccaatggccgcggcgggcgggcggcggcgcgcgtgcgcgttggcccccgggcctgcgggcgggaggcggggatggtgggggaggggagcgggctggagcgcggcggagctcctgccgccgccgcagccgctgccgccgcagcgaagaggccatgttgtgtggtgtgtggggcggggggaggaggaggagggagtaaagcctagagaggagacgggagagagacaccacacacacggcacaagatggccggagaggcagcagcaccccgagctgtcaggcgttccgccgcggccgcgaggcccgccggccggcggggagctacgcccggacggccagcaggcccgcgggagtggggctgccgcggctgaggcgaggcgggccgcgcgcgtcggcgtcacagcccgcggcagaggcgcccagggcggccgggcccacgacgccgaaagcgccgctgcggttgccgcctcggaggctcccccgggccccggcggctggacccggcgcgggcgggaggctcgggcgggcggtccggcccgggactcgggtttgggcgaccaggaggtgccggtggccgcgctcggacccggtgagtggctccctagctccttttattgtcctttgtccttgggaggaaaagcaaaatgtccttgagcgcgcgagcaggagggggcggcgggccgggcctcgccgctcggctcttctcgcactgcccctccgtggtcgggggccggctctcgccggcgggatgcgcctcggtgccctgggcccgagtcgtagggtcctggggtagggggcacgcggggccccgctgcagagcccgcgggcggcaggtgggcggggggcagcctcgtcgccgggactggatccgccgggaaaggggcggcgggtgaatgccggcgagagcccgaaggggatcgggcgtggagagcccctttctgtcctggtgagttattttgatatttagggtaaaaaaatccctttcaggttctccaacggaggagctttttaacctctttccggtgaggtgggaactcatcttcatgatcgaatttaaaagaacaatggaaccctgactacgtttcaacaaaaataaaacttgtttttttccctcctattgggtgttggcttttaactctttcaaagccgattttgaaacggctgcagtgatacatgcgaaggtacttgctgcttattaaacctttatgacgttaaggttgtctttgaaaaatgcaagttggaggagtgcttctggtatttcagaattacgaagacaagtttactgtgtcgtcaaggctgtttaatggaaatagatttgataattacggtgctagctagctgatgacgtttggttaatgtagtttattttaccgagtaatgacgccaagatcatttgatctcctgatatttaaatatgattaaatacactgtttggtactttttaaaaaggtctcaaggagccgttatctgcaacttctcacacctgaatgttagaacgtacttgggtcaattcctagtctttaaaagttcataatttaattatttttaagaatttatattatcacaagccatgatcgaaaaactttcacaaaagaacattctgacaccaaatctcttcctgaagttactttctcgtaatgtaaatatgaataaagtaggactgctctcggtaatgggcgatgaagaggagccatatttgttgcatttgttgcatgtataaaaatctagatatgcttaaaacggaacagtattttaaaagtacaggtttcataaaatttagtagagttctctgtatagtctctaatcttagaaaaatgttggaagggtaatttttaagtgtagtggtttgaagaacaaaccagaagcgcacaaacctttgtgtattttagaatatatttgtcttcattctgcggagctcttgtgttgtaaaggtgcagaactacgtaaaaatagtgttgggcagacttacatagtacatctgaaatcagatactggtttattcgaccatatttctaagggcatttttccagtaaaattgttttattttttgagtagccttcctatagtggtacatgttacatcagttgcgcatatcttgattttacagaatctgtcttaagtaccaattttggtttttcaaatcaatgtttctgaaatttttgaacactgaaagtggttttaaatgaatattctgaatctagttctttagaatcctctttgaattgtgaaatgcaaaataattgttagcagtttaacctgaaagatctttttacatgataaatgggggaggagaaagactgaaatgaaaatgttgaagaccctgatttgaaattgagtgtaaaggtctagatactgtaagttttagagtagctttagagacaaagctagtatcccacttggtgagatcaagtaacttgtggtttaaaatttaaagtaaccagtggccattttaacttcactaatttctcttggaggagctaatttttaattgctcatgattgtaaaacatacttccggatggtaagggagatgttaagatgatttgtcttgaagaatggtaaactttttctttgtttattgcctgtcataaaaagagggaaagtaaaaaaaaaaaggttcataatcttaaatcagtccaaaaatttgaattttctgtatttctgtttaattcaatgcgttaatctttagcattggtcaatacagccaaaagatgaggaaaacaaagactgatagatactaagataagaaataactgcaaccataaatgtatacaggttatgtgtccatgagccatctcttcagtttgcccatagatttttgtctgtggaatattttcttgtttcatcacactgaatcgttggccaagaaatgcttgaaaatcaaaacattaatatcatctttcttcttttttttaaaggtgacttaagagattaaaattaatttggttgctgttggttctgaacaaataatgagttcttttatttgaggtaagagtgggttaatttttattgttttgacaaaaattagcttattaggcttttgttttatctttaataatttacatttcaattaatgaatgggtatcatttttaaaagttgtgattatgaatatgagtaaactatcaaataatttgacaaaagcctttaagccttttcactgcaggaaagattaaaagtatatacgcatagccat

SEQ ID NO: 62527 - DNA, 10345 bp, Homo sapiens
atcagtatgggaagtaaatatattgtgattatgagaagtttctttggggggaggagtgtaatattttcaaggttatataatgggttaaagaattttgtgaaagaacaaagaaaaatggatattcttgaataaaaattggttgcattaacttttgctccagtgcaacttgaacactagggaggcgctcttgagttgtaaaagttacccctttcttccagtggagatggaaaattcccccttaaattttgtctttagattatttttaggcatcataaagaaggaaaaacttgaatttatattatgaaattaaggttttacttttatttagcaatcatttcacccattgggggattaatttttaaaaagattagtacttagctgagctttagattctctaagaattatccctttttcaaaatggcttgataaaacaccacttcctgtccagggaggaagttattttagctcaaggactgaaatatttagcagatctttagacaaaaggaacaaattacatttctctctggcttaaaaagggtgcttgagccagagggggttaagaagccctcccccctccccctgttggggtggtctggaggggcagggaggtgtgggggtgggggtccttaggctccctgggatggaggatctgtctctctctctctctctcctttttttttttttggtggagatgaaggggtgggtctatggtacatcacctgagttgtggggtaaatgtagagagtgtcaatcaaaggcagagctctcagagctgggaaggaggctctagatggcggctgtgccttagagagagcgcgctctgctccctgcctttgcctcactttacgcaactttccctaactttcgggcagcctcagggggcccccgtagccccctgcctttcctagggacttactggggtcgattcgaacctttttttgggagaaaagcagcttttaggagctttcttttcgtgccttgttggaaagaagcagccgtactgagagcccaggtcgttgttttttccagcttagaagccatggcgcacctccatttttgtgcgctctcctaatgaggttttttttctttcggacctgttttagtattaattattgctttatttttttgaccagttaacatatttgagggttattttatttatttttcgttttttaacggaggattttgcctttatttttaattatttgggatctgatatttttctactagtagataggactcttggtttggacatactacatggatcaggtaagttcacgatcattggtgataattttaaagatttatttgtttaagtttgccttgttttctgtaaatacgagaaattcttggatgacgcaataagatacagagattgttatttgtatctagtgtgctactttgagaaagtttccttattgatagtgatgcttccactgttcggtttatcctgttgttttttcttttaaggaaaaaatagaaatatttagttttttggtgcttaccgttgttgtgttataacaatatcgttaacatcgtcaggactttgttcctgataataaaaagcatcgatagaagccgggaccttacctttctttcaacttttgacagtaaatacctgggcacaggacttcaaagcaaacacagattccccctcccccttaatatttaagaattaaaagatgatgagaaataaggacaaaagccaagaggaggacagttcgctacacagcaatgcatcgaggtatgagctatcaactttcttcctttttgtctttttttttgggggagaaacctcagcttacaattgtttaccttgacagacatggattgctgtctgttttattgtgtttttctaatttggattcgttttttaaagcatgaccttgagattgctaatatgccacaccctaattttttggtagcaatttatgaaagttgagttgtgacttaaggcctcttacagcagtcaaaaggtaaggtacctttattcaaaggggcctttactgtaatgtacagtttttctgtcagtaaatttcagtttttaggtttttgtactgcagaaaaatgaccttgtcggtttagccattgctgcattgcaccattttacatacaaggcaaattttttctttgaagaatccaggatatctaaacttgtaactgagggccatagagaagccttgtagtagtaaattatagtaaatagacatatcagaaagttatatgaatgaaaaaatgtacatttaaaaacaaaatcacttaaaggaccctttgactgatgcctctcagtttatatttttatgtgactttatatttcttttgatacacttgacattttaggaaattttgatgtgatttatcaaaacctttacttgatggttagagttcctgcatttatgaaatcaaatctgtaataacagaaatcctggaatactcttaatatatacttctattttgtgtttgttactgtgattaatatttgcagttgtatattttacatttaaattattttaaggtttgcatttgtatgcttaagacattgatttcctgttggtagatgtattttatcctcacaatttagatgtagctgctttaaatttattgatgtatttcgacagagtcgtctggaatgctttatcttctgaagcttaaaaatgtactgtttgtgcaaatcatgatctgtttcacattccttggagtaccttgttagtgatgaagtaataaagcctctaagatgtttttgttgtatgacctctgtatattaatttttaaaagtacatatgaatgcattttttgatgtgttctttatgcattttcatattataaattttaaatcatgcagtttaacaaggatgtgattcattatgtggttttccttcccaatttttacttttctaatttttataaataatacacttttctattaggctagtgaatttgaaagttttgaacatgatgtgttactaatatgctgaattctatttattttatttgactgaaagcatattgagccttgctttagaaaataagttaccaaatttttttgcattgagttgtcacccagtttgtagtgctgtcttaattgaattgcccatgtaaattactagattaaattgaggacagaaaagttttttactcatcctaagctgtttttttctggaaagtaatgacaatttgaagaaatgagaacctccagatatatttggcaaattattaaagattcagcactaaaattgttgctcccttgagtgtatcatttgcataggtctcacatgggttttggctctcttatgcaaggtttgtggttaacatcattgatcagactgtgctttctaattctaaaaaattgagcagtgttggtattctttcagtatttttactctcacctggaaaactacctggaagttgtcaggcatttgcttactggtagtggaggttacagctgtacatgaagcatgtactgactgtacttttaaattggtttgtcaagtatactttgaatcatatacctgatggatgtccaaaaatatttaagactctttgaaaagaagatagttacttttaaattagttaccctaaatttcatatcttaatacatgtacataattatgacatcacttccttttaaaatgtgcagctgtagaatgttagtggtgttttaatgtggtagattaatattacttctactgagctgaactgtccctgtaattagtacttggttccttctgccatcagagtttttattgcccaaagtatagtgtttagggaatactacgaaaatcacctttgcagcctgagccacagaagaggaaatgagtttgcaggtcaagtaaactttggtctgagaattactttagtatctggaaagaatgagtgcaagtttaggtaaatctggtaataccctgtttttggaaatagtgcagtagttaatagtggttatataagtttgtattttaatttgaagttaatgctaaagtctgttatactttatcacgatttttgaaaattaaaaactttaaaaaacgcgattttaaaaacatttgattgatatttgtaaaatttctaagtatttaaaacaaagttctaatgatggacatacgagaagtataccatactttttatctgaataatttgcagcttggggataacttaagtaacatcaaagaatgaaaacgggactgtgtgcacacaaagagttcagtgtgttctccacggcaccacgttagcaatttatcttaagaattgaacgagtttattaaatttatctccaaatcgtctgcctttgagccagatttatttttataacctgaggtgcgggtaaatcctacaattttcaggggcgctttaccagatattctaaaaggctggggatgattagaaatggcataatgcagttacttgtgtactagaacaggcagtttaactggcagccattttatgacgctgataatacattaaaaaacgggattttggagaagactgaatctaaactaatagaaatctgaaataccaaagcctatttccttccccctctctgctcttctggggaactctggtgccgacataaaaggcagttcgatagggcacgcagcagctctttgagcccctggcatcttgatgcaggtccagctcagtcacaaaatggctgttcctttgtgccgcagcgctgacagacatactgcattgcactgtgtactcgccaaacagcaggaagttgccgtgccgagttcaaaggccggccggcgccggcgcggggtgctgattggctgtgcgcgcgcctggtaacagcagggtcaacggcggcgccttcggcagcctccgccccgtgacgtcagacggctcccctggggggcggggagagaacgcagtgacgtctggccgcgtgcgcatgtcgggcgctttctcctccccctacccagggagccgcacgccgaggggaaaaggaagggaactctagttgggactttccggtgggcggcttctttcctggacgcgtttgctcctggcagtcttgtccgcccttgcctgtagcggtccgcaccctgtagtgtgttcttttgcccatttccgggaatggtttatcctctttgagaagcggctgcttttggagaaaaagtgcaggcactatttataaattttaaaggcactatttggaaatcttaaaatagaaaatttgcccagttttacattttcccttttcataccttagcgtcccttctccccgcccccgttcagtgtgaagagatgagtgggtttaattttgttacaattgaccaaaacgtttgagtgtcagaggcggatacttttattttagtgaaaacctcttgacgggtgttaacagctgtttaatacatggctcataaacaaagggaagattatttgaacttgtccccatgcgtttttacttggtaccgtacattttctcagttggcatttgatggagaaaaactcaggtcagtatgtgctaagtactatatatttaagattcacagtgggatagtttagtagaaaatagaaaatttcacgttcaataacattaaaaagtggcagaatacagcgttaggcaaccattactatgtaagtaaatgtcagaaaactactcttttaagtgttaatagcacttgctaatgcagggtgactgacagcttggctgatagtggggtcacttggccaaatcttcgcaattatcttccctaggcctccatttcgggaattctgagtcccggtaaacggttgggtttatgctcactgatttgccttgtttggaaacctttacaaggatttctggttaaaacttcatcgttcagcaacgatgtcttaataattaaattacacatactgaatttaagcaagcaagaaattcagtggatttatctactgtggacaaagtttttttcctgccatactagagtttttttagcagttggagtaggctgtcctgtagttagccatagtttagagttattttagtaaagtgtgttacttcaaaggagatgttgacccttcagtgcaggtgatatttgcttgggcgtatgtcaagtttctgaatacagtctgtgaaagttagaattcactatgatagtgagttttgtaggttctcataatctaggttctttgggaagaattatttggatagtttgtgaaaactagctgaaattgctttttctgttacagagaagtgttcatcaaataatttgtacctgattttaaaattatatgctcaaatgtatattgcgtataaaatgctaacagagaattaagtgtttatagaacttgatgaacgtttaactgtagcttccaacttaaagtatacctgccacaagaacgaaagtaataatctcacctccctttttgtgtagagactgaattctaattagttgtgttaatagtatttgctgaatacctttcaattcctaaaactggggtcaaagtagtcaacattgcagttaattatttttgaagaggatatgaactattctgttatttaagatattttaacctaaataccattatgagttaaaatgcataccatgatataacaatttacctattaactgttgacaatcttgcagccaattaagttttttatagaaccagtgttcttaggtatgtttgttgagccttctactttttttccctttgatgtggggaatagcatcaagcagcaagaaaagagtgttgatcgatttctctctctttctctctctctctctgtatccttgccgtttaaaatatgcactttccaactagtatttggccgttagggagttagtatctttgtaaagattaagtcagcagaggaaggtgggcaaataatatttttgataaagacttttggttgtgacagttgtagcaagttattgcttgaggagtgaatctggaagtttatttgaattttaactaaaactcacagattttatcattagtttactctcccttacccccaaataaaacaactgacagttatgagagacctcctgagaccacctggtatttccaaactcctatcatttctcccataaaatttgatacactaagtttgtttctggtataaaaattgagtgactgctctgtgtcagccattaaattttttcttgctatgagccatcttttttttttttttttttttaagatcctttagtttttagctgcttcttggtaaccttagaactttgcttccttgaagaacttggctttcttgatatggtgtcacttgaacaaagaaacttaaaaaaaaattcctctaagagtattttgtgtacaggtgaaagtaactttgtggcttggttacactgggtgtgtcacagctgagtaactccctcctgcacttcagcttgactaagcgttgagttcacatgtatacctttgcaaagctgccattcacaacttgttttggaactttagggttatcagtataaagcctgagtaacaaaacttagtcatccaatgtccaggctggattgtatttttattttgtgatcagtaattcagcacaatgctggaacacattactcacatttgtcttatgacccttttctgtaatcaatggaatctttaattgataaagcaagtctagggggagagacattttttaaaaaaagctcctatatactgaatatatttgagccctgattatgaagtgagggacaaggcttttctttttgaaataaatgatggaggacatagatatgtggtagccattcatgctacataatttagcattttattgttaatatgtttggttatgggtcttcttgtttggtatttcaacatgttctggactggatatcatactgaaaagtatttcagttctcattactgagtccctgtagtttggggaaaatgtgatcactgatcttgaaggagagaatgtttcagaagcatccggctaaggcaggattgtagagatagtcttgattttatactttggatttaattctgatgagtcattttgtcacttgtgtatgcttaactgttacctctgtgcctggcaagagctaggtatgagttcagcttttactttagtcctgaaaatttttgttcccagtttaggccagtgaagaagcacttatgattggacttgtaattttctcattttaaaaatgtagataatggtcatcttcattgggtcatgaagattaaataatatagtgcccataaaatgcttagcaaagagcccatcacattaaaagtgctcaataaatgtaagcttttagtaaggttattttattcttactgtttgtttcatcttactttcttgcacccctccttcatatcctaagttcttcttcaggagctaggttggccctgaggaactcgctggttgtcttggcctaccaggagagtttgtttaggccagttacaggagagatttgtgagaatgattttaggaggcaagtcctcatttagtcagcttgggtgcgttttacagttcatcctctcttagaattttttttttttttttttttttttgagaagagccagccttttgagagagcatatgactcttcctggactacaacagcttcttgtgtgaatcacagcccggcttttgccagttagtctgagtagataactacccacccccactcccccaagctgataattattaccctggtttatcctctgtctcatttcccctctcaagctgttagagaatgaatactgaatactgtggtgcactgctccatggatataaatgtaacagcagtaatatttacaaccaatgtctaattggctgtagcttgctttcagtgttcagtctaaaccataggactatatatttgtcttagcataatgccgaacatgcaagtctgcttaaactatagtcttaagatttgtgtgttttgggtttcctctacttcctctatttcctgtcttttttgggttataggtcagatgggttctactttttattcccatttcagactgtggagagcttctaaaaataccagtgtccatccctgcccctaggatctagttaatttttaaaagctctctgtgtttcaaatttgcatgtgtttctgtatgtttgcagtatctccgtgtgttttcaaatcttctgatggagcacttcgtgtactttaacccttggtctttccattgcctgtcccatttttaaattccctttttagtcttaatagctgcttgagttaggacctctggaagcaaaagtgggataggatgctgacggggaattgtaggcttgatggaagaggatgtttctatattaaatgtcatggcagatccagttctaggcatacctttaaaatgtatacacaggctgggcgtggtagctcactcctgtaatcccagcagtttgggaggcccaggcaggcggatcacttgaggtagggagttcgagaacagcctggccaacatggtgaaaccctgtctctactaaaaatacaaagattagctggacatgatggtgggtgcctgtagtcccagctgcttgggaggctgaggccggacaatctcctgaagctgggaggcggaggttgcagttagatgaactgacacaccactgcactccagcctgggagacagggtgaccaaaaaaaaaaaaagaaaaaagataaaaaatgtatatgcaggtgggctttctcccctcaagattctgaattccttgtaagtgtcttctagtcgctttaagctcttgtggtcgtctcttccttagtgtactctccttacatcctttggaagtttagattctagaattatttacttggaatgcagttacattccattctaaacttcctttcccttgggtttataaaaacattggtgggttgtgaattgtgaccgacattgaaaaaatacaaaagaatgtggtaataaactccagggtgtatcccatttgtatgggttgtttctaagtctagcagtgcctgctagctggtaatctttcactttggattttttgttgttgttgggacagagtctcactctgctgtgctgggattacaggtgtgaaccatcatacccagcctcgtggtggtattatagatgcctgaggctggataatttgttattgtggggagcgtctcatacacagtgcggtgctgcaatcccagtctcaggtgggattttcccacctctgcctcccaaggagctgggaccacaggtgtgtaccaccccacctgtctaatttttgtagagatgggtttggaccatgttgcccaggctggtctctaattcttgggctcacctagacctccgaaagtgctgggattacagatgtgagccaccgtacctggccttcactttggattttatcaggaaggaatattgtacatggtgaacattttgtagaaaaataccaaagtagatttatatttattga

SEQ ID NO: 62528 - DNA, 1601 bp, Homo sapiens
agtccaagagcttgcggctgcagtgagctgtgatcacattacgtgcactccatcctgggcaactgagcaagaccctatccaaaaaaaacaaaaaccctatgattgagaaaccgtgcttgccttggtaaatgttggttgttagtaataaagttgagtccctttgcggtttcttctctggcctgatccagggacccctcttactcccatgacgttatgggcatacgtttcacatttattattgggattggtaatcagatcttttaatctcctttgaactttgggagttgctgaaagcaccatatattttataaaagtctaaagtttataacctaaacaatagctaactaaagacaagactcacagggctgaaaggaactcttggtcaaattggtccatctgtccttagggctttaatgggtgtaaatacattgcccgaggtggttaagtattcttttgttaatgaattctggggagaactccccttgtaactgcttttcacagcttggttatttacaaagacttttgattttacctgaatagaaagcttcttttgtcttttgtgtattagcacattgccagatcctgattaggtaggtatttgtgaagtgccttaactaatttgtaccttaaccaggcttcttgctagaatacatgtttctctaatgtatgcctgggtgctaatagtttggtgctatggaaactacttatatttggttattggggagcagaagtagtatgcatgatgaggctaaggtgatgcctgcctggcttcagctgtgaattttagaaatacactgattaaaggtaaatttttttttctgtccttactgctggatttcttaatctgggaggtacttgatggaatttagcctttttatcccttgaaattataagcagcattttgtgtgcactttttcttatacatgtacctttttctgctgtcaaaagacaacatttcaacacattgagtataaagatctaattggattttattattgattaacaaattaggtagcaccccatctataaaaaaataggtgcccattgggcatggtggaacaatcggtttttataaggttgagcaggaacaggaaaacaacatagtacaaaaatgtgggttaacatcaggttacttgaggttattttccttataagggttaaagcagagggaacttccttatgccagctcacactgtctgtctggggatttgggtatcttctttcctgaaggtaaggtaaacaatttagaagtttaacatgagtgactctattttggtttggtctgttagggtctaggagctcggtccaaattagtggccttccatagattctgtttaacactggaaggagggtccgtagtgttgcgtgtgttagggtgactgctgagagcactgctgaatcctggggaggggcctgcaccttagaactgatcagttctacagtgttagaaacagacctcttttgtcagaaattaagaattcagaaaagttcaaaggatataattaaagtttttttttttttgagacagagtctcgctctgttgcccaggctggagtgcagtggtgcgatctcagctcactgcaagctccgcctcccgggtt

SEQ ID NO: 62529 - DNA, 1517 bp, Homo sapiens
atcgcatgaaccctggaggcggaggttacggtgagccgagatcacgccactgcactccagcctgggctacagagcgcgacttggtctcaaaaaacaaacaagcaaaaagaaaaaaaaggtgtgaccagtcagtcttctttgcttttccatcttaagacacatagaagtgactgagaaggaatagttatgcaatgacatcggtttaataatcagttcaactgaagaatgtatgtaaataagggcagtgatacctaacgctgatagttgatagtgtggattgcataattcagactgtggggtgatatcttacacacgcacatacacacacacactcttgggctttgtcttctttataggtaaggattaggagaattttgacatatgcctgacacaaaagtgctccgtaaatattagctattgtatcactggcaggaagttagcctggaaataagttttatggaattccagtgtagattgctttgtgattgttttgccagattttgctttcacccacaaaaacactaagctctgccaaccagttcggccattttgtaagttagcaaaataaacactaaagtgaaatggcggcttttgggcggggctcccacaggctggctccttttaagtggaatgttgctgtgctgccctcttgtggccatttgggaaaccgcgattaaaaatggaacagtaagtgttaatggcacttcgtttcaaagtccagttccaagaaggttaatcactccgtttttacctacttcagaaagtattttgaagagataccaaattctttttatccacaagcaaaaggaagtggtaaacctttttctcatcagcatttatttttgattggaatctgaattcccagttttgacttgtttttttatctgtgtgttgtattttccttttaattatttgttaagtaaaaaattataaaagttgtttgcaatttagatgttgaataattttcagatagttgtttttcgtgaagattctgtatatatgttggatagtcattcctgaaaatccaatgtttaattgccctgtaactagtaagccactggtagtcagctaattttattactttgttatttaggtgaaggcttaaaggactccactcactaactcagtttgaccctttctattagtcttgtgggctttctgcctcctctactaaaccagcactaaagctacagcttagtactaatagtatttactattataattattaggtattaatggcaattctacatagtcttttaggaaatgtcgtttttttaagggaataatatgaatatatatatacgtatatatacacatgtacgctatatatacacacatatatacacatatacatatatatacatacacacatatatatacatacatatatatatatattttttgagacagagttttgctgttgatgcttgggctggagtgcagtggtgtgatctcggctcactgaaacgtccacctcctgagttcaagcgattctcctgcctcagcctccaaagtag

SEQ ID NO: 62530 - DNA, 3282 bp, Homo sapiens
gctgtgaattcactattaagcttcactactaagtttcagtcataaaatgtcactagtatcattccctgagagcatctgcctccctcaacccctaaaggcaaatatagttgtgaacttggtgttaatcttttcttgggtttgattttcattgttgttatttttgaaattacacaagtaatccatggaactcacaagtatacttcaaataacccatccctaacagagtaaaccagtgttagcaatgtggtgattaaaatgcatttatacacatagatatatgctgacagaaaaacggcttttttttttccccagaaggtattgttgtgtgcattgttacatttctaggaatcactctcctacacaaactcaaaaacacatagctgcacaagaagatacgtagaaagaaagatatttatggttacagtcaacagtttccaaatacaaatactctactcagaaatatggaaagtgtatcagagatatttgcaacttattgattaagtgaaaaatctgaaaataacctaaatgtaccgttaataggggaatgttatataaaatgtagtgaatttatagtataaaccagttcaaagggaatgagatgggcatccatatagacatatcctgatgcgggcattggcattccattacatcctatctgcagtgcttcccacttttcaacacagaacactataaacatttctagttgggctgttctagttatcttcagtaaactaatgctgccttttgtgggtctctagttggtaaagattttcagtctttttgttgctgttggagttttctgtttcctagtagtgtgtagacctgttgtctgtgacagttttattggtggtgattgccaaaacatgattctattcttaaacttttgtctggagttaaacattatagtagttgaaaaactaaatacgttatttcaaaggggaggcaaattgcacattctagcaaatgaatgtgcaattgaatccttctctaatataccaggcacaaagaacatcaaaggagatatgcttagtttgcaagtttattggggaggttgacaagcggccagattactcgatagtatgggacaagtggaggcaaggtagtgtagatgttaacagctgccggagctttggagtgagtctttctaggtcagcatgtgtgtcattgctaaaagtatagagagccagcagggcatggtaattgaagctcagacttgagatgtggctgcctgttttccatctcggtggtggtaactgctgtgacatatgtcagtattgtggaagtatctgataggtattgagcttaggataggagaccaaaggatgttttctgggagaaggtgatacctaagcccacaaaattagagaggtatttaatttgctgtgtccgcagtgggtgcaggagctagaggggagcaatgctaggtctagagtctggagcagtgggggtgagggaagaaatgattaagtcatgtgccttgagaaattgtcagaggccaggttttatagggcatgctgaaattggatgttatcagtgaccagaagacccggatgcctgggaggtgaacaagccttcagctgcctttgctatgggaatacagtttccaggtactgccttgcctaacatccctttcaagtagactgccctttctattaaataaatcccttccttacttacaaggaaattctggagctgtctctgtacctgtctgtccatgaacaaatagtggaggcaaaactaataaattccagctagtgtcatggattgtggggtaacgactcactaatgggtgttagctggggagaattttgtgttagaaggggaatctcagcttggatgtgatatgctcagatttcctgtttgggtagggctttggcatttatagggcactgctttcatagctgccattagatgttcttatgacactactggtagatgtcacataggttgacacaagttaaaagatgacacaggcctgaggtgagctaggactgaaatggaagctgcgatgccagagcccacagcttttaagtgttcctatcactatccagctctcctcttccttttttctttcctgttgacaacctgcctggtcacaggtataaagtaaatgactcagatgctttagtcacctggactagtcagcttggactgtgcaaggggttaaggagtcagtaattgtaatgaggtcttgaaactgttgagtcacttgttacaaggaagcctgttttgggaccttgtgtaacagggataagagttaataatgttttctgagtctctaatcttttggccccctatggtaaaatagaaagaaatgagctttagatccacacttggattggaatcccggcccctcaccctcttcctcaatttctagttttgtccattggccaagttacataaaagaggtcagtttttttcgtcattcatatggtgataataatgcctaatagtattgtccttgggaataagcaaaataatacatataaagtacttagcctagtgtctgatacctgttaggtgatcaggaagttacatggtttttctcatctttccccacttcccagtattgagaacctcccctcgacccctgctctcccattttttctcattgcttcctcatggtaactgaaaggcctccgtattgtaatgtgctgtggatcgcatggtgttatttgcagcagtcccagtttgcagtgtactgccctgtgcacctctagaagatgcagtgatggtaaatatagaacttccccttaccctttcaggttttgtgccacgtgtcttatctcctggcttctgaactcagggacttttctgttaatgttactgtaggttctgggtttttccttgcccccctcagagcaaagatgggtagtttttaagcaagagtaaacagtccacctcttgctgtagagtccatccgtttgaggtctttttgcttcagagtatcttcccctctaccagcatgcccctcagttgctttttcaccattagaggaagatgaggatattgttttctctgtgcttgagattgatactctatcacccctcagtctctgtggtttctgttttgttcctttagatgacatctacctacttaggttgctgctccctatgggatgtttggaatgaagaagggaagggagatgtgtggaggccagtagccgtctttattgggttgggtgttctcattagcatcagagtgccctttttgtttacttacttctgttaagtctaccacttctggatctcactgcagattataaggcagggcctctggatt

SEQ ID NO: 62531 - DNA, 1414 bp, Homo sapiens
tgtattaaattttcctacattgtaaaactgctgtacttttgattcttgtatattaaaaagtgttactgagcatttttagaattgggctaacacgttgcattgcattgtggtgtgagctctgtgactagagataccgccttgtctaccttccctcgttggttgctgggtcacatccagatgttttgacagcttgtgaagtggagtcttttaaagttgcatttccctccatccagtaccagttgcattgttgcgtaccggccttaacaccacagatacctaagctgttcctgagtatgccgtcgtcgaggtgaacagctccctggccgagcaactccaggctgtggcccacagctctgcacttgagggagggccagggttgccgaaaccggtagttaattcccgtgggttagtcctgcctggggggatccagggagacctaggggggccaccccttctatcctgaaggaaataacactgtgtctgccagcctgtagctttgagggtaatttaacagatggggtctggggggtggcattttataatggaaacactgacacaaacgttagctttagtattctggcacaggggcaggcccagctctggtgcagcccagacagaggaagggtggcacagcctgcgggcggagatctctgtctgaataagggttgaagtttgcccagatccacgattttcactaatgttttggtgactttgagactagctcttaaatcttgataccaaataagccatgtgtctactgagagctgagctgtcaactgctgtgactccgctccgtcagcccaggggacttggacgcaggggcccttgccagccctggcccgcgctggagcgggaggctgggatttttagttcacgtagttcttgagaaagacgaagaaaagctgagggctcttggtgcccatcaagaaacgactcacaatcgtgttgtaactcatgactcagctggaacaatttggggaaactttaagaacaagtactgcaataatcagcttattatgacttacaatagcaacaaggcttcgaaactgccagctgccaaaacgcctgccttttactggaagcggccggcccagggcccctgcctcctccctcctccctggcagggcctcgcacgcctggcatcacggcaagccctcctcagtcagcgccaacagaaaggtcacttattgaaacccaagtccctgcagtttgccagaccagagtcggctccagattccaacctgtggcttttaaaggcgcaggaccagctctgatgtgaggcgttgccttaactgaagccccctgcaccagtcctttctgtcatatctcatgggacccatttggtctcccagcccacctcaaatctgttctgatcagtgagcgggtggggaggagaaggtgcagctggattcag

SEQ ID NO: 62532 - DNA, 1310 bp, Homo sapiens
taatgaggattttatgtgaattacctaattaatttctcagaaagtatgagatagctattattttaagctatttaagctattttaagctatttaaacaaccagtttgttgaagttaaaatttagagaggttaagtgaactcgtccatttacacaattagttgcccaggcagaatttgatttgaggtctgactccaaagccggagctcttaatcaccagtgacaccaactaaacgcttcatttcagagctcgcctattcccagaggtcccattcccgttttaaggttattttctgtaactctcttgtatctaatttaaaaatgctatttcccagagatgagtccctgatctcccagaaggcatggatcatacatttcttttcctaatccacccaaattcctagagcgcacagacttaggctcgttcatagacgggaaaagaaactgaccaggcagtgaaaccgagcaaacaaagtgcaataagacaattacagcaggaaagcggcgtaaaaaaaagtagaaaaagaaagtaagggaaaggggaaataaatagcaaatattcgctgagtgccaacaatcgcacgggagggtctttagggttctctgccgagtactcgggacggcttgctgagcagtacgccggccttatctcatagatgaggcaccaaggctcaggaaacagttctgtggatctgggcgggcatcttccacccacagtcgcgcacacgtggcataggttaataggctgtctggctcgggtacctcttcccagggtcagggcgttacaaagggaggctgctgtcttcccatgaatctattagggacctacaggagcgaagagaacccttctgagtatcagcgaagacagcttattaagactttacgagtttgcaagccatcctcgtcctatttcctcacttcggactttttggacacaccttccttttcctgtgagccaacccaaacgaatgagttacaagtaatcgccttctctacgcccagccagtgcccagcaccaagcatagcgcctccttgcaacacccggccgagctcccggcggcagcgcgggcgcttgggtcggaggctgctcaaaggtgacgcgcggccgcctcctcccctttaggcggggctcgcaagggcggtgggggggcccgaggaagtccgggggccctcggtgatgcccccgcccccgccgcgtcagggttgctccctgcgcttccgagtggcgactgcagcgggtccggtgcaggtgaggggcgcgcgcctgcccagctttgcagcccccgaacgcggcctcgcacaggtgagggcgg

SEQ ID NO: 62533 - DNA, 1203 bp, Homo sapiens
ttcattcatttgtttgttccatcaaaacttatctgtaatgtgccaggtattgatgtggactgggaaaatccagtctcttcccctcagggcacttacagtattgcagggtggtattgaggagtagattaggagattaagtaaataaactaacaagataatgttggatccttagggccatcaagaatgtgaggtgtgatgagattatgacatggaggtactgcttcacactagaaggtcaggattagagttaggcttggggtagaacttgttaaggaggtgattcctgatgtgggacctgaaagagccaggtttttgatctgtgcaaaggtcacattatgtaactaataacagccttgaataaggaaacaaaatccctacacttgcaccccaagtgtttgatgcacccattttctccttatgcgaggtttctagtgttatacttcacacaggcattacccttccaccaagtagaactgaaccatctcgaaataatgggcctcttccaggcaaggacgtgactgtggctcagtagatcctacctttcttcacacaaaccaagttggctgaactttgctcccaatgagagctccttctgtgtttactttccaattacattggccagtcaggtaagcctagagctttggccaggcttgctttaactttcctttgacgcttaaaatatgttctttcgcttgttgcttttagctctctgtaaatgccacactgtcctgtcattctcaggctgtcaagattctgcccgcttgtgtcaagatacttattggaaattagagcttcctctactttaagtctaaatcttttcaacactggatttttatatgatttacgaaatttgaattgtttggtgaacaatgagccaaaacagacagtgaggctttgcaaaggtgcaagtgtcttaatcaagaacccttcctgctcagtccgtggaaacttacccagtggtgtaaaccctgccacggtggcttacacaggttctctgtgctttttgttgattaactcaatatggaacagtatgctttgggtcctgagagtcagaaggaatggtaatacagaattatacctttatagaaaagcagaaatttactaaattaaatgttaaactcgagcttaaatgctattgaagcgcttgtgttgtgcagatagatgcctgtactgattgttctctctctggagcttctgttctgt

SEQ ID NO: 62534 - DNA, 1003 bp, Homo sapiens
ttcaatgggcttattcccaacttttgccccattctgaggtcctgacaaagaaatgaattttagtgggtactatctgtgatgtatatgtctacctggctgggcgatagtgcccagatatgtggtcaaagattcttctggatgcttctatgagagtgtttttggatgaggttgccataaataaatcagcagactttgagtaaagcagactgccctctccagtgtgggagggactcactcaatcagtctaagtttttactaaaacagagattgacctcccctgagcaagaggaaattctgccagcagggagcagaggtcggagatttgaattgcaacatcagatcttctttgctggctcatcctgcagattttagactagccagcctccatgatcacgtaagtcaatcccttaacaaaccacattccctttatacatgtgcacacatgatattgattgtttctttgggaaccctaatacatgatccaacccagcagagccatgtagatgaaatgtacagaaagtattccatggaagaacacattatttatctatgctcaataaaggcgagacaatctttaggcactcagatttttgtagattaaagggatcatcatgatatctggctgttatgatttctaaatggctggattttccatggaattcaagttaaggcagggtgggggtgggaacaatgaggatccatcgtttataacaggttctcaaagtgtgctctttgtccttttgtcgaggaagggggtctctgagaccctttcgggggtaaactcaaaattttcataatggtactaatatattcttggcccgttttactgtgttgagattgacactgatggaccaaaagtgatgtgggttaaactgatacaccttagcagaaatcaatacgatgccactgaacactgtttatcaccatgtgcttgcagagaaataaaagccactttcacttaagaatgtccttgagagagcaataaaaattcttaattttatct

SEQ ID NO: 62535 - DNA, 1491 bp, Homo sapiens
gtggtcagggagggagctcgcctaacaaatataacatttatagaatagtagaaccagagaggacgccgcgctcacttattattcccacactcacccgacgtttcctctccccctgcgggtgaggagcccccgggaagccccttgccagctcagcccacgcttatttgtcaacgaagtgacatggcttctctgtggacaacctgcttttcagttattttgagtggctctttaagcccatatgtacttgcttaagccattttcaatcatccaaagagaccatcgggtgagtgggcgattgctttgaacttgagaacattattgggtttcattcgcagatgtaatctggatgtagggggtccgtttctatacctgcttttcctaccacatcggattcagactttaaaatagcctcatgccaaagtgtccaaacttcgtagtctaagcacaaggttcggagggaaggtgagaaaaattgcctagctttagctaaggcagggtttttatggggcagtggagggaggtggccagaaaccaggaagacaagaggaatgctcactgctgggaaagtgagtcatctcttttccctttcattgctacccacatgactcatcatagtattatatttttaaccataggctgattatgtctagtcacatgtgtttaaaacaagttctaaaaataaggttaattaggaaaaaaacaccttgtcagaaaaaaaaaatccacatcttttcattgaggtcataaagtgactttattgttattaatacatattggtttcaaaagtggtaaaaaccgtaagacaatggcaataaaacaactcctaaagaggcatgaggttctaaggcagtagattatgctgatatgtgaattcttatagatataaattaattctatgtattaggttggtgcaaaagtaattgtggcttctgccataagctcatataagatgagagtttgatctacaaggggggattatagttattaaagagcattaaactgctttctaatgttcatctatcctttcaaaaaatatttattgagtgcttacctgtgtgaggcattgtttatcttggaatccccagtctacagggacatggcaataactgcctggtgtacacactggtctatgtactcttgtcttagtgcattgtcccggagaatatacaattctctttctagtgatgagtaactgtttactcctactctttgttaagacctcagggtatgtatgttcagtattccatggtaaggaagtctgaattcgatggaggatcacatgggtttcttttttatttttttccctctaatgaatcttgaatgacatttctttttctttaagagcattttccctacttattaaagcaataagttcttgtggaaaagtgcttaacataacagtttcacggccagctttcccttccagctgataacatcgcagagaaagacgaacacaaggcttggaaatttgggactaaatgctaacatgat

SEQ ID NO: 62536 - DNA, 906 bp, Homo sapiens
gtgacgaagtattcctgagtatcttgtgtccagttgtccctcaccctagctgatcatccaaactacctggagacatgttgaaatctgagcctcaccttggattactaaattgggatttccaggattaggcctaggtattagtctttttttaaaaaaaaaaaaaaaaaaaaaagcaaaacaaaccccaccaacaatcctttactcccataaataaacctcctttgtggatgtagaatcagtgctcgacagcaatagctcactccagataacactactcatgttctgttttgaataattttctcttgctattatttccttccagattgaagcttgaagacagtttttctttttcacataaacagtgagtttatcatctggtcccatctcattcttctgaatgtgcatagacaaaggtgtctaaaaaggtagaatgctgaatactttctcaactggcaagctgagagaaagggaaacaggcagaaagggagacaggacaaagcggaagggctcatgctacacagatgagcacatttatgccccatatttcccaacctcttcagggaaggttgaagtatgagattcttgccaatagtgagtaaaaataacagtttcactttcagttggaggtttataagcaagggtgtgagttctccatacccatccttctcccaccacagaggccttgaaagatgtgtgtcccagaagctatataaccaggtataagccacatgagtccctcaatcctcctggagaagtgttccaccctggagagctgcttctcttccagaggactttgaacaagaaagaaactatctttcatgtgataggccactgagagctggaagtttattaccacagtacagcctttcctattctgattaatacagaaattggaaacagaagtga

SEQ ID NO: 62537 - DNA, 633 bp, Homo sapiens
tcgtagccgcggggtttggccctctgctgaacttataaaacaagtcgttcacaatgtttttgtgtctttggtactgtttagaattttagaacttttcacagcacttaaaaaggaaaataaaagattcaaagactcttgagaatgtctgatcacatccataaagcattctgcgtcatccctgtagttgcttgtgtaaccttccatctgtgtacttagctgttccaggaagcttccattgctccatttacggattcaccaagcaaagttccactttcagcctgacacattagtccaaaggtggagtaattgtgcccagcacaccttgcaccacatgagccattcagctcagtactacaccctgtagggatcactgtaacagtattgcgattaaggctgctaattgtcatccagtcactagtcttccatttttctttttaataacagagccctgcccccgagcccctgagctttagctagcaagtagccatccaactgaaagctgcatttctcagacttacttgcatcttgttttgtccatgtgcaccttcttgccaatgcaatggaagcaaaatgtgatgtgtgtaattccctttttacttccttgctctccatgactttgatttcctccttcct

SEQ ID NO: 62538 - DNA, 621 bp, Homo sapiens
actgaatcttgaggtgtcattgagatagaactttagggggattgaatatctagcttaagatcattaaagcttttccaatctcacctctcctgtctcatttgttttctgaattcttaggtctctgaactaccttctttttttttttaacatgaacaaatagcttaaaaaagcacaaacagaaacaagcaaagtggttttccttttttaaagctagtttgatcatcatgcaaatggcatactgcccacattctctccctccccctagtttgcccttctgccccttgctaataacagtcagccttgtttggccgcagcttggcaaaactctccaacaattttgccgctctatatttcagccatgacttttgtcatattttggagagaaacttgcacctggccaaccaacttgcatgccaagttccagcccattgagatttaaaatggatttgaatcgattgccctataaaattgagaatgtataacaaagacagcagtaaaaagtcatggtagtttcttgcagagttgaaaataaaacaaagggtactgtgataggtagcattcaccttgcagtacctttaaaaacacaagtagtatttttttgccctatgcaaagataaggaa

SEQ ID NO: 62539 - DNA, 626 bp, Homo sapiens
ctgcactccagcctgggtgacaagagtgagactccatctcaaaaaaataaaataaaataaataaataatacaaaataataaaaagatatttcgagcagtgaaagtactctctatgctactttaatgatagatacccgatgttagcatttggcaaaactcatcaaactttagaacacagagtgactgccaaagtaaatgagggcttttgcaacaatatatcaatatttgttcaacaatggtaagaaatgtaccatgctaatgcaagatactagtaattggaagaaagagaaaatgttgtatatgggaactctctgtactttctgctcagtttttctgtaaaactaaaaaactgctctaaaagattatttattttattttttgagacagggtcctgcaatatcacctaggtgggagaagaggggctcaatcacagctcactgcagcctcaatttcccaggctcaagtgatcctccagcctcagtctcccaagcagcagagactacaggcatgcaccaccacgcttggttaatttttaaattttttggagagatgtggcctccctgtgttgcccaggctgatctcaaactcatgacctccagtgctgagattacaggcatgaaccacct

SEQ ID NO: 62540 - DNA, 1365 bp, Homo sapiens
gtcatgtgtctaacatagtgtataagttcccgtttcaactgcatcttacccaacacagactgttcttgccccaatccattcaatgcagtgccaatcattattctgcagctgttagtgagtgcttcttttgaatgccaagaatgttaataacattaattctaaagtacaatgacatgtagctagctattacggacgcattctcttaaaacttcatgagtgtgtgattgctcccttcattacttgaaagattatatgatgcacctacactgtgccatggaataatgtttaaaaaaaaatagttcctaccttcacagagcctgaagtctagtgaaaatgatgagtaaatacaataatgcattatgattactaacaacaagagaaaaaaggtgcccccagagagaaaccaatacatatggtataatggtaataaactaaaacaaactttacaaattttacgatattttgggaggaatttctatttgactgtaaacctagttgagttgtactgggaaatataaccagtgactaattcatgttatgtcttatgatagaggtcttgaaagaggtcaaagatattttttattatgccacaccatctgcttcttatctcaggaacccagagtttgtttcttttctgcacaaggagtactttttgaggctactagagtatgttttctcttttatcttttgaaattactttccgagttccagaaaacagcagtcaaggaaacagcattgctgattaaacattagatcattggagttgcagcactcatggtgcatgtcactctttgcaaaaaacaccatgtacatgactcagcatcccagagcaacaaggtgaggcagtcagaaaatatcctgaccccagggatcttctttccaactattttaatatccactggctattctttgaggaatctttgattactatggttattgtaaaattatcaatcttgttaatattggcctttctgatggatatgggctcttcatttattgtaattttcattggcattttcagatttcagattatatacagtaaattttgatataattgttggtcatttcagtagcctcttctttgaaatgcctgtttgagattcatgtccatttctttaaaaatgttatttatgttttatttcaacagctttaggtggttttggtcacatggatggcttgtatagtgaagaagtcagggcttttagtgtaccatcacccaaatagagtacattgaaccaaataggtaatttttcatctgttatgtccatttttttttcttttttttttttgagacagagtctcactctgttgccaggctagagtgcagtacactatttcggctcactgcaacctccgcctcccggg

SEQ ID NO: 62541 - DNA, 533 bp, Homo sapiens
catatactttaagttcaaataacagatttgaatgtctcatatcactactattactttacattattttaaaagatttcggcagttccacattcttttaaaagtaggcaataacattatttgaagataatatgaacaactacctagcacccccaaaaaaataaaatgaagtattcttatacctaacatgagagatgagtcaacaaaatcaatatggaaggcatgaccattgttcacaaatatcccattctcctctacttcttggtgcattgtttcctgtctctcttaatgtttgtcctggccatgtgcctagtgctggtcatgaatttgagaagtgactcatatatgcttttaggccaaagtgtttttgtttgcttgtttgtttgcgacagagtctcgctctgttgcccaggcaggagttcagtggcgtgatcttggctcgctgcaacctgcacctcccaggttcaagcaattctcctgcctcagcctcccaagtagctgggattacaggacaaaccaccaagcccagctaactt

SEQ ID NO: 62542 - DNA, 1531 bp, Homo sapiens
ggtccccgaggctctcgtgctggcggcagccccgcgctggccccgggcaagccttgatccgccctgcgccacgtggaaggtgcctggacacgggctcagccgcaggggcccctagtacctccatcgggtctcgtcccccacggcggggtcagagggcaagtcaccggccaacctcctccaggagctctgtttaagtgagaagcaaaagagattccaaggagagccacaggttgaaatcggagcgaaagcctgggcttccccgagccaggtgaagaaagctggcaaggtcacccactcagtcaccaggtggtgcatttaatttaaaaggagtgttaaccttgtttatacaaaataacaccaatatgcagagaagcagtaaatccattgtcgttaaacagcggggagccgctggcgctggcagcctgcccaccggcgacggtgaaccgggctggcaccgagcagggagccgggcctgccagcctgtccgcctcgcgagaggaggcccgggctcgccctctctgccctccagatgactctttgcattcttgtcaaatatatttagaacaagaggtgtccacttaaagagaaacgtttgttaatcacttaaatgcaggcgcttggcagccctccagtttcacctttataaatatgtaggatcggtttccagctaagcagggaactccacagcgagttccctttctctccgcgtcccctcgaattgacctaaggtggatgtccctagcaccttattaattttctatcccagtgggctttctggagttaaggccagtcttctatctggaagttgacggagataaataaatgatgcaccgtggagggagggagagagagagaatgagaggagtgtttctttaagtaagggacagattaaagtgaaattcctgttgacggaggcgctggtgtcgacatcctccttgtttaccagcagctgtccctgttaatgacactctgataactttcggaggctgccctgcggtagtaggggagaagaagataaagaggcctctgtttaaatactccgggcctcgaccccactctttttaacttcccttcctttaagaatgggtgaaactgttcagaaggggcaaatcctgggtgcagagatttttgccccggaaattttgagttcacagcataaaaactctgcagagctgatgcctattccaggagtggaaactcagggttggcggtggggggcagaaaaggcagctggtctgcaaggtgaggaggtctgcaggaggccggaggagaactcttccttttgttttaaaaaccctgacacttccctgccctcccccggccccaccccaaacaagtcttacagaggtaactaagtatgttagggacaaggttacagaatgaaggttctttgagggccaatgtatccttagcgttaaccacatgaaaatcactttgaacacttggaacactctccctcatgaaattctcaggttttgggggaccttgccgggcacccaggctaaaactttgaatgtgcagctgagaaagc

SEQ ID NO: 62543 - DNA, 931 bp, Homo sapiens
aaaaataattccagaatctcctcaataaagaagagtgacacccatttcctgtccttttgcatggtttcacacctagtgtctatgagcccaggaagaatcccttgagtcctaccaggaaaggaaggcaggaagatcttggatcctgaaaaatgaaacttgcttgattttgatatgaatacctgccccaccatgcatgccaactgatatcatagctcagaattcttcctgacccctggtttccgttgcctggctgacctttcaacatcccctgtgcctgctgtttccctccctagctctgactcacaacacatctcattgcaaccattggactctgagacattgtccccaaggtagatcccaacctctggattctgtttgtccctctgccctccagagaaatattggtctgaggttccctttggccttacctgcccacagttcctcccagtcttgtcatcaggccaggagcagggcaagatatgagtcccagggactgtgtgctcacagcagctgtgcccagagattaagctatgagaagccaggcggtctgggaaaagtgaactgctaacctctctagttgcactccaaactttgacctctgtaaatccaaccaagaaaagttggtgagagctctaaaacttggttccagcaactcctccttggaatttatcaagggaaaaagaatttaactaaaaggtacttctcagtcgtctctgtgtcatcaatgacaatatttaattttctgtttttaggttgagaataatctttaaatacactaatgtgtaatttaagattgatcttcccaaagttaaaaaaatgccactcctcattgttgccaggtcattcttctttattagcaacaagaaaaaaatagagacgggcttgatacatgaatacagatggatttagcatgaagctaatgaagcttgag

SEQ ID NO: 62544 - DNA, 2148 bp, Homo sapiens
taaaagagagaaggaaggaaggaaggaaggaaggaaggaaggaaggaaggaaggaaggaaggaaggaaagagagagagagagagagagagagagaaagaaagagaaagaaagaaagagaaagaaagttggattgtttgataggaacataccacccttgagtcttcccctcatgaaacatggatgcagagttttggccggaattaaaattgctaaactgtgtttgaggttggcagaggaagtggtatggaatttaccaagacaggctgggagttgaaaaaaattataatccaggtgcctcaccttttcctccactggttgcttttccccctatgccctgacgcctgggagcttatttaccgagtcaattaacaaaagataacctcccattgtgcaaccatcaataaatcaatcgtgttaatactatcttggaatgtccccgactattgactttcatattgtttacattagccacttgagaaagccagaacccttgagtcggcttgtttgggcgttaatggattctggagtagccattactacatataagtctctttacaaaatattgaagtttctctgaggttcacctgctttctgaacactggcggtacactctcctccctccccacacgatcctgcagcaccgagtttgatgaatacttaggaaggcaaacaatcatgatcagtaatggaacagtcacttagggtacacctacttctttgtgagttgaataatctatttccacccaccccagccccacactgtcaaccaccatcaacaatccggggaatcaagttaatcttcaattaggtgaaagaatttcaggaacgagtgcagctcaagttaccaagtaacttactgttgtgaaacgattcatactgcaagccgcctaaatgcagggcttttgatgatattccccgccaacaaggtaagaaaaatctttccaagcagtgacaatctctacatagggaacctccaaaacttctcaagctatcttgaaaattaatgcaacagaacaaaatctttctatattttctccatacatattataaaaaataaggttgaatatcataatcataattataaagctggggtttagtggggttttttgttgtcattagcatttccttcttaatggcatcagaaatacttagagaacaggttttccctcagaagtcacaactgctctgcttccaggccaaggtagtttgctaaggcgctctatgcagagggattaaaaaggaaggttgggggtagcgaggtgggacaccagtccagggactacagaaggttcagatttcagtgctggctgcagacctgggcaaagttcactgctcccttttcacgacatgctacatacttttcaagttcccacttgcttcttagagaggaaaaaatgtggcctccgagttcaggttgctaaggacaagctgagccaatttaaccatgcattccttttctaaaagataggctgggttgttgttgttttttcactgtaaataccagaaagtcttgatcctccctactctaaacaaatacttttgctacaactttgaagtcatctatcttccacggtgggaaaccaaggattgcattcagtagccttttcctgcctgagtttagacaaaattgaatagtattctactttgtagcacatcttcttaccagacaccaggcttcgtttttcctcttgataatgatgggtatttaaaatgcatatgactattggataataaaactcccactgttctaaggctttctttttgtctttcttttttcttttcttttttcttttttttcgctttgacttcatgatatatatgtctacttagggtgttttgaagagagtgaaggaaacagacaggactttgaaaggaaaaacagacatctaattggctgtctcttgccgaccctccagtgaccctgcactgaatacctctaatggacgtgtgtgatcttggagcctctaccgcaataaacgagttttagactttcaacttgtttttgcagcagaattctttattctccttaaaattgattttttaaaaaacgagtgagcaaggcattagcataggtattttacacaaaagggtgaaatggttttctaattttatagatttaatatttttaaaaagaatttggcttcatt

SEQ ID NO: 62545 - DNA, 1241 bp, Homo sapiens
ttcactagctctgtaagtgctattccattgtattttgatcatggaagtattatctttcttcagataaatcagaggtgtgtatgttcagagcataaggaatagcctgggatttcccagttcccctttcagttatctggcttcctaatttaccctgtgaacactacctgaccttgctacatcttatttacctttctcatctgtaaaatgggtgtagggaatcacctaggctagcatttatgatcactgagtacctgttccataattaggagctgttattatcattggcatccccatgtccagtcctgcttagtcttagagcctacccagcacctaggctgcctttactatctctgcaggtcagacacagtgctgggtgctgagtcctgtctctcaatgcctcccccgtctagttggaggagagaaccatgagcagatctttagtgtaatatgataagtgctacagacagaataatcccagtatcccacaggggcccaggatgaggcccctagccatactgcaggctgggaatgagggcagatttcctgcagaagttaacggcctgagtcttcacaaacaacggtaacctccgctgcctcacagtggggagtgggccagagcctccccactccctcttccagccctcaaaaatggctcttgagcctgaacacactcctaacaccgccccagcagctaatttgagagttctgagctacgcctaacttgcatcattctgggccacagaccaagccagcagcgaagaagccaagagcgttcagggctgccgacgcattccataaacccaaatttccagtgttgccttgagtaagatgtatacaggaaattttccatgtgtcaattaagctcattgagcatgtgacataaaaaggaaatgtaatgtgggattctgattggcaaagttcaaaagcctgtgattttgatacccagatatagatctgcaagctattaagagtacttgacttgcaacatccagaggttgtgaagaaacgcctggcacatcagaggaaaaaaatgcagcgctgaatagcagtcttgggaaaatacttacttcccagagtaaaatgtacacattaaatgagttcaagaagcaactcaactgttctacttctctatcatttcaaaatcccctaacagatgttcagttttcaaagaaaataatgttgcattttgaccgttttcccctctagatgccctagacggatgtgaggttgtcatactaacc

SEQ ID NO: 62546 - DNA, 1971 bp, Homo sapiens
ggtacacctaaggcggatctcaaaactttaatctctatgaattccatcatggttatttacagctgggatgatattaatattttaaaatatttcgctaaagaagcactatgagactttaaagttgtattgttatgcaaaggtggataatatctcaatgggtcctccccagtgctggtatgttaatggggcaagagaaagagaacagctgcttttgttacccaagcagcagacataacaacactgtcctgtggttaatttctaggaaaacgctcttcttccttttttattatttgggggtgaaaaaatgtcttgggctactattgtctgtttaaattaggcaaatgcaattaagaagagtcaaatgtacacaggctccaatgatgggtaaaattaaggtcaccagttgcagccctaatccagctgcattgcttaatctcagctttagccattaccattgtgtggaatggaaatgtcttcctcgtgttggggttaatgtggactgactgggtagctggagatcaatcctgcaggcctgcttgaatgtgcaagtgcttaacactgacattttgaaaaagtaaaattgggtttcattccccaggattaggtcagagtcctttacttgtccctgcccctgcccccgaccccgcctccccaaactaagcagagagcagaagaacattttttcttgccaattgtttttttttttttttccccctcagggatccttcgcatttgccatttgtgtacatctcttgctcattccaaacaggaaagttctgttgcctcagaaaaaatagcttgtctgagccctcagaaaaaatagcttgaaaaggaacttgtcttccttttcatattcataaaggttatatttgtgtggcttgatattattttaccttgttaaggagttgtttcaggtactcagtagatatagagaaaacatttagcatataaaaacaaaaagttgacatttacagccaggagctaggtacgcaattgcaaaggtcatcaatgagtaaacagatattaatggttagccggataactggtacataaacaggtcacattaataattaacaccaggaaaagctagcacttccaaccaagctcaggaaagtgggtgccagaggaaccccccgaaaaatataagaaaaccccagtggtgatttctgattgttagagagtgagaaaattacttcttcatttttacatttctcatattctcaccaaaaaacagttctgagacagtcatgataggaagtaagtgcaaggatggagggaattttctggacgatcattgatctggtaaattgtacttagtctaacatttgtggttcccttgttttccttccatggcaatgggtaaaatcactcaggaaatttattttatcactaacctgcaaagcctctgtaaaagtatttgcttcctcattgagttattaagtccatgccttgttttaaaacttctgcgctaagagggttacattttgtacctgctgattggcattcacccagttttttaatgggaaaaggtcaagtccaagctgtagacaggaaggcaaaggtgttggggatgtggcagggaatcctggtgagtgaagtgggtgccccaggcaccctgaggaacctgggagtgaatgtgccttagccccacagcgagcccctaagagccacagcatcatatcttttgattttttaaagaagccatattttgtgtgaaatctctagatttataactcatgggccaaacaatacgttatctactgcaggccacaccaggccagtttaaatctcctgtttaaattaaaaacaaataaataaacaaacaaaaaagaacgcccgaaaatttgccaatgaggaggaaagtctgagtgtatctctacaatttattcaacggtttctcttctcctttaaatacacagttcactataggattgtcctaaagagaaaactaataaaataagacaatagact

SEQ ID NO: 62547 - DNA, 798 bp, Homo sapiens
caatctctccaatgactgagccccaggcacatccaggaggcttcatagcacaacaccaacagctagcaaaggttgccctgcaactttaggttagcactaaggccagaagtgggaagaggttgtcgccaaacaccttcagccatctgagcagctctttcaacttggtttgtgctgctttgtcctggggactgtctaaaatgaaggacctctttggctgccctctgctttccctctgactcgctgaaacacccggaatgttctccgagacgcctggaggtaaattaaaagttccattcgtttatgtatgccgcccgtcagcactcagtcaacatcagcacatacctttggacattgcccagataagttgtatttgatctggtgacctaaaggtgaattgtaggttatacttaattacactcatgagccaagtccaagtcagtaacaaacctttctatttcactccgaaataccgtgaaaccccttaagggagtccactgattataccaaagaggtttgtatgaaccaactagggtaaataattagactgtatttttaattaatattgcaatgccttccagcacaacgatatttaagatgatgacagtattggagataagtagagaaacagtcttgcgtttaaatcaggaagaatgaaggaagttttgtcagattgacaaaaataccctataattctagcaattttgtgtcaaaagtttccagtgtgtttaaaggaagttttcaatttagtaaatgctctgtttgccatggtgaagatatacagaaaaataaatacagaga

SEQ ID NO: 62548 - DNA, 689 bp, Homo sapiens
tggtgaatctcaggtattttggtcgcattgcttcaactccttaattcagaagttaagttttaatgtgagtcatttcagttttcatgtatttaaaagtcataaccactgaaacagtttttacaaaaatacttctttgagcctaatgttgaacacagtctgcactgctgagcatgtgagagtcactctgggaaaagggtgtttaatgaataactttacagtaaaaggccttgaaaacttactctaaacattagacccgtgctttctttctgaaatacattaacagcctccagaagcctcatagatgctggcaagcccttttaggcagacttttgaagtccctgacatttgtgtgcagggaaaggtgcctgcccgctctccaccccgcccccagcccctcccccacccaggcagtgtttggagatgctgttgacttaagagttttgctggaaagaaagattgataaagcaaagcaatcggagttattttctatgcatgaaattgattaaatgcttcactaaatggcttataaatttgcttctcatatttctgtcacccactgaaaagattacagaaactccgcatatagctatgttgtatacaataccaaattacaaaaggttgtaaaaactaatgttttgtttaaagttttgagcaggaccatatgccttcagtgaccttgagtaagctat

SEQ ID NO: 62549 - DNA, 822 bp, Homo sapiens
ctttctctttaatttgtacaacattgaactgccttctaaactataagcctgcaacacaataagtgtaaattttcactgctctcagaaacttttgaatgtctagccatattgccatatttgaaatatgctattttcaattttcaaatgatattgagcttgggtagggcctctccattcacttacataacctgtcatatttttaagtacactttttctagaataaaaatgcctcctatttacaaggtgctttataatgtttaaagttttttcagatagattgccttatataaataattctatgagataaatgagccaaataaccttattattaccacaaagttagtgggggagaaattatgactcagagaggttatgcaacttgcccagagtcacaggttagtaagtgccaagttgatccttgtccccaggtctttaactccaaaacgtgagctctttctggtacgcaatgctgcctcttcactaggtatacattccagaagcagcagctcaccaaaatctcacagctcttaacataaacaagatctgtgatctttatttatacatgggcaagattaacaaatgagtttaaagacacatatgtgcgcacacacacaagcccttcttgataaaaacacccaggaaaaaaggtaatgaaattcacactgctgctgggcacggtggttcacccctgtaatcccagcactttgggaggccaaggcgggtggatcatgaggtcaggagttcgagaccagcctggccaaggtggtaaaaccctgtctctaccaaaaaatacaaaaattagctgggcatggtggcacatgc

SEQ ID NO: 62550 - DNA, 1877 bp, Homo sapiens
cgttctggccaagaccaagaagggttaatggacacccggctcctgacaccttccaggtcagcttggcttgcgaacttccaacgcaggaattggaggattaccggggaaggaatgcgaggtacccgatagcctcacacctgaacacggtcgcttcaatccactgggattcatttaaaaaaaaaaaaaaaagaaattctcttctggaaaatggttaattggatctgcagctacatttcctgttgcaccgaagagccaagcagggcagcctggattggatccctcaagctgccaagaaaatcgagcaattggggggtggtggtggggggggggtgaacctttctaaataaataaacaaacgtaggtagctatcagttgctttagggagcgcagatatttaggaaaaggccaggagcgggaaaaggaagaagaaacgaaaaagattctccccttttcttaccttttgcccctcctttcccctcccgaaatttgcgcctacttgattatttgcagctgtttcgaacctcaaggtttgttcacagtagcgagagagacttgcgcttggagaagtgaaaagccattttcgcgccagggcttcgctgcttgagtttgggggttttgctctccctcccagcaaactcccctcaaagccttgctaacttcgtcaagccctgccagcctttactccttggccacttgggttcgcagtacccagccaagggccccgggcgggtttccatcgctgggggtggcctggtacccccaaagctgagttcccgcctaggagaggacgctgacgtcctggggcttcctcggtgcctgtcacccagccccctgccttcctcctcggcctcagatgtcgtcccacctgcccacgagcagggaacctggaacccactctcccggcagtccccagcgggttccgccacccggcggccgcccctgacaccgagtgggtgggaggaagaggcagctggcggggatgggccattgagacctcttgaaaaatattaaaagacaggatgggtagagatttctccgggagaaagttcgagggtgcatcgggtcgcggctgggaggagtacccgaaatgccagcaggagaaatgcaacctgtttaggccacaccttcaatccccgaggctgtctggagagactgcgtgcgggggacttgccggcgttcccacaccgcgcctgcaatccactcccgcggctgcctggcctctgccactcgcggcttgaagccagtggctctcaagccctcggccccgcggcggcccgcgcagccttcacccggcgccggcaccacgaagcctggccgcagtggactccccgcagctcgctgcgccctggcgtctcccgtcgaggagggagggacggaggcctgagccgggagctccctggcggtggtcgggccgccccccttgaggcctgctcccccctctcggcctcgccaaatccctgaaagcccagtcccccttcgtcaccccgggggcttctaatcactcggtatcgatttccctaactcttttcatcctgttgaagacacatcttaaaacactccagcccggagtgtgctctgggctttatccacactaataaaatgatttacccttctctccgcgctctcctcacagaggaaaatcgttcgagccccggctatttgtgtgtgatcagtaaatatttagtgcgctgacatccttagctgggcttcggatcgattcggggcccaccgggaggtgcgcacggtccgggcggggccgcgccgagctcgccgagggggctcctcccgccctcgccgccggccgctgatttacggcccctgcaaccagctaaggggggcgaaagcgcgcctggaaaattggcttttcaaccttttac

SEQ ID NO: 62551 - DNA, 4599 bp, Homo sapiens
tgtacagagggtgtgcacaggggaggctgggcggctgcctcctcctgtccatcagtgggcagaggtctttcccctctcaccatgactgggtgtgtggcaggatgttggctggagagttagctaaaaccagcgagagagggtaaagttgaggaaaattgattctaattgcatcatgacaatcagatgaagtctatttctgcttctcagcatccgagatgctttatttgggcaattaaaatgtcaggccacatacctgtgaaatgttaaccctacaaggaataaacagaaacagaacggcctttatcctctgaaaagaatatatgtcatatatatatgtcaccaaaccgaacaagtgatcagagttaattaagagaagggtttgccatcacccggatctggccaactctttcgtttggaaaatgcctacaagctcagttcgtggcaccttcccaccctcactccctatccctctgcaaagaaaccagggaacttttctttggcattgtgggtactaagatgcgccaggagtcccgggtggtgcgcgagcggcggaattcgtgacatcgccaagttgcgagaggcaaactccccgattccatccaaagcctctcgcggagcctttaagagacgttgtgtgtgcgcgctgcgctagtctccccgccggggcggaaacctcgggtgcgggatgtggggagagcagaggcagcgctcgcagggccagcacgggcccatccccctctcggcggcggcggcggcggcggcgcggccaccccgtccccgcccccccaacccccggtcccccgcgtgccccgcgccgcgccggcgacgccgctcgcgctaggaccgggctgcgcccgcggccgccatggcggggccgccgcagtccggccaatgacggcgagggggcggcgcgcgcgcgcctggccaggccaaccccggctgctgccttataaggcgcgccgtcgccatggcaacgtgcgctaagttgcagcagtcgtgtcaaagttcactatatagagagctcagtgagctgatcgcggagaagccacttctgccagccccggcgcctataaatcgcattccctcccgcgcccccctttttagcatatttgatcactttgattctctgttcttttctctccgcggtgtgtgtgtgcgtgcgcgcgtgtgtgttttcttcttctcctcctcctctccccgagttgcctcctttctccgggtgccgtactgccttttttcccctctttcattctttctctccgtctttttctcccccctctgcgcacgaaggatgtgcttctaggtggtgatctgccctcctctctctcttttatcatttctcccccgccgccggcgagttgactctttccctatgtgtgtgaggcggcggcggcagcagcagcagcagcggctccggcggcggcagcagcggcagcagcgacttcagcggcggcggcggcgctagacgcagcggctccgggcccgacccggcggcttcggcggcggctccggcggcagcggcggcccgggcggcccgcagggaacggcgagcggcctccacccagcgactgcgggcggcggcggccggagagagcgaggcgcgcgccggacgcccggggcaggcggcggcggcggcggcccagcgccaggacgacgccgcgcagcgcccgacgcggaccactttcatgctgattcccccggacccgggcagcgctccggccactccgcgggccgccggcctccgccccggcctgcctggctccctgggcgcgcccgcacccggcgcctccgatctcctagtcctcctgatttcgatggctttcctgaatggctgactgtgggctgccctggacttggcccccggacagtcgcctctcctcctcctctacctcctccttcaccaccacctcctcttcctcctcctcctcctcctcctcctccgccaactcctcggctgcacaccagctctaagagcgagagtgaacgagagagggagggagagagtgagagcgagcgagatctttggagagatttttttttttgcctcctacttctgtcttgaagccagacaatcgacttcagctctccctcccctccctctttctccacgttctgctcccactcgctctcctgtccccttcccctcccctcccggcggaaagccccccgaaaccaacaaagctgagccgagagaaacaaacaaaacaaacacaccgggccagacaagccatcgacaaaactttgcaaaagcaaaaacaaaaaaggaaaaactaaccaacctcaaccaaccagcccccgagccacccggggcgccctcccgcgccctcttgcaccctcgcacacacaaaaggcggcgcgccggagcccgagacccggggagccgccgccgccccgccgccgcccgcagccaggggagcaggaagtccggacgcagcccccatagatatggcaatggtagtcagcacgtggcgcgacccccaggacgaggtgcccggctcacagggcagccaggcctcgcaggcgccgcccgtgcccggcccgccgcccggcgccccgcacacgccacagacgcccggccaagggggcccagccagcacgccagcccagacggcggccggtggccagggcggccctggcggcccgggtagcgacaagcagcagcagcagcaacacatcgagtgcgtggtgtgcggagacaagtcgagcggcaagcactacggccagttcacgtgcgagggctgcaagagcttcttcaagcgcagcgtgcggaggaacctgagctacacgtgccgcgccaaccggaactgtcccatcgaccagcaccatcgcaaccagtgccagtactgccgcctcaaaaagtgcctcaaagtgggcatgagacgggaaggtatcggcctctcatttctccttccctcgtcctgggtcccggggtcctgggtacgtttggctagcctgctctgggtaaggacaagaagccccaagctcttctcttcgtattgcagcggaaaagggttttatactagaagcgagttctgcattggaacccagaccccaaatccgcatgctttggccgactgatttccttctttactctctctttgggctgtttccatttcctttgcattgattgtgagttcactggagtctgcctttctgcaagggatggggtgtttgttgttgttgttttaaagcctagtttacttctctctctctgcccttgtttttcctgcatgttcaacatgtccctccccctcacccctttccccagcccccaccctctcaaaaaaaaaaaaaaaaaaacctgagattgtacttttgtacaggaggttcaaattacaaatggcaattttatgcacttcgccgtattaacgctgccgcccgggcagcgctcatgtgaccctccgtggattaacatcctgctaaaaaaaaaaatacctctgctttcttttttcctttcactttttgaaacgaagagagcgcgataggaagtaggaaagggtgggcgaggggccctgggcggctgctttcgctctgcgcgagttgggtctttgtgatataaaattcgccgagcgccgcgagccgtgctttgccaatggcgcgctcggcgcggggcgcgggctccgggttggggcgagccaacgccggggtttctttgtgtttctgcgagagcgactctcccggtccggagtcagataacagcctgggcccgagcctcgccggctttccccggcccttacaggccctgcccaggctccgctagtgccggccgcctgctccctgcctctcccggcttcctctctctttagccggcctctctctctccgccctctccctccgtctctttctccgagcacactgattagacagacgccagacctccgctctctgcttgtctctcactgggggggttccccgccgggctggggctggggcttcggggtttgtgggagagtcgttccggagtggccacaggccgtctggggtggaccctcgtgccttttgcaaaagcgcctcaccctccccccagactcgcccctcccgctccctctcctccaatcaataagaaatatcagctgtttagcagtaaagaagaaagatgccctcagaatgctacatcccgcccacagcgccggggaccccgaggcaaggtggccaattctgggtcctcggcggaccagccccgagcgggcctcggaggcaagtgtgcccctctggccctcagagctcgcctgggtggtggtttgaaaggaatggtgccaagagcctggcgactccagctctgtggcaggcctgcctggttcttgcgctgctcagggcctgggtcaggtgggggtcgggctggggcagaccccgccggggaacctggggactgaggctggtcattaactgtggagtgtctcctttcctccccgcagcggtgcagaggggcaggatgccgccgacccagccgacccacgggcagttcgcgctgaccaacggggatcccctcaactgccactcgtacctgtccggatatatttccctgctgttgcgcgcggagccctatcccacgtcgcgcttcggcagccaatgcatgcagcccaacaacatcatgggtat

SEQ ID NO: 62552 - DNA, 1700 bp, Homo sapiens
cacagtattgctgacctttagttcgaggttttgtcggttgttgttgattttcttcctcttgcaagtgctatccatgtgagtgtgtgaagtttctctaataagtaaaacacaggcccttttccttgtttgttttgtgttagtttattgtaaacagccatttgttgtaaattattattggcattaaattataatttatgattttcaaagcaaaagacaatccctgttttattatgctttaagcatgtgttctagacgttggaaatctctctcgcactcttaagtttaagcaatgagcttggggtctgcgaggcagaaaaacaggacccaaaatttttcaaccggttaaaacaaacccccttgtatatgtttagagtggccggaggaggatctgtttagagtcttgagttcggtttaagtttattgcatttaaagaaagtttttcttttcacgctgagttagaacaaaagatctttgctgcgactgaattggacaaaagacgagggctgggacccagcgagcgcgttctgtgtgaaattgacgagatctttaaaaaagctgctaaacatggcgactctttccctttaagtgtctctttttccttgctgggtttttttttttttttttttttcatctgatctgagctcgctttatttcttttcccaaccccgctccccctcctcctcgtggcgctcgggggtgtgagagaacccagttagacgcgaaatgcaacaatagtgcaaggagagagaggggcgctcgctgcttctcgccactttcaaacaaacctgggggaagattgagcccgggggggattccagcctgctcgctcggctcgcggtcgccctgcctcggcctttcaccattagctctccctgggccgcgaggagctggggctcaaagttagcgggcgacgtccgaggcttagcctctagccggctgcagggacgggggcctggagttggcagctgctacgggaaagtgcctgccccccagcccccgcccccacttacgtgcggcagaattccgccagcgccccgggaaagtccggggtgccgggcgcgcggagctgcactcctgggatgtgcattaagcggcgacaggcggggggggcgagggcgggggcggggggcggtcagggggagctcgagcgtgtgaaactctgcctcgaatctcgcttttgacttggtcctatgagctgagccaacatggcgtctcccactgcaccgcgagcgccgggctgccaggctcggcagggccgggtaatagaaaacacattggttaccaaaaagaaaaaaaggagggcggggggcgctaaaggccattccgtctgcaggcagaaaacccttttttaaactcttgctggcaagtgagtccggtcctcggttctttaattaaagcaacagaattcgtaaggaaaatattggtaacgctgtaccttctcccctccccctcccatattcaggagagttgatttcctgtcccctctccttccaagaaccaaattagaaaaataaaaagtctgtatccgcaaatgatcttaaatgtttgaatggtatagggggatgggaagaggacggtctttacagacctcggtcagttctcgcgctcattaatgcaggggctgcgccggggtttgcgcgggcccgagcggagctggggcgcggtggggagggcggaatgcgaaccccgctggacttggg

SEQ ID NO: 62553 - DNA, 1415 bp, Homo sapiens
tcagaggactcgcttttcaggagcagcagagagtgtggtgaaccaggagactcggagagttccaaccacatctgacacccagagagagtttaaagtttttttgtttctgttttttaatgtaaaaaccagtgaattctcccgtggggctagtagaagaaagcaagccagagtcgtttttagggaaaggagtaacctctgcaggtcgatatcagggggcgagggtttctagctgccaggtgatttgcaatcagactagaaggaaaaaactggcaaccaggggcccctttataggaagatggctggatgagggctgcagaggggtgctgggggtagactgcgtatttctgcagcagatgcccggtcgctatgcccgtggattcggaggtgttcagtttctgggatcaattaagactcgctggctgagccctcgctgcatcgccgctttcacctgctcctgcttcctctgcataggtggaagcccgtgccaaagacctagtggccaggcccgagggagcctgaacgcagaggccttttgtctccagacagagagcagcgcctgcttttttccactctcacggggcacggcactgggtcaccagcgagtctcagcctccagcgttagggggatgggaggaagagtcagagaatggagcaaaactctcccgttctggcggcctggagctggaggctagaacaccccgggggggtggggcgtggagggcggcctgagtgccgcgcctggcccctgccctgggtgcgcaccaggccgcgaaagccgggggccgccttctcggctgctgaagcccgggagtcagtcaagcgccctctggcaccgcgagggaggcgcacctcgcctggtgcagagttgccgcgacccgagcgggaggaggcacaggacgcagggctcctggcctggctgtgggcttggccttggcgcactaagcgctccccatctgcccgagcctggcctccgcggccctctcggcccagtctacgttcgtttaaggacttcagcgcgaagaagagcgaacgtggctagaacctgttgacctctcctctggcctggaagtccgcacagctcgtggcaacactggacggactggttgtcaggggacgaccgcgggcaggtggggaggaggccttggtctggctcctggattccaccctgggacggaaggggaagcggaaaccttgacctcagccacacaaggacacctatctggctgtctgcctgccctggcccagccacccggttcagaggcctacccttggccacagtggtttgtcctcaggcttggagtccccagagatgtggacacagtgactggcacatagtaagcgcttaataagtgttagattggcggtgtcaatcatttttaggcacatccggtttcctccgtgagcatctcccctct

SEQ ID NO: 62554 - DNA, 1530 bp, Homo sapiens
ccccctccccctcctgcacacgaccatgtgtctcctggctgggcctttggggacgcggcccctggccctccgtggcctgtgttcctgttgttcgcttctctcccagcggaccactgtgtctggggcgccgcgccctccggtgcgctcagacctcgcgccctccgaccggcttctcccagtccccgggaggaggcgctgtgcccgggctggcctctggtccctcccagccgatgtcctggagcccccattcacaaaacccctcctggaagaggacacacacccacccacccacacacacacacacacaccccacacacgcactacgagaaggggagtttgatcttgtctcattggcgtctcgggtctgaaaggaaaatcgtttgggtaaacagccaagcttccaggcttaacgcccggctcccgcccccgcccctccatcccctcctgcctcccccactcgccttcaaccccacccgccacccacactcggctccgcagccgggccccgagcgagctccgcgagtcctggcgagagccgagggctccccgggttcaaagggccgcagccccgagggaacgccctccttgctgtgccccggggggcagaagcggactgctgggcggtgggaccggcctgggccacggtaggaaccgcgaaacctccggcttccctaaatagagctggtctcgggggagggcgccggggagttcggagcccggagggacatttttgccaagaccgagcggaagccgagcccgtgcggctggctgcgcctaggagttccgccacgggtccgacggggcaccctgggtccccgcagcccgtcacaggcgtttgcacatttgtgtgcacgaccactggcgggggcgttgagcctctgctagccgcctcgggctccgcacacccttgggtgattacccggcccccacctccctccaagcgacctcggctccaggaaaaggctttaatctgctattaagcgttttccaaagtttctttccaaaggagagttcttcacttaactggctgtaaacataattaatagttattaacatgcaaaaaaacctttgtggtgtttaaaaggataatggtctctctctagctcacactcttaagcatggagagaaccttgaaatctgaaaatatcctgattagattattagaggtgattatacagtgattttcctcgttctctaatgacattcttctctctcctcccttcctctgtctcttgttctctctttttctttttctcccagtctcaatctcactctaatccaggagtcattagcaacaccctctggctacatgttttgcatcagtgaaacattgtgacatagttgtaatacaaactcagccgccttgcactgcatcttgcggtaggaagtgtaatagcaacaaaaatcatttttcatctccaggcattattgggcgaaaaaaaccccagaaaacctgaatgtgagaagaggaaggggtggagaagagagaaatgaagggagagaagaagggggtggagggggggaagagag

SEQ ID NO: 62555 - DNA, 1265 bp, Homo sapiens
ttcctaaagaccacgtctcatttatcttctcctttctaggaaagcagctccccagcttgagtgactactttagacttggtgaaattgtgcctatatatttttctccttcttctgttattttcccttcatcccaatgcagccactgtgggatctgtcggtcacagataatggtttttaacccgtcagaagacctgtgcgttgcggcttctctgagggtttcgattacggaaaaagtccgggtgacgtacaattaggctgccgcaggctgggaggcttggcggcgtcattccagtttctgcagcgaggtggcgctccaaggtacggcagcgcgcccgggttttcgccaccgagcgcatccgccgccgcgtccacgcagcgaggcagcggccaccgagcaatgttaactcggggttcctaaagcctctgagcggaaaatcgggagcgctcagacccacctaggcggagcggtccgcagggtgggcgaaggcctgaggccacgactggggaaggctggcggcggcggggagcgctgtgatggcgagttccggagcacactccgcgcgccgccgctcgggggaaatcttcgaaattcccgggcggggcggaggctggggctgcaggtccccaggcacggcgagcggcgcgctggagtcagcctcggcccaggcacaccgagcaagcgcccaatccaccacaagctcagagacgcagcttagggttttttgttgttcttgttgttctttttcaaagaaaaaaataaggaaaatatgtgttctatcgttgtcccccaaactaaaaaagaaaagatatatagtttttgggttttcctttgctttcttcttttctctcatttcctttttcttcccttccttttccttttattttctgtagtttttttttcttacctctcctttcgcttttttttttctgtatttttcctcctatttcttagaactggttgtgtgtgtgtgtgtgtgtgtgtgtgtgtgtgtgagagagagagagagagagagagcttgaaagagagagggagagagagagagaaagtgaaagtattaccaccggctggtaatactagaaggcttgggcaaatggtagcaaaattggagaaactatttcaatttattgaacggacttcagtgcgtacgatttcgtttccatgcttctgctctttctgggtgtctcacaagctctgagtcgaagatgactgggagaaaatggctctcactctgccactcctcatctgcggtcgtaggggcccttta

SEQ ID NO: 62556 - DNA, 923 bp, Homo sapiens
aaaaaataaatatacggaggattttaggataggtaatttcagaagaagaaacaaaaacagccatggcagaaaacaagacaaacataaaacaagaacatttcttgctcaagggcaagaaaagtatcttgcacttagaaatattcccagagagcctactatagaagttttctcatctgaaaacaagggactggtattctactgttttctaaggtccatttcagctttaacactctggaagattattagttggactgtgatttggtggaatcatagatgggcaaaggccaaagaacagaaagtcatgctcagaacaccagagccaagggtccatctgagatgtagccaagcagcttctgaagcagccctgtaatttgcaggatagagctgactctctcatcccatagctgtacactgtgaagatcagccaaccagctcagggcagaggtgaaccaaggctgaaggcatttccaaagaatttagatcttctgccaactggatcacttgagtcatctttcaacatcacattccaattccagtgcttatatgatgtcaccaggcattaatagggagactggcctgggttttgccttggggtttgtagatctgtcacatccatgtttcataactttatctgagttttcagaaaacatttggcagaagccatcctatcagtacttgctttttttttttgagacagtgtttcattctgctgcccagcctggagtgcaatggcacaatcaccactcatgacagctttgaactcctgggctcaaacgattctcccacttcagctaatttggtttattttttgtagagacggggtctccctatgttgttcaggctggtctcaaactcctgggcttaagcaatcctcctgcctgggcctcccaaattgctgagattgcaggcctgaaccaccacgc

SEQ ID NO: 62557 - DNA, 789 bp, Homo sapiens
cttacctaaagggatcttaattataaatgactcatacataaaaaaattaaaatgtagcaaagcaatactgaaggtaatataatataaatattatataaaattcaaatatatctagtatattgcattcttcaaaaataatctgggctggaattactttttatgtggcacagacctctcctgttcccggcaattccagaaagttcagaagtcacgtgggaaaatattgtaacatgggaaattatacttaatattaaatatgcaatgaatcaacatacaatggtttgtctaaatgttgacagaaatcatgtgaaccatattttttattatgtagctaccctaagatggaaaattgtttggtgttcgtttccaaaaggaatccttcgtcagaatgtttgtgggctttattttttttttcttctctctcattctctttcactttctctttctcttttaaggtaatatactttgctctctgtgaagccctttgacttgaagaaatagtgatctaagataatgtcctgccatccagaagaattgtaggcacgggagagattgaaattggtgtgtaatgttattgcttccttcatttcataactgtaaagcaatgtgctaatcaaagagccagtctgtgtgcacatgcgagctctctgtctgggaggcagacctgatgcagaccagaacccctgctttccaggtgggctacagtctatgaggctccttctgtgttctgtattttgacttgcttagactttcagataaaacttaaagttacagcaatatctttttttt

SEQ ID NO: 62558 - DNA, 1145 bp, Homo sapiens
tcactcctccccttcacgccctaagcaaaagtgccagaaaacaacagtcatcacaatgacctcaacactgatgagaaagattagcaacaatctgaataactgtctcatgttgcaagggttatttattattccttttttgttagttatcacatagaacaggttggcagaggtgaacaacagtggggagaaagtcaaaacattctccaaagaagcaagtagaatcaactcacactgacaccaggaagaagtctgcagggcctgtgcagtggagacaagagcttctattgcaggaaagccttctccttatggaactcaagatgaagttagtgatttatttgacatgctgaattgaaaaagaagcatcaagttctctctgacctctccatcccctctgtctcttccaaagcacaggatgaagttattctctgaagtcttcttatctgtctgaagtccagacttaccaatgaagaaaacacttatctcagagtaattgacaatgactctaatagcagctaattttttttgttcaaatctaactcattatgtaaacttccatttctcaaagaactgaaatccccaagtctggactgcctctctgccctcaggggttagtgacaggggcatgcagacccaccctgtgcttgtacccctaccactcaggatgagtctctgacacctctgggatgacacatcacccctgccactccctgcccagatgcactgcaccacctacatgggtcaccgtcaggcataacgatgagccatctgaataatgacatcagttctggaatgtaaataagacagccgcctattccatcccacagtgtggaagttgagtcaacacagtcctttgaagctacagcagcgtgtgttttaatcaatgtctgtgtcagaggtgagacagctaccctttacctgcgagatggcctgtgacctttcacctgtcaacaaggctcatttgcaacaactaactcttagtcattacctgaaaattccatgtcataaatagaaggcgcatccctgagaggtcagtggacagatggaaggcaaatcctgcccaaaccatgcatggcaccttgcagaagagaggcagagctgcctgtgctcccccacccaagtcaggtgctgttcccctttctcaagca

SEQ ID NO: 62559 - DNA, 3156 bp, Homo sapiens
agtcattcattaaagtcccgatgcggccggcccccaagatctcaaaaggaaatattgccgagttccgtttcccagagcatctatttcccctcgagtattgcagatgtaatcataaacacaagccagttacagccacaacttcatgctttagcgagaacccagtggctcctgcaaagtccttacgctgctagaaaccccgcccccgttcgtaactatgggaacggctgacacgctgagagccggagataaccctgttccgccccctccctgacagatactgtttcccactgtctgtccacatgggcgcaccgcctcactattggccagggctccaggactgtgcctggcctcagccagtaaacggcctgtgcacgtgcacgccggagcctcccgattggccaacactccctgatcacgcacggccttcctgcgcccacccacgcgtgggagcgccaatgaaatgactcagtgaccatctacaacaaatcagcaagaagcagggctcgcagctgaccaatggccgcccgccgggggtgggctgtcccggcccttttccaggcccaactgggtttgttaaagcgacaggcctctcggcgagccggtgccccatcgggtaccgcacggctgccgcggcggccttaccctgccgcgagcgcctgtgacagcggcgccgctgtgctcgcgaccccggctccgggcctctgccgacctcaggggcaggaaagagtcgcccggcgggatgggcggggaggctgggtgcgcggcggccgtgggtgccgagggccgcgtgaagagcctgggtctggtgttcgaggacgagcgcaagggctgctattccagcggcgagacagtggccgggcacgtgctgctggaggcgtccgagccggtggccctgcgcgcgctgcgcctggaggcccaggggcgcgccaccgccgcctggggcccgagcacctgcccccgcgcctcggccagcaccgcggccctggctgtcttctcggaggtggagtacctgaacgtgcgcctcagcctgcgggagcccccggccggtaagcgcaggcgagcgcctggggttcccccgccaggctgcggggccggggaggggctgggaggccgcgcaccctcgggatgcccacctggcaggtgagatcagggcgggcttccgggggtggggtccggcctaccctcgcgggtaaggagagaccgcaagtcctgggtgcgcagctcttcctggcgccccgcccctggcccgccgggcctgaccgggaccagtggctcgggattttctaggaccgcgacgggagggggccattgggtgcggtgggaacctgtgattggacaatgggggatccagaaatctaggtcctgttccttctggtccaagaaagggacggtggaaccggcggctatgaggttccattctgcggtgcccgtgtcctatggcctccactcctccctatcctgcatacgttcttggttcatgatgaattagcagaaatttggtttggggaatagggaagtagtttctgaggggtaggagttcaaaggaagtgttttccagacttgatcatcatgcttggtttccctcttctggggagcagggcaacttagtaagagttgtacctctacctgatactgctgctgtttcctccgcatcctcttcctccccatcctcctcctcccctcctacccgcttcttcccctctcccccacttctctccactcaaaatgcctttagagacaagagcatcagggcgtgtcgggatttcccttcctgctcactttggtgaagtccagttcacagtgtagacttttccagaagtacccatgtggggacacactacatgagcgtttcattaatattagataccaaaattggatccctttagtcacgaaaatactaagaaccatgagtcttactcatttcatggatggaaactagtttaaacttttacgtttttgccatgagcttttatctatcaaataaaacaatggtatgcacctcctctccttgaagagtaaacgcattatatctatgtgctatgtcttatacaaaatataatagaatatgtggttttgccctatcctactgtggacacagtgaactcctcgaggtaagtgatcatctgagtcatcccaaaattgtagtgaggaaaactatatttggaaccaaaactgccttttggatcaatgggaacagtgtgttagtgatagttcttactccttcatgcactttcctcagtatggcttccaggatcaacccaggccccagtggaagcagacaatacaatttgcaagatggccgaatggagtcaaggaccttgggagtgagacatacattgatttttgtccaggactttggactgtatctctgggcctataactgctgagtcaatagatgtaaaattaaaagcagttgaacctgggattagcaataaaaaactgctttggtaaaatctgggctaacattttttttaattcacaagtcagatgtttattcgtcacacacacacatatatacacatgtggaacagaatgtaaaaactagacaatttgaaaatcttaaacttgttttagaatgtatcatagcacatattggcacaattacattttgcttaaaatcatagtctcttttagttggggaaaaaaaataagtcacccctaatatctatagcttggaagaacttagcatctttacacagtctagattctgggggtaatttaattacaaaacctggctgtgtttcaatcacctaaggagatttttagaaatccatattatgtagcactgggatctgttttcacaaatgctctccagataattctttgacatccttaatctaattcaactacttgctgtcattgtgattgattttcttcatatttttattgagaaactgtagtagaaaacaagccagaatcagagagttggtctcagttcttggtcacccaccagcagtgtgaccttatgcaagtccctcacccttcctgagccccagtctctgcctctgtaatggtcttctgcatcccacggctcatcaaaacctttaattatgagctttggctgtaaggccattagtgattgaaacatcttcctgtgactttgtagtgctcagtatacaagacagaaataatgagcggttggtgcagaagcagaaa

SEQ ID NO: 62560 - DNA, 2046 bp, Homo sapiens
acatgcctggcccccaggtagccttttcccattggcacagctgccagcattcacccatgcaagctcctagcttgcttttctatgtcagcagcttgatttttcaggctgctctttgttagaaaagacattatttgggggctgctttttcttaaaaacaaaaccttgacaaagactctcttaccctcactaactgcctaaataatttctttctagcttctgtatcattaggagaggacaaagccaaagattcctggtaaacctctcttaagagaacctctgtgtacagaggtggatttaaaagcaaatttctgtatgtgttatttcatccttaattcaaccatctggccctcttatataaaagtggaatactgcttatcaggggaaactttagcagcaaatacttacttttatctcatctgacataacaaaaaagcttggtcatgatgtcaaaagataacttatctcaaacatgtatggctgcaaacaccaacagctgttcctctgagagtggcagcattacttcagataaaggcggtgcttttaagaaaattaatctcattttacgtaaagccgttttaagacaaccagaattatcctcctaagaacaaaacaaaaataattccctttgctaatgggaagatgtttaaaacagtatctacgttgaatagggagacttctaatggtctcagacttgctactgaacacaacagggaagtctcctgtggagaaatacattggtggaagccaggaaacccacatgttaacctcctttctctagccttggccagccagggacactgggtctttgaactttagcaatgcctgactggctccaagataaacagtaccttcacagactccatggcagctgctggagagagctggaatgtgtcatcttgccccaagtctggtctaagcctggacacttgagcatttgccttgctcacccattgcctcccctgggctggatgacccacacagaagactgggcctgtactgggaagaagccctttccacatcaacccacttagtggagacccaaagcttcaattccaacaccaggaaccccaggggaaggaaggtataagaaatttcttacagcaaggaataaatcagaaatggctgctatcagcagaaatgagggctgtatacattagataagctcactaagaggaaattgtcttttttgtaggtttgtgtgcccgtatgtgtgcgtgtgtgttaaaggagggaggattggggttttctttgcatctgatttttgtgaaggagctttatgacttaagacctaaacaatgctgatgttggcacctctcttcttgcccagccagggccctgatgccctccacagctattccttggccttccccagaggaccagcttgtcctggtttgcccagggtttccccaggtttagcattgaaagcccccatcccaggacccctaaattccaggtaaaggggtttggttgaccaccttcccctcgttctttctactggggcaacccagctccccacatccacagacaccagctgtcgtcctccaagaagcttccctcacctgctgccttctagcactaaattcctcctgctgtcactaaacagtccccatgcagagtgtcttcccagaaacgaacaaggacattgggatggggccagaaacctcaggcccctttggccattggcacttggatggcatcccccacagagaccagcagtacagctggttcagttcccatctcccccagttctagtgccctctccttccccattctgtgcggaggcccagcctgccctgggcctgcccacaggggctgccagggaccaaggcctggctctggattagaggtcaccagaccacagatgatttgcacaccatttttttcaggacttgtattctgtggaaaagtgtccatggtcagaggctacagacatgtttctcaggctgtctttgattttctgctctctctctctctctctctatctctctcgcctacaaataaatgaggacctgatttcccaagagacctgggtctctttcttcttcc

SEQ ID NO: 62561 - DNA, 644 bp, Homo sapiens
aggagggacctaccacctgccctcagagaggcccctagctcggacagctgatggcccctgctgagtggcccctgctgagtggggggctgggcagaggagcaccccaggccatccttgtgtttctatttgaaacacccagggcctgcgggccagaggacagggggctgatatatcttgctaaggaggaagagcatcttagctgtggatcactgcatggtgaggacaggtccaggggaagtcataatgggggtccccaggccattaaggaaaagcacaaggtcacctgcccaggtatcaacagggagcaaactgggcactaaatgtgcccctgggcttgctttgaactttgcctcacttctcactgccaattctgtagccatctgggctgcggactcccacttggacagaacagtgtgaggaatgcagtctgcttgtagtcaatctggccaatacaatgtttcctgtctccttattacctatttggttggggttgaggggttcaatctctaaatgagcttttcctataaaaagcctccatgtgtgcttagtatggagactcggaagcccagggaatttttatatttattacagagagaggcaggcatccattctgtgtgtttccattaacacagactggcaattaa

SEQ ID NO: 62562 - DNA, 723 bp, Homo sapiens
tagtgtttcaataaaacgcgcatggtgagtgtcagaaagctctcactctgacttagccttgattgcctactctacatatgaagatttaactgattaaaaagggttctctcttcattggagtctattgatgttatcaaatgggacattgcaggaaaaactgcagtgttagtctcaaaataaatgtttacaggcaactgaagaacatttcctggaaagagagatagggatttgttatttaacagagaaaagcagatcaaattggagaatttaagaggcaacagcaaacagaatgagagacttggctgtaactcttgtccacccatattatgcaacctcaggcatgtcatttaacttctctaagccttggtttccttgtttgaaaaatggaaataacgatacaatctctggctgggcatggtggctcaaccctgtaatcccagcactttcagaggctaaggcagatgaatcacttgaggtcaagagttcaagaccagtctgcccaatatggtgaaaccctgtctctactaaaactacaaaaattagccaagagtggtggtgcatgcccagctactcaagaagctgaggcagaagaattacttgaacccgggaggcggaggttgcagtgagctgagattgcaccactgcactccagcctgggtgacagagcgagactctgtctcggaaaaaaaaaaaaaaaaaaagtacaggctcgatggttgttta

SEQ ID NO: 62563 - DNA, 1114 bp, Homo sapiens
cctgcacctatgttgtgtatctatggcttggggagtagagttgctatgttcctctttacttccctagtgcttccctagtacttccttagcacatttctgggtccagagcacgttcgcaaaaaatctttgctcatctttatttgcaaaggggaaaagaattaaagctgattttcaaaaaatgaacgccgtgtaaataaagtgagtgctatggcctttagaggttacacaattcctgcaggcccattgacattgttcacaaacaatttttccaaaccatctcttggaattatcttcagaggcagactctaaacaaaacatgaaaacaaatgtgatgactctctcagtggaacctcctttttgatgattgcagaataactcatttgatccctcattcttcacccgatttggctctgcacaatgaccagtgctgtctaaaagctaacgtttaagaatttgttggcatataagttattctgctgcagggctttccgggaattcccaaagtgtttggagcactagtggcagggctgggttaatgggaaatttcccatccaatctgccaggaaggagtccaggtccatatgcctggaacaggttgggaggcttggtgatcatgtcagtctcaaaacacacacgatttgcctgcaacttaaaaaccactttctaccattccccaaataattccccaacttccacctaacatattcagtctataaagtataatagaatttaatgggcaactgctctgtctttgttgagctaaacaagacagcacaattacactcagtccccagggccataccatgaaaggtagagacacagacttattgctcttcatgaaacccaagggaggtgtctgggaaactcccttgggaaagaatgactttgacaggaagtggcttcttggtattttatggcagagaatgcctctctaatttaaagcttcttttcttttgataaaaacaaagcctttaacaaaattgtaggaggaatatttcatgggctgttaaggactaagttgtgcccgcctccccatacttttatgtggaagtcctaacccccagtgcctcagattgtgactgtgtttggaggtaaggtctttaaagttaaaatg

SEQ ID NO: 62564 - DNA, 1516 bp, Homo sapiens
tgtatgtaacgtgtggtgtatgcaatgtgtgtttatatagtgtgtgtggtgtacattgggtgtgcatgtggtgtgtggtgtatgtaacatgtgtgatgtatgtgatgcatgtgtatgtggtgtgtggtatatattgggtgtgtgtggtgtatgtaacgtgtggtgtatgcgatgtgtgtgtatgtgacgggtgtgtggtgtatgtgagtggctgctcacactcagaagctatctgctgtccccttcctaaggagggcagtacaccaattgcccagggcaactttctgggtgcccccgcatcctgcactttccctcagctgggaagcaaatggcaggaaggggaggggaggtggaaagaacctgggagacaaagggcctctgttgcccttcctcactcaggcacagtctggggaagactttggccacagcccacactacaaggctgtttaccaagcctgctggagcctctgaagggcagcagccagctcaccccccatgccctggatggcaacaaggcacaggagaccgcagagcatacaaacagggcaagaggaaaccatctatcaatgaccagggaccagaggaagcaaagttctaacatctcgctcacgttctcccaaggcccagaggtgagtctccctttgctgtgctcagcactggatctgggttccaggggaagttatggatcatctcaagcctcaactccatactctgatgacttcccctcatgataaggtcaagggctgtgcaaacgaaagggacagacttgttgacaaggatctgatcagaatgtattaccatgggaatcaaaaccaggtcagttcaacaaacactctgtgagtctctactaagcatcaggcactgggtcaggtgctaggtactcaggaacaaataagacaaggtcgctgcccaagaaaatttcacaagaagatgggtgcataatctcgagattagtgttaatgtggaataatgcccagggtgcctggggattaacccaggagtttaagaaaagcttcctggagagtatcatgtctgaattcatacctgaaagatgagtaagacctggcctgatgatgacaggtaaagaggagaatcccaggaggaggcaggattgtaaataaaggcgtggaaacctagagccctagagcgtatggggaactgccagcaacttgatcttataggagcacagtacgtgaggtggacagataaagagtctgtggagtcaatagatggatcagagcatggggaggagtgtgcagagttgcaatttagggtattggtgagactgaattgtggcagttaagaagaccaactggaaggcataggagctttctgggtgacaaaggtagcaaacgtgctcaggttcacctggatacaatggagcattagactgcaagaattgatgcctcagtttggatgttcctggaacaagggatcaagtgcacaattatccccactgccttggggaagaaactccgtgagaggcatgatgcatgacatcctctaagctataatt

SEQ ID NO: 62565 - DNA, 1511 bp, Homo sapiens
taatacatttgatatccattcatgctgttgctggcaccagtagcttgttctttttattgctctatactattacattttatggatgtaccacagtgtgtttatccattcccctcttgagggacatttgagttatttccagtttgggttgattgcaaataaagcttctataaacatttggctttaagtttttgtgtgaacacagttttcatttcactttgtaaatcttttgcctattttacaattggatttcttgttttcttattcaattttgagtattctttacatattctgaatgtaagttctttactgcagaaatgatttgcaagtattttctcccagtctgcagttatctttttatatttttaaccaaatttatgtttcagttcagtaacaactgggtttttgcttatgtcctacgatctgaaagttctcttctatttaactgcctttgaccattttatcttgagctaacccgaattttcattcttactaaattgctctgtaacataaaacgattgctaataatttcctttcatctcgtattttcttctagcttggcttcctcttttttttcacaccatgatcctctgggcccccacccccacatacatggtacttttgcacctgaaagaggtcgacttggtcatcatattgcattttccatctggcttatgtttgcccaactctgattaggcacatgtttgctctgataaagtctgggtcactgttttctcactgatccgtgattttcagatgagtgaatatatcatagtccactcattttctctaccccaagaacatgttagaggttcagggaatgctaaacgaatgctgctttttaattttcctttcttgttttaaaaagaatgcctgcattcagctctccctccaagcatttgttaaatattctttaccaggactcatttcatctggttggtgtgggagtagggggtggtcccactcccattgggaatacccccaattccctgtgtagttgccatgtcctctctttggataaagaaagtgactgctctgttgatcacatgtctagtttcatacctgtctctccaacagccatctccacttatctcttagataaagaaaatgtaaagagctccttttctttggagatgggggtacacagtgagaattttaagggctctgaccacttagcgtggcttctgagggtggagaggggttattaggaaccatccccactgaggtctctctgtcctctccaagaccttctgttttttccttggccaccaggctttggactttgtggctccaggctaagcttttcttcatttggttactgttggtccaaaacttcacaataattttttattactcttttgtgccttttattagacttaggaaaggaaaatagcaattcactccttacttctgacattaataaattcaagccaatgcttaaaatattaaaatacttctgcacctaccggaaatagtcactgtgctaaccccactcatgcaaccccccaaatcct

SEQ ID NO: 62566 - DNA, 961 bp, Homo sapiens
tctcacctccctctgatgtctgcctttgctgtcccctagctcctgtatttccttctctcaaagccctttccagaaggctataacgctagctgaagtgtctacctcccccagctagactctgaaaggaaacagctctttctactcccagccctgcaaccaaccattatgagcacttgataggtgtaaaatgggccggtgaaggtgtggaagcacttggaaatgtttataaaacactaaacaggtatcaccaaggtattgtcactgcagtgtggaagactgtgcagaggaaaaagattggtccgtgtgcctttagtgccatgcctcacgtgcttccagccaaagtcacattgtccattttgcacttatcacctcattcatttcacgactgcccctttgccaaaatatccccgggatgctgtctgcaaatcacaaaagtggttattcagcttattttgggacgccaaacagaagcccatttcaatttcactgttcaaataaacattctacctactggactttgattccagctggaaatggaccaggtagctatgtattctctcacatttgcaagaggggaagttgctggccttgccatttactcctttaggtcagccaaggaccaggacaaatgtacattacacactgagcatacatctggaaaaagcaaatatcagaagaaaacactgtgaccttaagagcaatccaaagcacagagccctgaaaacctccttgcaattcgggttttttcctacagagcaacacattaagttggaccattaacccaaatgaaaggtttcagatttatttcattggcagatggaaattaagttgcagaaacatatccagcacaggctagagtatatttaatttcatttatttttaattacacaagtaatacatgaatatattgtcactataaaaattcaaacaacacagataaagttaacatcactcttgacca

SEQ ID NO: 62567 - DNA, 966 bp, Homo sapiens
tacgaaaatgtgctccagttgaggcctctcttttattaattgtcctctatttatcagagatgttttagtgaacctacaaattcattttatactaatgccttaagtactgaatgtaaaatgattatttttgcaattcttggaggatattcagaaagtcaattccaatgcatctggtagtctgaatctggctgttgatgccagtgagcatctcttgtatacactggatggatcagagattacttaatttaatcttcaaaatgcactggttttcagatgaagaatcaaaggttcaaacaggctaagtaactcaccgctgatcacatcagtaataaatgatagagtcaacccttccactcacacttaggggagcagtcctctcttcaaggctggctgaggagcccttctctgagttttagctagctctcagagaccctctttgccaaccctaaagccaagaggttaagcatagcttgcatttggggtcttgttggagtctgaccaccaaaaagcagccattggctctccctgactaaaagcttctcattttctaagaccacttatttgggtttcattgcaaagaccagctggggctaaaacaggcaaactcatgctccacaaaaaaaataccatcggattattttaaaaactcaagaaataagaagaggaaccacatttaatagagaacaattagcaataacatttgagaaggcctttgacctgaatttcctaatatatccagacagaacttggtgactcatgactcagaatcattttctttggaaaagtatttcaggttttttccagaaacatttacttaacttttttttttttttttttttttttgaggtggagtctcactctgtcacccaggctggagtgcagtggcatgatctcggctcactgcaagctccgcctcctgggttcaagccattctcctgcctcagcctcctgagtagctgggactac

SEQ ID NO: 62568 - DNA, 1287 bp, Homo sapiens
caatacgaatcctacacacacatgcaggcacatgtgcaaacatgcatgcacacacacaagtatgcacacgtgcagacacaggcatacataagtagctatgtagttataatatacataaagaaaacaaaagactggtaagagccacacatcaaaatgtcaagtgcttatcattacatatgatttttgctaattttacttgatttttaatgatcagattatataccattttcttttttttttttttttaccttcaagttatgaactattgtgacatataccagttttgttttgttttgtttttttcccaagacagagtcttgctctgccacccaggctggagtgcagtggcccgatgtcggctcactgtaacctctgcctcccaggttcaagcagttctcctgcctcgccctctggagtagccgggactaccagtgcaggccaccacgcctggcaaatttttatttttgtagtcagagttttgccattttgcccaggctagtctcaaactgttgagtttaggtgatctacccacttcagcctcccaaagtgctgggattataggcataagccaccgtgccaggtgcctgacatataccactttttaaaggtgatttttttaaaaaatgaaacttcagagccgctcatccccctacttccttgcctctctgaaaaatctcttgtgctttgaatctctgagctaaatgatcttgtctgcccctgggctattgctaaaggacagtgacctcattatcaatcacagaaatcaaggcacaaactgccagcagactgagctttgagctcagagcttctgcctggttccctgtgcgtgaacacaaactacataacctcatgttgggtcaagagaagcccactttctttactcagtcattctagacagcagtaagctgctttctatgcatgatttccagttaccttgcaagacggtgcaaaactgactgcttgggcaggcctaggccaggtgaggagagagaacctttagtccaaaccacattgtttacctctgattcacatgcaacagagcctgctgatcatgcagaaatgagtagttccattacaagaattttctagttaaaagctaatctatgtttaattttaaatttaatttcaaattttaaaaaattcaagagaaatattttaaaagttattttacactttcttgccttggtaagcaaattaaatctagtgcatttattttgatgaatactaattataattaattcttctccactctaagcgatgctaatgtggtgtacaatcttataccat

SEQ ID NO: 62569 - DNA, 867 bp, Homo sapiens
tcagctgtgttatctgtcttgtcacagcactgaaacgtggggatggggagaacgtagttccacgttggcacagatgagctgtttacatcgaggcggacgagcaggcaggagcgtgcagtccgtgcggctctgtttctttcccctgttaagcgcagagtttctagctgcagctaaagacgcccacccaggccgagcgcccttggattctgtgggagggcggccccgcgtccaccgcctgggggcaccgactcggggctgcggacctcggagcgcgcccggcgggctttggtttgggcaaggctgccatcgtgtggccgccgtgggtatttccctcggaaagcggccgggcagcgagcaggcgcccgcgcctcttctttttacgggagtccgcgctctccgcaagtctgtcctgagatcgccgttttctcccaccagccagaatggggctcactgctgcaacccgggtctcagtcttctccagggcacctcctgggccgtgccccgagccttgactgcggcaggcggtgttttttcctctaaaggaagaacttgcctgtcagggcagtccacagtccaaaatgtgacgcataccggagctcaggcctggtatcaatcttagcacagcatttcgggctgaataactctgttatgggagctttcctgcctctacccactagatgtcagtaccacctctcacccaactgtgacaaccaaaaatatctccagacatggccaaatgtccagggttaggaggcaaagttacccacctgagaacataagagggagtgtactcgtttcccattgcaactgtaagaaattatcacaaatttggtggcctaaaactgccaggatttcttaccatacagt

SEQ ID NO: 62570 - DNA, 799 bp, Homo sapiens
ccacgttcgggctttccagtacgcagcgaaaaaaatgccgcatgcacgcatttatttattttgcaacagctgcaagaaacaatgaagcttttcaagaaccggggaaacgcgctttccagccgcgctgttgttgttttcaatgaacctctcccagccccgcactccccgcccacccctcccctctcctgcccacccctcccctgcctagcctttccctggctacccacccctgccccgccgagaccggaccggcggcgggggcattgtttttggagtcgggcgggaggggagggcgcgtgcggggtggccggcgcagtgcggtgggggcgggagcgggtgggcacgcgcgcgtgtctctgtgtgcgcgcgggaggcggtggggcgggagatgggggcggcgcctcgcagtctcgcgccccacgcccgggctccgctccgcacgtcttggggaaccgggctccggttttttgcgcgcgccggcctgggccgggccctcggcgcgccgctgctgcggcggtggccgctcgagtgtgcgagcgggcgcgtgtgcgcgggccagggcgcgcgcgcgcgcgcgagcccccagtgtgtggcagcggcggcggcggcgcggcgaggctggggctcttgtttaccagcattaactccgctgagcggaaaaaaaaagggaaaaaacccgaggaggagcgagcgcaccaggcgaactcgagagaggcgggagagcgagagggacgccgccagcgagcctgcccacggccggcgctcgcagaccctcggccccgctccccggatccccccg

SEQ ID NO: 62571 - DNA, 486 bp, Homo sapiens
tgttttccagcggccgctccccggcgctgcccggcgccgccccctgccggcgggagtcggagctgctcccgcgtgcgcgccggccgcggcgggctgatgacccaacgccgcaggcatccgaggataacctttcccttttctttccaagaccaaataagggggctcttccctctgcgcgccaggcccgcggcagttaggccaaggggcgtggaaaggaggatccgggaacgaggctgacagtcggcaacaaccgagcacattgttcccgcggcgcccggcctccccctcctcccgcgggcccggcccgtgcccaccctgcagccccaggcgcggggagccaggcgggatcggcgcgaccccggaccccgtcggcagctccgccaagccctccggcccctcccccgagaagaagtgaagggcggggtgcccgcgggccctcgccccggtgcagaccctccaggctcgcggggcagccgaccggggacc

SEQ ID NO: 62572 - DNA, 906 bp, Homo sapiens
aacagagggtgtggcctttccacaaagaatgactttctgtaactcacatccaagaaaagacactgaaacaggaagagactaaggagcagctcctctctgacttgaaggaaagtcaggcttaatgatgataattttttcccccagaacttaaaaaaaagctgtatgctcactacgtgatgcaggatgaggcccgaatctggcacaattcctggtcccaggtctgttccgttcgatccttggttgcttcctgcttgcctccgtccttcacctccccaagagttcggcaaaaccctggttgtcgaaatgctgtagtgtggataacacgccatctagtggttaacaggacaattgcaaaaatagcttcacaggtcatatgtcaaactattccaaaattgggcttcagacctcagttatctatgccactggtcctcagggtttgcttcacatgaaaatcacctgaggagcctttaaaaatctgatgtccaggccgtaccccatcacaattaaatcagaatctctggatgtagggcccagacatcagcgtttttaaaaatccccaggtgattccaaagggcagccaagcttgagaactggtgacctttgcaaccaaaacaatggattaaaaggtagaaacactttatgcagtgattataaatcacatgtatcataaaaaacatttcctgtataaagcatatatagaggttgcttttttccttcttcttcatacttggattttattgattttgtttagacagggtctcactctgtcccccaggctggagtgcagtggtgagatctcggctcactgcaacctctgcttcctgggtccaagcgattcttgtgcctcagcctcccgagtaactgggactacaggcgtgtgccaccacgctcggctaatttttgtat

SEQ ID NO: 62573 - DNA, 1324 bp, Homo sapiens
ttcatgccgaacccacagtcattgaaaaagaaattaaaataccccacgaattccacacctccatgaagggcatctcctccaaggagccccggcagcagctggtggaggtcatcgggcagctggaggaaacccttcccgagcgcatgagggaggagctgtccgccctcaccagagaggggcagggtgggccggggagcgtttccgtggatgtcaagaaggtccagggtgctggtggcagttccgtgaccctggttgctgaagtcaacgtctcacaaactgtggatgccgatcggttagacctggaggagctgagcaaagatgaggccagtgagatggagaaggctgtggagtcggtggttcgggagagcctgagcaggcaacgcagcccagcgcctggcagcccagatgaggaaggtggagcggaggccccggctgctggcattcgctttaggcgttgggccacccgggagctgtacatcccttcaggcgagagcgaggttgctggtggggcctctcacagctcgggacagcgcactccccagggcccagtgtcggccactgtggaggtcagcagccccacaggctttgcccagtcacaggtgctggaggatgtgagccaggctgcaaggcacataaaactcggcccctctgaagtctggaggactgagcgaatgtcatatgaaggacccactgcagaagtggtggaggtaagtgcgggaggtgacctaagtcaggcagcgagcccgaccggagccagccggtctgtgaggcatgtcacgctgggtcccggtcaaagtccactgtccagagaagtcatcttcctaggccctgcccctgcctgtccagaggcatggggctcgccagaacctggcccagcagagtcttctgcagatatggacggatcagggaggcacagcacatttggctgcagacaatttcatgctgaaaaggagattatttttcagggccccatttctgctgcagggaaggttggtgattattttgcaacagaagagtcagtgggtacccagacttctgtcaggcaactccagttaggccctaaagaagggttcagtgggcaaatccagttcacagctccactttcagacaaggtggagttgggtgtcataggagattctgtacacatggaagggttgccagggagcagcacatccatcaggcacatcagcattgggcctcagaggcatcagaccacccagcagatagtttaccatgggctggttccccaactgggggaatctggtgactcagagagcactgtgcacggagagggctcagcagatgtgcaccaggccactcacag

SEQ ID NO: 62574 - DNA, 1016 bp, Homo sapiens
cttctactagaaaatgttttatatagctatatatttatctaagaaacataaattgaatttttcagcattctgctcttcttagctaaatttacttaagcatttttgtgtgaagtaggtgttttgattcttttgttaaaaacacaggcattgacagagaggaagtcaataaatgttaattgaacctgctggagccaggcattgtaaacatgtcgctgagctaagtaaagaactcgccaaaccttgacagtagaacattctccaccataaataaagatattctgtgctccccagattcttctgagaggcagatatgctgctccttgtaatcagccactaaggggtgtttctcacttttctttaaagtgaacaataaactgaactccggagtgtccagatgaattttaggagccattcattacattgctcttattctctttgattttatatgcagggttgtgagaagtcacttgtgtttctactattccttaaataccaaacagggagcttttctttcccttgcaggaagacaaaagggaatgtctgcttttataccagcctgcaggctgtccctaaatggggccatgtttgtcttgctcaccactgtgttccagggccttgcacaacccctggcacacaagccgatgcagcagttgctaagtgagtgattaaataggacaaacatgtaagctggggagattcttacatggagcctgtagactccttaagacacagttggaccctagggctccagtggctcatcagttactaaaacctctgctagggaagttccactgggtgtgtggtgtgaaaagccctcgaaattccagtccagccttcaacaggagaaagactgccgttcactatttgctgcttactcttaggactcattcggaaagctggggtagttgagagacaatcttaagcatttgatgcaaactttcagaattctttttgacatgaccttgaggtttgaaagctaggagtctaaggagcccaggagccaagaaacctgggat

SEQ ID NO: 62575 - DNA, 830 bp, Homo sapiens
aatacggtttgccaaaatgaccccattagggacagaaagcttcaacagatcactttttgtaaaagaaatagagaaaattgtcaaggaatttccctacaaaagaagcagcaggtctaaaggatgtcacagaagacataaacctccaaagaatgcggagtttcaatgctgcataaattctttcagtgcatgaaagataaggtgaacttccaaattatttttataagcaaatataacattgatccttaaacaaataatacatacaaatattggcacaaaaatcctaaaataaatgttagcatacagaatcaacatctgctatggtttgaatgtgcctcccaaaaagcatgtgttggaaacttaatccaaaatgcaacaccgttgagagatgcagcctaatgagagtggattaggccatgaggactctgccctcatgcatagattaatgctgttatcttgggagtggtttggttatgaaaggctgagtttggcctccttttctctctctcatttccttttgctttctgccaagggatgatgcagcaggaaggcccctgccaaatgccagtccctggatcttggacttcccaggctccagaattaaaataaataaatttattttctttataaattacctaatctccggtagtgtgaaataagtttatttattgtgatttatttaaatgatctaagaagaaccatctgataatctccactgatgctgaaaaagcctttggtaaaattccacatttagttctaattaaaaaagcactcacggtaatagaaattgatggatactttcttaacatgataaaatatataaaccttagttc

SEQ ID NO: 62576 - DNA, 1318 bp, Homo sapiens
ctcctgaagcacctgtgctctacaacagtcatccgggcattaagaactgttcagaagttttagtttaaatgttctgagcctcatttgtccctgctcttgaggggctggattttattactttatattcccctatatggattaacacaggcaacttaagaaatagtcatgttcatcaacgtttccttgataaattcttttgtatttgttttaattaaaaatgtcatttttgaaatatgattgctggatttttttgagaatttacccttacatgctgattctgcttcaggtatctgtagtatgttttgttcagccattagcagatctgtccctggaatccctaatccacaaatatacacaaaatttgggttcaagcaactctattttctcctatatcttttaatagatatattatctattatgccaggtatgacaatatataaacaaaaatatccatataaaaattacaatattactaaatgtccttctaaatccacacttaagcaacaataacgaagcacagtttcttaaagtagaaaatgatctatagttaatcttattatcttgcctcctttacctttcaaaaatccactgataatctgggcatgatgctttcaaacttcaccctaaagagaaaaatgctctctgaacactcttcttcctgctgtctttaaattgtgcctgtattttctctgcttttcctttgacactcaatcactcctttaaaacttgtaaaaaaccggaaaagtttctgtaactctccaatctccaactatgtcgtaaaatcccttgccagtttacccagtctgctggagaggctcaccgtttctttttcgagcgaattacacagttgtcttggcagcgtgatttgccctctggttcctgctttatcagtttggtgattctttgtacagattgataaccatgaaaaagtctaaagtagggcagttccggagcagccttttcccataaagcaagcgggtacctcacaaaactccaggcaaaagaatgaatgatagagcactcaccaatagcgagtggagaagagtattttgtcgaagtttgcaaaccaatctttgggagccagaggtgggaattttaaaatgaggtcttttccttggaattttcttaaagtggtatcgttgcctgttgatattgaagtttgtcaaagaacgtgaaatcaccagcttagaggatttttttcccctttaagagagacaaaacgtgcgaattgattctctacaaattgtgagaacttcaagagtggggtcataaagtattatcaaatataatcacttggtaacttttgtgtcaatgtggg

SEQ ID NO: 62577 - DNA, 2312 bp, Homo sapiens
ggaggtgaaggttattttaacatgattcatttttcatgatcaaatatcagatattaatcactgaaaaacagtattccccattaaaaaaaagaaatgaaaactaagaggctaacattgttttcaaaaaactgttctactgttaatcttttttcttttttggggggtgtaactcttcatatattagcagcaagtcttattatttgggctgaccattaaacaccgtatctttgtttttacacaaaatgtggatttcctcattttaagaccagcaaaaaatttctgagtgccacgaattcttaggtattccgaaactatcttagaaatacatgacatataccaaccatgctgtatacctgaatagctcttgaagaccagatttaatagataactgataatttttattataactcataccttgttttaaaaccaatgttttttatttaatataactctgctttctaggttattcgtctctatgaataattaagtcagcaactgtaaaaactacttcattataaagttaaagttccttgacaaggagcctcgcaaactcatagacaggctttccacagaacaaaaaatatcagcggttgtagtagaggattatactttaaaatcttcatttcagaaggaaatttgtcatattaatgagacactttaaaaagtgtcttttaaaaatgtttccgaactatgcttccaagtatttttaacagcataaagccctctttcatgctatttcgctgacataataattttcgtcttgaagaaatacatattgacggcctactcagtcaggctaggaagtgtcattgtatttaactctctaaattgttcctgacctttttagcaatctttactcaaaataaaccttgggtgtttgaagggcagagactaggttacgtcctcctcatctttgttatctaccagttcgtagtgaccccttaaatccggtgcttagactcactacttgctaaataacgttggcttcgttacataaacccactggcctgtttttcaacggtcagactggcgctgttagtccctgtgtcatgggattgctgtcaagggttcaacgagataatctataaacagctcttagaacgaacgctcaacgtgggatcattgttgtaatccctcaacgtgtgctctgaatgagaagccgagtgactgaatgaatgtatgaatgaaggaacaggtcagtaactggcggttcccgaagttggagccgactaaattaccccttcaagacgctaagcaaaagccactccgtcgacatcaaaccccacgccggagccggaagcaagagtagagccgcgggcggggccagcatagaggaagtagcgctctcggccaatacacagatcgcttggcaaacgagcattttcccgcgcctatcgtgaaagcgcgagaacacaggggattatcgcgaggttccgtgctcctctcccgctccctcttccccagctccctctggcgcgggttccgctccacccccggagccccgcccccgacgcccggcgctccgccccgccctcgcctggctccctgccccgccccgcccgccgtcccccgcttggcttccagcgccgcttgcgctccggagcgctggctctgctggcgctgaggtgagtagagctgtccgcctcgtcgggtgattcaagtggcgaggctctctgacccggccccccggcggggacgccccagacgtggtcctgccaaagcgtccgggtcgcggcgagtgggacagcggagccgtccgggcctcgggtggccacagctgccgggtcctcctcccactctgcggcccgcggcccctgggacccgagaaccctgataccgggtccgtgaaatccctgctgctgggctcgctgcttcccaactgtaacgatctcagtggctggctaactcgggcgaaacggcgtgtgttttgcctaagactctgccagtgtttgttaccacagctgagaaaatagccttttacaaatgcttttaatatgtagcttatagttctctaatctccagcgttaggaaattggaatgcgtattctactaaattgagtacggggaggtcagtataagggactccttcctttcaaaatactccttaatatgtgtggaattttgttgagaggtttttgatttttttgttttgtttttaataataagatagattggtgttcacctgtcagaaagctcgtgtgtaagtgcagctgtatacagctgatattaagtaatactatttgccttaactacataagaggtagtataactatacaagaggtagtttgcttaactaggtaagatgtagtcaa

SEQ ID NO: 62578 - DNA, 718 bp, Homo sapiens
tctttgctctgtctggaagtaaatagatacgtatgtcttgttcttttgtgattggcatattggcatatatgttgaatgcctacttatatttctgaaattagatttttcagttttccaacttggaaaatctatttgcagttataggaatccttttttgcaaagtcatcatcccgtgctatgaaaccatattagtactttttaaccctttaacgagaagtggtataagaaatattttgacaaggattatagcctagattttcccatgtttgttctttatgtataaagaaaaatttgtgattggattacttattaactatctgccatagcccaatggggtagactttgttcagagaattgacctttgcttataaaagttaaatttgtgggcggaccacgcggctggaggtgtgaggatccaacccgggggtgagagggtggaggtggctcttgcgatcgaaagggacttgagactcaccagccacaagctgtgaaggccctgtgggtgctggggcctctgctgcgtcctgctgaccttcgggtcggtcagagctgttgatgaagttgatgtggaaggtacagtagaagaggatctgggtaaaagtagacaaggctcaaggatggatgatgaagtagtacagagagaggaagaagctattcagttggataaattaaatgcatcacaaataagagaacttagagagaagttggaaaagtttgc

SEQ ID NO: 62579 - DNA, 1680 bp, Homo sapiens
gaaatccttctttgtgtttctccactcaaatctccttgaatgttcaaactgagctctacataaagtatgttagtatatatttgtaagaattgtgatgcataacttcgcatttctccttcatcacttagaaaaagagggcagtattttagtaccagtcattgagaaattaagccttgagtggtagtagttcatttatttttaacaacatgattaaggctattcagaagaatacttttgttaaacatttggatttttcccttttgtcttcatttaattatttcttagtattgcacaatattaggctacattgccttggtatctctaattaaaaattaaatatcttataatgatatagcttttagggagacttgcaggctaatgatgccgaggcatttctctttgctgttgtcccagacattgcccactcggtttcctaatttagtaacagaaataaaactgtgcacgactgggcaggtttggtatgccggcaccctgccaggaagcatgggtttcttaagcaaatggaccgatggggatttgaggaaaacacagattatgttacatgagctttgcactttgcaaatccctaactatttaaaggaactcggctaacccgctgatacctaaataaagtcagttttgtttaaacatacatacacacaaaatgatatattgtttccttttccaaaattaaaaattacccttcatatttgtgtttttaatttcacattttttgtcaacgtttaaaagctctctcttggttaagtaatgtatgaaaattattgttaattttgttaaattcttttatgtatttgtaatacccttccatatagcataataaaaggagttgataatgtacatatgcattgtgcttctgtgtgaggaaatgaaagaaagttctggcaggttttaaaagaagcctagttttataccttggctctggcaccagcttggctgagtgaccttggtgcctattgtctgtcctgcactgtgagtgtcatgagtgttctgtgtcacgctaacacttcaggttggtctgcagcagtttctttgctgagtgtttgagcacgggctgctttcctatccactgacatgtttccttcttgctggtgcgtcttgtctggcacatctttggtccttttcgggtccattgcctctgagtttggagaagagccttcagccctgaggattagcctgctgcttttctccttcaagccattacgtgtttcttcagcgtctgccattcattgtcagaatggggccagctgttcactctggtgatctttgtttaattgccattagactgtatgtaaacactgggggcaggtaattctgaagcatgttttcattgagagagagagtttatctcatcttttactagacttttggcagatagaaatgaagaattctaatacttgggacactgtgggttgggtagggagaacgatacagggtgcagggtccacatcatgcttaaggcagcactggctacagtgcagaacaaagtggatttaatataaactgaagttgtcaaatcccacggacttgaggaccagtaagatttcccatcccataaatgccatccaaaagtgtgaaagaaagaatactaaacatcaaaaattcttaactgaagtggtcagaacattactaatctttgaaaatagtttttagaaagatcta

SEQ ID NO: 62580 - DNA, 644 bp, Homo sapiens
ttttgaaacaattagagactcatatgctgtccatatattttgaaccaatcatttttttctttttaattttttccagctattacctggttttgtacaaattagctaatgctattttatgggtaatgaaggaggccatatagaaaggtttgaagttgactgctactctgtggccccaattttgttaagcaccaactatgataatagtcatgattaaggtaaggtatcagaaataccatcttcaggccagacatctggctcacacctggaggctgaggtaggaagatagtttgaggccaggaattccaggatatagtgagtcgtacattccagctagggcagcagagcaagaacctgtctccaaaaaaagaaaaagaaacattatcttcacctactagaagcctgtttcccactcatgaaattcttattttaaattatgaattcgtaacaaaaagcatcatacattttaaaaagttgagtaaagcatcaaattaacaacttttgtgtgctattaatggaatctgctcatgttttctagaaattttaacttaaataaaacatttagatattaatgctatattggctcaaccagtaagccttttataaagtttgttgtatctatgttgacaatatttctgaatgtaagg

SEQ ID NO: 62581 - DNA, 1251 bp, Homo sapiens
cttgttaattgctaatataatttttttaagttcttcttgtatattgcttatattagacaaatgcataattaatagattttctccgtgtgcttcctggtattgttcctaactttaagttatggtcatttgttactaaatataacctgccacacattcaaaagttatgaatatatagcaagcctcttataatatggacagttgtgtcctatactggcagaccctaagtagtgtattactaagggttataaaaaaataaacatgagttcatgtttaaatttgtagaccattactctttagagccaaaataattgctggataggttccaaagcaagtttcccaacacctggttaactcctggtgcctttgaaacatgttatgcacttggaattataggagggaacacatgctagtaagcatgcagctataatggagtgtaataagagcatggagaaatatgctggtgctgtttgagccctacaagcagtcaccccttcagacttactggatcatgatgtgaaccaaaatcaaactatttctggcccatcaaatagaccaggtaaggcatagatttggttttgccaaactgggtggatctggttgtaccttctcaaatgtgaaaatgatgtaatagttaaacaaatacacccagattccaaatttataaagtcagatcattgttaattccttcagattagttaatcttgaaaatacacttattccaaaaagactccatggtttttaagttcaaataagatctaatcgagtttctaaataattccaaaaacaaaagaacatcattcttacaagaatgcctctgagctgtcattgagtatgttactcagaggatgccaatcttgtttaaacatgaaaaaaatgttttcctttagacttgccttcagagtttgaggcatgttcttctcaatataattgatggtatcatatccttatcattttgggggtagatttgatccctagaatccatgaaaaaattctatatcaagatcttaagggaatttcaaaacaaatttcaaaaatatgaatgaacacatatcattggattggttttgctggtttatgatcttgaagggcaatatttatttgcttacgtgacttctgacatgcctgctgaaaatttagttatgttattgtatagtctaagttatgcatgttacatttatttctgtaaaactgtgtcagctatatagcagatcacacacacaaatttgaaaatgcgtaagagactggggctat

SEQ ID NO: 62582 - DNA, 2843 bp, Homo sapiens
attttacagcatattaatcacattctagtttattctttcagcaaagagataatggtgcctcctgtgttccaggcacagagctaaggcatgttactgcaaagatgggcaagacagtccctgccctttaaaaggtcatgtcctggggcagagcaagcaagagccaagtaaacagctaagttactattcaactttgtggaaagaaccaggctgctgagttagcttgggtggatggtggctagcgaggctttaacactttattgatgctgctgactcttttgtggtatttctgtatttaatttaatttctgttcttttctatcatctagtaatttctcacaatttctggtccatgatgcctgccagtattttttttactgcttttgtagattctctttcccaccttttaaaaaaatgtacactcagaaacatctcagacctacttgttcatgataaataatcattttaagtgttgctggctttcatttgctaatattttgttaaggacttttgcacttatgttcatgagggatattggtctgtagatttcttatgatgtttttgtatggttttagtatcagggtaatgttcatagaatgagttggaaagtttttcctcctgttttctgagacagtttgtgaacaattgatattatttcctccttaaatatataatagaattgaaatatttgttagaatagaaaagccatctggacctggtcttttcttatgggaggatttaaagatttaaaattacgaattcagtttgtttttttttaattttttttgagacaagagtcttgctctgtcgcctaggctggagtgcagtggcacgatctcggctcatggcaacctccaccccccgggttgaagcaattctcctgccttagcctcctgagtagctgggattacaggtgtgcaccaccacacccagctagtttttgtatttttagtagagatgagatttcaccatgttggccaggctggtctcaatcacctgacctcaagtgatccacccacctcccaaaatgctgggattataggtgtgagccactgtgccaggctactaattcagttttttaacttgtgatacatctatttagatttttattgacttcttgaatttggtaatttgtatctttttagaaatatgtttatttaaattgctaattggttgaaataaatttgttcatattatagtatgtccttttaatcgttttaatttctgtaaagttaatagtgatatttcatcttttgttcctagttttcctaattcaagtcagttttccttttctgtgtatgtatttatttgctttggttagtctagctaaaggtttgtcaattttgttgtctttttaaagaactaacttttgttttcattgacttttttttctgttgcttttctaatttctatttcattgatatctactctaatttttattattttctgcttatttttattttagtttttactttttcttttttctaaaggtggaagcttaggaaatggatttcagaactttcttttctaatataggcattcgaagctttaaatctcccactaatcatttccttggctacattctatgcattttgatatcttgtgttggttgtttctatttggcaaaaatattttcaaagtttccttctgatttattttattattatgggttatttagaagtgtgttgtttaatttccaaatacggggatttcctagatttctttctgttgttgatttctaatttagttaccttttggtcagagaacatactttgtatgatttaaattcttttaaatgtgagacttaatagtctagcatgtggtctgtcctggagaatataccatgtgcacttgaaaagaatgtgtgtattctgctgtagtgttcttcttagatgtcaaattaggtcagtttgtttgcagtgctgatcataatcctgaaagatacagtcctgaatgtgagaaccccaaatgttgaaagatcgagtttcctaaagatgagaacgcctaacatataaaattctaaaagtcacaattgtgaaagatcaaaatcctgaatgttgaaatcctgaaagccgaattctagggaaggagttttagtacattttggttttaccaggatagttgcatcatgttaggtggaactattaccttgttattgtctttatttggaaattaggtgtggtttaaggagacacatgagtgccaggttgacaaggagtggactcgtggccttaattttaggtgtcaacttgactgaattaagaaatacctagaaacttgataaagcattattttgggtgagtctgtgaggtagtttccagaggagactagcacatgagtctgagtggactaggtagggaaaatctgccctcattactggtgggcactatctagtaggccagagaggacaaatactgaaggtgaattggtctgtgtctcagagaagggacagccttttctcctgctgccttagacattaaaattccaggtttgacatcctttgggctccaggatttacaccagcagcccgccgggtcctgaggcttttgatctcaaactgagagttgcatcattggcatccttagttctgaggccttcagactgggactgagccacactgtagatatcccagcgttccagcttgcagacagtctgtcatgggacttctcatacatgaactgattcccataataaatcccttctcatatatctatatacatatcttattggttctgtctctttgaaaaactctaatacagatttggtattggggaagccaagtatcattccttcttaccattttccttttaacacaatggaacagatcagtgaaattgttctcttgca

SEQ ID NO: 62583 - DNA, 1793 bp, Homo sapiens
cagccacttgctttcccaatgcctttccctcctgttaccttctgttccagtgatatttgagtaaccatgatgccaccacatgctacagattagcagggtcccacttctctctagtaagaaagccattcgtgtactcgccagcccaacttcagaatctcacttggatgagctgcttcgttgggccacttctcataacacatactgtattcatcagggctggaaaacaaaatgcacatttggctgagactttgaagagaaattaatgaagaaggacaattggctgaagtttgggcagggtggagagcacccagaaggatactgaggcacgcagggactcacagcagtaggaagcccttaccatgcttaatccttgggcctgaagggcaaagggagctctctctggagcctggcgagaaccagaggtagcaaagggggcctgcctgataggagctccagtcccagaggtagagagggagtggggtggaaatactcaaccttccttcttcctgcccttcagccccctgctggtgcctcctgctggtgcctctcgctggcctaaccagaagctagagttgaggcaactttgctggtaaagtctacagaggtccccttcctgggccacagggaaaggcggactgtgttgggggtgaggaaatagaaaacaatcagcacagggggtcttgtggaaacaacaagagagtcttctccctctaccagaggatagcacttctggcaggaaaacaaggcatctaatagctggagctgtccagagtgggtcagaggccccctggggctcatgactcacgcacaaaggtgcccaaacctctgatatgtgggaagacctttgaactgtattattcagattctgaaatgacctctacgagcaacctatgtgtatgcgtacatttgtaggataaattccttaaaattatgttgtttaagctctgtggtatatatgtgttctggctaaattggagacattttctgttacatgatttttataatggacttcaattctgtgattgcgttgttggttctagaaagcagagttcgaaacgtaatgtggaaaaggcatttgttttttttttttttcttagtttctactttagggataatatatcttctgaacgctgctattaaaatgaacattcaaaaaataaataaataaaatgaacattcacatgtacatacttcacctgattccagtgctcagtttgaaaaggaaatttaaatttctattatgcagtttgttgaccatggctaatcctccattttaacaaagaaaaaagtttccagcagaaagaatcagagactttaatcttgaactcacagcgttcttctctccctttttccccttccaggaagacaactgttagttttgtggcttactgctgctccacccagtgtctgcagacttttgacctgctgagttgataaacactcaagaacctcaggagcgctgccagcttgacactggggaatccagccagtccagcacactcttccatcctgtcctgtccaatgcgggggcactgcagaactctctagaaatgtcatgattgagcttcagagctaaaatgccttcacccttcccccaagttggaatatatcctcccccaaattaaggacccatttgtcttctgtgtttttcctttttatgtgagtgtgtcttttacagaaaccatttagattgatgggcctccccaaatctaatttaaagcaagtttccggtccttggagaacagtgacttgatcatctagccagattcccttttgaacacacataccttcag

SEQ ID NO: 62584 - DNA, 3070 bp, Homo sapiens
gcggctttcaggatgagagggccaacaatggctcatctcctaaagacctcgataaacataatcagtagccccagaaaacacaacagctgtcccaagcctatcccctttgcacctatctcagaaaaggcaacatgcagagtggtcaggagttcaagtcctcagggccctactctgaagctgtgaccctgacaggtcactttagcgctcagcttccctttcctcatctgtaaaatgggaatagaaactgaatctgcttcatggggccttgtaagtattacataagctgtcatatgcaaaatgtccatcacatagttcaccgccccaggcatcctagaaactattaagtcacgataaggaggttgctactgtcctgggacctggggagctcggctgtccagtccgaaagggccttctcgccctcgagaccccttcaagtccctttctctccgggcccgggtcccagagtccccttgtgcttgctcctgagggtgacctgcccgtgccccggggcgagcacaggtgcggccctggccacaatgcgggcgtggcgagccgacacccggggaggccaagggcgcctcgagggagggagggaggaggctgacccgggcgtcccgaaggacccgcccggccccggactccgggcggcagccggcctcgcgccccgcccccgccccgggagccccgcccagtcccgtcgcgccgcgccgccccaccgcccgggttggctgccctggaggccacgcgcggcgatttgccacgcgccgcgtcaccgggccgctcccggcctgggctcccgggggctggtcagggaggtggcggcggctgagcggcggagcgggggcggcagggcgcgacgccgccgggccgccccgccctgggaggcgcccgggccctcatcaagtgaccagtatcccttccaggggaacacggtccttcagaggaaagcgagctccaacccgcggccccggcgccaagccgccgtcatcttcttcctgtgccaggtgatcgtctcctcacccacccggaaaaacatagtccgcccccacgtccttgtggaatagcgcccgcttccaagcaccgtgactctctttgccctacccttgtctttcccattccaattactctagaacccaccgagaggataattcagtcctgaaaagaaactgatggggagaagcgaggaagggaacccaggagggaggggaggcagggctgcggagggacaccgaggcggcggaggtagtgcgcacgcgcagcacagaacgagttccggtctggccgaggcttgtctcctaaaaatagccccggtgtggggatccgtgcgcggatgtcccggcgagtcccgggctgaaagaggcggctccgggcggcgcgaagcgctggtggcgggcccgggctgcggcgtgtgcgcgcccgccagctgctccggagatacggtgagggccgcgggcagcggggctcagtccgcgacgccggtagtgctggaggggggcggcgtctcgcttaggggaccgagtaggggttggggtggaggtgctggggcgggggacggcgcggccgagagggtcgcccggggggctccggggacccctggacgaggccgtgtccggcttggagggggccagggtcgcgttcgcgcattggcggggcgggtagggtgctgggaggcgggtagggtgctgggaggcggcgaggggtggtcgggtcggggtcggcgctgaggagctaggcgcccggggaggtgggggcggggtgccctgagggcgggccggtggggctggatggggctcggctgggcgggccgaggggagctcagtcgcgcgggctggtggcgagcagcctccccgggcgcgcaccccttggggccggggggcggtggtggacgtcgcctccttgaaagttgaaggagttctcgggagaccccggagaaggtgcgctctgagggccctttccttccccttttccctccaagcccgggggtctccccgaagggattagccccaagtgcggggggccttctgccctgttggacttgaagaagttcccccacttctgctttgggagaagattggtctaacggggtggaacgcttaggtacgaattctgtgagtgtgtagatgtcagtggcggggtcggtgtttggggcggacacctgcggttgcggacgcccgatcgtgcggggagacgtcgcggggacagaggggctgcacagggaaccgctggctgaacccctgccatccggctagatcccagctcgcagaaaatattttttgtgttagaaactttgctttttggctcgatttcatgcctttgagctgtgagggttaaagtaagtgagatagtgcaaacaagtttggaaaaggtgagcaatcctgaataagaaaacagtttttctttaaaagtgtaactatagaattgttgctcacatccgaaatagattccggagctgtgaagcgagcctcctgttatggtccagcagggaaccgtgtgtagcttgaatataacatagtgttaacctgcgttttagtttacagtgagattgggattccaataaatgccctattagaaaggcctgctgtgatgtgttaacaatagcatatgtatttttaaacaaacattgtcttaacattttttcgggtttttagcacagtatgtttcccatgtgtcttgtatcatctattactatatgaagaggaggttctctaaagctgtaattaggtgtacattacccaagagtactttccctttaagaatccagctgtgttgttttggcaactgctaagtactctagttgtcagttttagaatctgtgttaccttggcagttcttgaacagtctgtggaaaaggtaaacaaaatagttcttttttaaacatacaaaaatgacatttcttttaatatgaatttaggaagtgaggataaaaatgactgcattgtgcctttatggcttttgtatgtactgtgtgtgtgtgtgtgtgtgtgtgtgtgtgtgtgtgtatttttggagagctcagtctccatttctttttctgtaaattacaacttttgttttagggaatcaagagttt

SEQ ID NO: 62585 - DNA, 554 bp, Homo sapiens
tatgcctttaaagacaccctgtcttgcttctgggcttctttcttttatcggatttcccccctggtggtgtgggtcacacatttcttcattttcttacatttagtaagttttgattgactcctggacattcatcacactgttgtctggattttgttgatttcctctgaagagattttaattttgttttggcagactgataaatttcttgcagacgtgtatgaaccttttgagcttgcttttacactttgttctggcagatctagtgtagcctttactgtaggactaggttagcacgcggcggtgctgctgctgcattttctactgattgcccaggtttctctgggtggaacttgaacattctgcagtcttatgtaatctttgggaactttttttttattatactgcttcctgatcattgttctttgcctggccttgtgaatttcactttattcatgcacacattcaatgaaaaactatagagctgtgttgttacatgtggtatccattagccatatgtggctcttgagtgtttgaattatggttattctgaattt

SEQ ID NO: 62586 - DNA, 1141 bp, Homo sapiens
gtggaacagatgccatctacctcacagggttattgttactgttacatgagataatatatattaaggtctaacacagctactgataaatgtagaagatatttaataaatattaagttaccttcccttctgcagttcagtgaagaataacttctttttttttggagatgaggtctcactatgttgctcaggctggtcttgaacttctgagctcaagtgatccctcacctcaccgtcccaaagtgctgggatcacaggcgtgagtcaccgcgccaagcccaacaataacttataactccaaaaaattggttcttagagaatgtccaatagcctgggattgtgaaatctcatactttgacttttgctttcatttgttaagcaactatggtagcagctgaggttataggagtaaatacaacagacttgatcttctcccttggttacagtttggttgggggaaaagaaatcaaacatttaattgtataaggaagtaattacagttgaggtaaatgccataagagagaagtacagtctgttaggaaagtgcattagaaatcctaacatagtttggatgttagggaacatttccttgaggaaataatggtaatactgagacacaaaggatgggtaggactgtcagtaaggagaagggcttgggataagagctactgagagagagcaaggtggtagtatgtatgaaagccctgaaacagaaaggagttaggagctttctaagtacataacagcttgtgtcaagaagcttgctgggcaagaggaagtgtggcatggaatgaggagttccatgagtagaggagtgacaggataaggcagagccttacaggccatgttaaaggcttgggcttttaagaacagtgataagtgacatgattatattggcacgttaaaaggttgctgtaatgaaaatgaggaaattgcactggagggaaataaaagtgcctgctgagaccagttagggggctgttgcaatgcttagggtaaaggtgaacagtggctggtacagaaaaggaacaggcttggtgtgtttggtttaagaaaatgttgggttttgagatacctgtagggtatcttaagttgagtagttgagaatgtggttggatatagccagttaggctagtgaggtagc

SEQ ID NO: 62587 - DNA, 566 bp, Homo sapiens
tgatagagatgcctgtttatttcttaaaggagttcagttgttgattgtacataatcatttttattccaaaaatcatttgctagtttaaaaaaaattttaatgtgtagttgattggccagagtcatcaaaatggggtgttctgatgaactcagtgattggtgttaataaggactcagtttaaaaagtaaagtttaccccctgtttaaagtccatgctcttaaaatatttatttacttaagcaacaagtttctttaaaacagtaaacaaaattgagtttaaaagactgtgaacatttgtaatcagtattagtattaaattggtctgaatatgagtgctagattctatgatatcttttaaattaagacagtagagcccatattgggaatgtttttaaaaatctggttcctgattttttaaaaacatgacacatttttttcagttacctgagtattcagtttaaagtaattttttcctgcattcctgttgcctgaataacagatataggacttgggatttaattggagagattcttttttccctcctaggaaaagataacattagtttat

SEQ ID NO: 62588 - DNA, 881 bp, Homo sapiens
tatgatagccacacaactttcttttggtttgtgttttacatggtgtgtctttcactatgcttttactttttttctgtatccccatatttaagatgtgtcctctgtaatcatcatataattgggatttttaaaaatccacttctattatcttcttttaaaaattgaggtttagtttaatcctatttaatgtaattacttacatatttggattaaatctgtcatctctgtttgctttctatttgtctttcctttcttgccttcttttgggttatttattaatccatttttccccctcttagctgtttgtgcttttactgttcttgccatagttacccaagagattaccacatgcatccctgactttaaggtctaaagtaaatgagcattttttctacttcctaatcaatgaaaggattttaggacacttttatttcattttgctatcctcccctattatgtactattactgttatgtattgtaacatttgaaatcccacaaagtattattgtttagtcagtattcctttattcctttggagttactcagtgaaccctctcaaccctgttcattgcacttcatcttttgtgcatatccaagctgtatatagggttcttttttctttatacttgaaaagtcccttcaatatttcctgataacagactctgtttgtttgccttaaagttgcctctctattttgccttcatttcagaaggatttttttttttttttttgtcagatacaaaattttggtttggcatttccccaccagcattttgaagataccatttcactgtcttctggcttttattatttgggaaaagtcagctagctataactcttattgttgcttcttgaagttaatctttttaaatttttctgg

SEQ ID NO: 62589 - DNA, 2452 bp, Homo sapiens
ggctaatttttgtagttttagtagagacaaggtttcaccatcttggccaggctggtcttgaactcctgacgtgagccaccgtgcccagccttatttcttttctttacatgacttatgaattcatttctccttcagtctcattttcttcaaatatgtggtttttctccattgaagtcattttattcacatgaaaatatatttgcaaatgataaacatatataaaactggtatttaaaactcatgtatttattaacaaatgtttgtgttcctgttgttttataactgctagctcctgcgggaaataaaacatacagcagtttctttctgccaagaagcagaattcagtaggagatagataacatgtatcaccaggtggggtaatagtagggtgattaagatacagagttacaagtacagagttgatattctcacagttccaaatacagatcgatagcatgatgaggaaccccttttaaatactgttgcagtagcatgactatgtataagaggccagcatgagagcagaccaagttggggtaggagggtgtctttgaatactggccctagagaatttaaaataatttttctagtcttttgaaaactcaacaagtagagacaagtaatttatatttctatctgttgtgtatataatcgtctctttagagttccagacagctgctagtgtccaaatatgttttttctaaagaaatattttgtttgtgagtaccaacagtcttagtaactctcttatccctcttatgtgctgagtacagtcggaggaagaggaattggagttggtgagtgtgggtttctgcttgaaggaagttgaaaaagatgtagaaagtactaattctcttacgtgttgttatctaaccaatgttccctttgttacacaaatttttttaaacactattcaaacactttgaataaagcaatctactggtactacagactctagtttttctatttataattgtatgtgttgacccattttatttgttggagggaacattggaatagagcctttaaaaacagtagctgtccatgagcataggatacttgttaattttttttttaaggaaagatacaaaataccttatatagctctccaaattattgaaatatttttagaaaatgacttcaccctcgaagttcctcagattgtaacacacgatgttgtgttgtttctctttcaaaaagattacatcatttttggtgaggtcacctttttcagcgttggaattatttcatcctgcatgatacagcctgaaccacaagggggttccctgtttactaaaaggaatgtctgtaattgaatgtgtatataagtttacttttctatcagaaggcgctcttttcttaaaagcaactattgccctttttccaaaacaaacgttttctgttggcttttcctctagaaaataaacttgactaaaagcagcttgcagttgatctatttcttctttaggaactaaaaccaaaacctcacaggagtcatcatataatttcaaagtcagctgctaattaaaggactttaaggggaataaaaacttgaaaatgtttcttagcatggacaaaggttaagagtgcatgaaagcatgggggaggaaggcatccgttggttttaatattccatgtttatgcatgctggtgtgttttgcacagtttgttttcttttcaaagaaggttatctgttccccttaaaatacgagattgttctttatttagctttgtgatcactcacagttttgggtgtagttttgtattggccaactgaaatattctagtcagctgtaaatgttttgaattatattatgaatatcttttggagaaacactttacttaatgataccataatgatcagtaaatgagagtttataattcaagctaaaataattcaccttaggttagacctcactgttcaaggagttgtgaatgcgtccatgaattatctagcactatactgccctcttgtggttctgaaaatcactcactcttgtagaactcagtgccgttgagatgaggagcttagatgagtggaactagtgtttgaagtcttcactgcttttgaagacatgccaggagattgcatgaagatgatgccatggagtaggtagggtccaggccaaactatgtcatactgtattctttcacctagtgattggacttatgaagttccagactaaatattaaagaagaaattaagtccaaagtagatctctatctcgaaaagtcattaaatttataaacttgatgctgagactaaaatatattccgaactggcatacattgattttccacattcctcagagtacatctgtaattacagaacctcagagataaatatattaggtccttgaagactttaaaatacatacctaaaaacttataaacagccatttatattatttaaaacttaatcaattaaaaatgcagaactttatgtgccaga

SEQ ID NO: 62590 - DNA, 2811 bp, Homo sapiens
ttctcttttttgatctcacagaatacccagaggatcagtagttctcaagccactcaacctcttgctaccccagtcgtgtctgtgacaaccccaagcttgcctccgcaaggacttgtgtactcagcaatgccgactgcctacaacactggtgagcctgctctggtgccttccgtaggttttaccgctctctgttttgtgatcaacgtgtgcttctgtgattttttttaagtatatttattgaaataaactatttccagttttttagatttaaattaggatgtatttttcaatgtgctagccttgaaaaaattacaaacaaaatggatagtgtggatagtgcgatgagtaagttattccggcttctccagtgtgaactttcacttaacccctgacacaaagccacgtggatgatagcaaaatggtgacatgcatcaagccaagaggggagcagcctgttgcttgagtattgctgatgtagtttctcttcatacagtatcacgcttttccaggcttttaaaataagatgtttgtctttatgctgtgttaacctgctttgggaaagacatgaatccctttggacctgagacttcaggaggtggccgacgtttggctgtgtcgaacaggctgttttcctccctgtaaccactagcttggtccatgtcatgtgcacctgaggggcaaaacaagggctgttctgatttctcctcggagccagtcactctgcctttgaggggagcttttccttcatttatgtttatttaggcatttcatcttaaaatgccctaatttggggttgtattaggaaagtttaagaatattacagtgatcgtaggagtgcttttagccaagcagactgtatggagaatcgagggcagctggtttcatttaaatttaccaatctaagaaggagtggaaaacacatgtggtttcgctttctcatcagctgagccaaacacctgatgcttcagaggaagacggcagtagttcaattctcccttgcccattactcagagactgcaatgcagagaagttattatgattctcctgagtgtcataagtagactgtggtaaagatggtctgattttagccttcagggtaaatgctttggcacagaactttgaaactgctgtccgcagctacgtgaggggacagagcgttgataacatttgattgccacttgaattctaagaagttcttttaaaacagaatcaacaataaaaggttttattgaaaaaaaaaaagtctcttaggaaatatccattacttttccaaccgttagtatgaaaaataatgcccaaatttgtcaactgcatactatcttagggattgtgaatcatagcctgttattagtgccttgcacagaacaaggttccagagtaaagccagggatgaagcattcatagaaattctgtttcgacgcattgatcacctgctctgtgagagactgtactagggacatagctttctccaagtttattccaagtgaggaggcaggacatacctaagtgggtaaccgtggaggggaagtcctgaattgttgtgattgtgaatttatactctgagaattgagaagggagggcaaagctatactgttcaaaggtgtattggctgagaagagggagcttgaactgggtgtcagattatggtttactgaccgtttcattacaggtttttcagtatacttagaaattccactatacttatttttagaaatgccattgaattgggaatttattttttaaaagtataaaagaaattaccaaagcatataaaaatggaggcaggctctcaaaatcatcagtcgcttagcgtcagtctcatgccaccttttgaccgactttatctttcttctctttctcgtaacacttactctgtttgaagtttaccatgttgtttttaacttatttccacatctattcagcaaatatttatcaggcagctgctgtgtggcaggcactgtgccaggcactggaaatgcaggagtgcagtcagcagtgaagcctggggggaaggcacaagacacacagctctagggataagctgctgcagttgtgtcaagggctgtgtctcagctcggacaggaaggaacatgcgtgactcagccaggcagaggaggcagagtgctcttgggagagggtgtgcctgtacaaaggctaggagtttgcgggcgggacggggctgaaggaatggggacagagcgtgggtggttagaattgagactagagaggtaagtaatgatttgtagactatgtcaaggattttggaaactgtccggagagcattggggagccataaaaaacttttgaagtagaggagtgccatgaccatatttgttattttaaaaagatgtctttgctgtatatagggttaaaaggcaatgccaggaagccacatcagaggctactgtagtggtccaagcaatgggtgctgatagcatagactagagaggtggcagtagagatggtgagacctgggcaggcttgagagagagcagatagaattgctcagacctggaaattgatgttgggagtgagagggaagggaagtagcaaggataacacccatgggcttctgcacgagctgctgggtgcatgttggtgccatgtactaagagtacttaaggaggaacaggtttgcaggaaaggatgggccatgtcagatgtgtggcgtttggagtggcgtccaaatggacatggcactaggtcgtttaaaagatctagaggtcgaaggagactgtgggccggagggagcactggggaaggcgtcagtgtgacgggtccttgccccagcccatgggagtgtatagaatg

SEQ ID NO: 62591 - DNA, 2057 bp, Homo sapiens
taatcgcatacgttttgtgcagaaaacgaaccccgcccctgttcctcatccatagctgtctcccctaaacccacatctgtaaagaaacaactacttttgctctcagagtagtaagttgagatccttgcaatggcaagtaagggctgccgccagcctccgcgcactcagaatcttcaactcagaagctttgcacaataattttgtattcaatattttacacattgcaaagtatcttcactaagaaggtcagcgctaaggactcttgctcagaactgtggggctaaactgctcttactttgacacagtttaactcacagtatgtggggcaagctacggggagaactcatgcctgtcagccggagaaaagcgtccagtttgctcacgggtcactttgcattcattacatccccattgtctggtttttattttccccttgagtcaacagccaaagccgcaagacccctgttcctctctccagattgttcgcgtgagattccagaaacgaaatctcaaacacgcgggctgacaacttcagaaaaaggtggcttcggagccacaggggagcagcccgtacggggacagcctgcggccccagctcgaccccctactccccgcccacgccttcgagggtcacaggcccacaccccgctccgcgcgctcctgagcctgcccggaggcgggaggcggccggcggtcctcggggggttgagggtcacctgcaggaccacggcggcagcccggggacggggccagccttcgcgtccgagctcaggggcggcggcagcagctccaggcccgcttccctccaagtcccttctgcgaaaagatggggcacctcaacaagagctgacaggaaaatggggagcggcccggccccagggctccacggctccacgggcggggccctaacattccagagggcagaacctctgacctctgacccccaaccctagccacctggggccagcccacgacagtcgcggtcaccgcccctccagctggagcgtccccctaggagcccggggaggggcggcccgcccgcgaaccctcgagcgaggccaggtcgccgtaccgccatgagcccgcgcggctccctagccagaccgcggccccctcgtccaggccccggtacctcagcgcccaggctccgccgcgaccggcgaccggcgactcgcgacccgcgacccgcgacccgcagctgccaccgcgcctgcggattggctacgaacatcagcagggcccccctgggggcgggactggggaggcagccaatgaagtcagcgctgggcgggcactggagcgagcctggctgcgcggagagctcatcccgggaccacagggcccggggcggggctcggggcggggctcggggcggggctcgacagggttccacaccccggaagtggccctcgccccgcccacccgcctaccaggtctacccgcgcgggccctggcttgttttcgcgtctgttcggagtaataaggcacctcagctcctccctcccaaagtgcttggctttctgctgagccgcagctttctcgcccgtaaagaggcctttgaccccacttgtgggtaatgatctgtagctgtgactcggggtggattccagtagcgtggggtcccctgagccctcctgcggggaagggctgggcgcagatgggcgaggggtctttctgcggcgggatctgcgctcctgggcctttgagggccgcaccaggggaggcattgccccaccccgagaagaaaacagaaatccacgagtgtaaaacatggatgcggacaacagggaccaagaaaacttaagtcgtgtttatcaaatgtcaggtggccgaggatttcttaagatgaaaagtggtggaagaattctcacacactggccgggcgcggtggctcacgcccgtaatcccagcactttgggaggccgaggctggtggatcacgaggtcaggagttcgagaccagcctggccaagatggtgaaaccccgtctctactaaaaaaataaaaataaaaaaaaataaaaaagttagccgggcatggtggcgggcgcctgtaatc

SEQ ID NO: 62592 - DNA, 1169 bp, Homo sapiens
agatgcttgtatgcctttgataaaaatggaaatttaaaaaaattaagggaaggatagtagggaggtgggaggaagggagatgtgctttttacagctggtgcttcctgactagtaactagggggaaatgcttgggctgaagtgtacccttctgaatgctgagctccttaacagaacccaggagggagaagcctgggaaagcgtcaggccccggcccaggaggacacttcattctcgcaggtcataaaggtttcaaatgttcaaccccagaactgatattgtcatgaaggaatgaagccaaagaggtaggtttctattagggcaatctgacccagcaaagggggcttgatggaggtttctggtgctaagacagagggaactgtttaacatcccctccccggtagcccgcaccctggcacactctaagttgatgaacttggtcccacccacgggcacacggccatgactgtctggacagaggacagtgctttcatttgggtggttcacttccaggaagtgtttgtatttgatctcatgataacctagagaggccggctagatgagttttcttctcattttcagacaagggaagcaggagacaatgatgtcatagaataaactttgggatgacacaggttggggttcttggctgctgcctacttcctttgtggccttggcaagttgcttagcctctctgagcctcagtgttctctgttcctcttctatgtcaagtgattcccacttcatagactggtggccgggattacctaagacaaagtatgtaaagcctgaaatccagtacgtcataagcaccagtgggtgttctcactcctcttctagcaataagatgcttattttatatgcaaaataatgtatctgttgtcctgactcagagcatgatacccctaggtgaagtatggcatcttgacaagctaggtacttcgaactgaaggacattggaagggcctcagaagtgagacctccctgacctccttctaccctcccatctctcccaaagcaggtcgtagaaaccagaattcctcttccccaaggtgggtcatagaaactggaatccttctcccccaaagcaagccacagaacctagaaaggtcactctctcccttctcccgtgaagaccctcattccagaggggtcctggaatatatatctg

SEQ ID NO: 62593 - DNA, 1053 bp, Homo sapiens
ggtgcagcaaaccaccatggcacgtgtatacctatggaacaaacctgcacattctgcacatgtaccccagaacttaaagtatgaaaaaaaaaaaaaaaagaaatgggaaacttcaagaagaaaagggaaaaatctggtgatggaattatcaccatcaagcccaaaatcgatccctgagtttcgtggaacaaatgtacaaaggtgaacaggaaaggtcatggtgtcattagagtcaataaaaagaagccaaagagaaaaaaactaaatcacattttttctaacagttacaggaggacccatggcaaatattaggatgaggaagacagctgcacccagacactctgtgactcatgaaccaccaggctgctcccacatcagagacagccagtgtggaatgaccctggacttgctaaaccacgggcaggctggagggactgtcatacagctgtctccgaaaacctttccactgaggcccagggaaggaatgagggagtcagctcaccccagactctactgtatccatgttcacagaaagagcaatttaagctgagatgtcatttgacacacacgaggtccctgcaccctggaccttggctgggtttcattttccatatcttctaatgctcagcgggagacagaccctgctttgtgtgaggcagcgagagctgctgttgggaaactccaatcgtggcacgttggggtatggctggtcaggggacttacggggggttgtcacatttcctctgcctgaagcgggctcccgtcccacatgttcggctgcacatgctccaggcgccccacgggctccagtctccgtccacatgctccgggatgggcgtcttgctcacgcactcccccgcgcggcaccactgaaacacagcggggagggtcggggcccaggcactcagcagagctgctcactccagcccgccaggccccaaaatgccgtgctgccaaaaacccatttgctaaatttacataaaggtacagtctatttcagggtttgcacgtttgctaattttagagacatgccttacttactcaaactgacac

SEQ ID NO: 62594 - DNA, 1068 bp, Homo sapiens
cacacccagcatgttgacaaaacaaaaaattctgacaataaccggcaaggttatcacaattaaagactcccagatgttattaaagagaatataaattggtatattggccattttaggaagtaatttgacccactgagaaaggctgaaaggtgtgtagaagtcaggaagtggttatatcctgggaagtggcaggtcaccatccaggctgcatttccatgctgttgtgcccacccacctgtccctgctgacaggaatctcggtagcctcttatgtgtatgcacacatatgtacacatgcatgtgcacgtaccaccaccccacgaagggatactattatcatcctcattcacacatggggaaactgaggcaccaagagggtaagcaaatcccccaggctcatgctgcaaccaagtaggagaattcactgaacccagccagtctggctgcagatcccctgtaaccgcagcaaaggtagagaggactctgcccccagggaatgtacagcaagcctgggagacagactcacagtcaggcccgtgcataacgcattccagggaagacaggagaagcctgccaactacgattcaaagtccagggagtttccttttaaaacacaaactaacaaggctcacgtacagatgtctttaacccttgagactgcaaaagctaatatgcatgtgtgtatttcttgcaagaagctttatagctttcatctaatttccaaagggatccataacctcagaaaggttaaaaacactaaacacaggaatcccagaatgtaatcaaagacattccctaggaaaaaaaaaaccctctctgatgagccaagtcagaccaaaagatcctgggaaaattatcctccagcccttaggggttacccaagcattcctcagaaggtgataaccaaaaatgctttgtagaatgtgcttttcgttgccagatctcaactaaccgacacatagaaaacatgaggaaaggtctcacattattcaccaacaatgtcacttgtaaaagagcagccaaattgactctttattatgcctggggcgggggtggggtggagtggagt

SEQ ID NO: 62595 - DNA, 1226 bp, Homo sapiens
ctctccccaggagaaccaagactgtgcttacaagagcagagctgactcgggagtccctgttcctaacatatcctcagctcccttggccattcttgggaatgtaagccacagggagatttctctttgtgccagcagagtctgagcggggtgagaagggcaggctctggactggggtctgcatttgagtctccctctgccacttcccacctgggtgactatggcaattgtttcatctccccaagccttgtgcccccttttgtaagatgagatgaacacctacctcgtggaattgaggattaaatgaataatgagagaagaagcaatgttcagagtaaaccctgaacaaatattatctaacactgcaattagtttgaccaagtccaaattttttcttaaagtttaacagaaagtatttctcaagccaaaactctgtgccaaaaggcacaggacaatttcacaatgatcggcagtttagttgccagcgtagaggctgtgaacctctaaatgcttttatcaacatgacatttggaaagctgaagaacagcaaagagctggggactgggaaaacaccaccttcaccggcatcagaggccactctctttatctgcgctgggggccaggacaaggttggccacgacaagataccagcgtattacaacgtctggaaccgcactgtgcctccttacctttgctctccttgcctgacctggattttgcgctgactgcctttaaagacaagctcacggaaccctttttcccgatgctgacacctatcctgacacagtctgctgtctaccaagctaccgggatgctttatccagaggcctatggcgcccaccttggttaggtcctgacgttccaggcccacctaacaattcacccctgctcatcaaggggaaagagaactcttcacaaaactttttcagattttgagataggtgaattcataataattaagtaacaatattttactaagattagattcgaaacacacattgaatgcacttcttggaaacatcacatgttcttctgttttgtgaggtcagggtgccttcctgctctagacttcccatgtatttaatcaaacacaagtctaaaaataataaaattagtttcctgaagctgaaaatgctgttttgaagaggaagagttgatattaaatttataactagacaacagggacatgagacatgggtttgtgtttcagcaacatctttctgatagga

SEQ ID NO: 62596 - DNA, 1933 bp, Homo sapiens
agatggtgtttcaccatgttggtcaggctggtctcgaactcctgaccttgtgatccatccacattggtctcccaaagtgctgggattacagaagtgagcccctacacctggcctatctggctttttttggtgttgctgtcagtcttattttcagggtcctggccaatgaatctaatatgggtggagtaaaaagttaaattttcttcccctacaactccaagactactttttaattcttcagtaaaaatcactcaagattctggctctacccctcattccaccacaccctggcaggtcacctgccaaagttgttctgtaagcctgaacgtagagatagggccactgtcctcttagtccccacagggatggaagtcttcaacgctttgagacctcgaagtatttcaagggcaggatcttgtagaaacacacactagcacttctgattgttgcggtaatttctttagcaaacaaagcctcaaatctcagtgtctcaacacactttacttctcactcatgtaacatccaatgtttcaggggccatggctgccagttctgtggacaacctcagccagtcggccaacggagaaagagcccctaggtgccattcatggatgctgggccaggcctagaaatagctcgtatcacttccaccccattccaccaggcagagggcagtcacttggccctcagccctttcctaaccttgactcagctcacctaaccatgactcagcctttcctaaccatgattcagttcttgtctaaccatgactcagcccttttctatatgtcaatcaagctccctctcagcacaacagcacttgtcaggaatttctaatccaagtcgtctatgctagtaactccgaaggttgcttaaactgaagtcctaaatagtagccaggcccagattcggtctctggtagagcagcccaaaagatcgccctgacataaccttccttcccgttcctgaagcacttacgctgcatatctgtagaaattgaggttaaaaactcagagccaacctgagatttcacaagggagggtttaaggttcttcaaattaacgaactcacaaagagcacaggagcctgggggactgcctgaaacacgcaagctacaaacaaacattctccctcaaattgcagttctgactccggagggtcactcgcatcctgcccttgtggttaattccaagtgctgcaatggcttcggcatgactgaccttgctctttacaccgtgagtccagcggccgagcagtcactgggaaaacgaactcttggctcaactctaaagcggtgattttaatgccagatgcaaatgaggactgtccgttgtccaaaaacatcagtggtaacttgagtaagtctcagtgcccacatggtccaatctggccctggagtttaagccaaagatgcatagcctagcaaccaaaaaagaaacttgcaaaggcaccctaatctctactggcatgtccttaagaacatttcaaagggctctaattcactccctggtgacacttcttaacatgccccctcctctctccatcctctcccacacactgcagcctctcccatcctaggcggtacctctcctccccgtcctgcacacaccaccctcaaaccctgcactatttgtgtctcatcactcctccctcacctcccaggggagaaggcaggaggagctcctttgctgggcattgtccttctcccatcctgatcatttttcttggacaaaatctcaaagaagtgctagaaaataaaattcacaacactgctccctctgtcatcttacttctttaaaaaaattatgtaaagtatacataacataaaatgtaccattttacctattttaagtgtacggttccgtggcattaagtaccttcacactgttgtacaaccatcaccaccgtccacctacagaacttttcatcttcc

SEQ ID NO: 62597 - DNA, 662 bp, Homo sapiens
caaaggcttagggctactcactgctggggctcccccagaagctcaggttttcaacatgtgaatttcataacagtatatatttttcacacctatactgttttcttcgattttactacaattctaaacatacacgattcacaattttgattctggcaatgcaatactatatttcagcctcccgatgaacaaaggttcgcgttatggcagggaaaactggaaacacccttggcattgtgcctgtattaaccaaacactgtgtgcaaagaatggtttccatttgaaatccatgagaactcaagagcaaaccagacataactgaggacgggagagaaaggaaaatggcaggtgaaggggaaggtgagggaggggaaggtagagggggaggggaaggtagagggggaggggaaggtagagggggaggggaaggtagagggggaggggaaggtagagggggaggggaaggtagagggggaggggaaggtagagggggaggggaacgtagagggggaggggaaggtagaggggggaggggaagataagggaggggaagggaagatgagggagggaaagggagaggaggaggggacggtgaagaaggaaagggtgttttctcagcactgcatgccactttcagtgctgtctttagtcactaaaaagcaagt

SEQ ID NO: 62598 - DNA, 1051 bp, Homo sapiens
acctgtgcctccctaggccttggagagctaacctaacagggtgccgtaaagagtgacacactctgagttaacacatacccagaatactgagtaacaggtaaacgggcaggtgcgctgtggttttcacaagcttccactaatgactgtcattggctcctttcccccattccctagcacacaggtggggggaaataaatgctcacccaaggaatgcatgcagtgggtaaagggatgaataatgacacttgctcaacagccccatgtgagtgcagggcagagcttgccacaaaatgagtgttgaaacccctggattttggaactgcaggcaagagaccgtggacttgcattcctttccaacgcaagtgtccttcctggggtgctggcaagtgagaacaggagcactgaggggtgggaggctagagggcaccttagccttctcctccctccctgatctcaaccactccctcagcagagacccacagcatcatttttgatggtcattccttttcctacagggagaaaagaaccctaataaacttttacctttaattccctaaactgcaaaaatatgcttgataatgctgcacagatgccaatattcacagatgatagcaacttcaaaagtaagaagaaaaacactaatttcagaataacacatgtgctggattctgacctcaccagagaggtcaaagtgcaggtgggtgggcgtgtggccagccggggagtgctccaagctctgctcgtgaccagctgtctccagctgctgtgggaatgaagggtggctctcgccccgctgatgaggacatcgcagtcaggtcaggcctcaagccttctcctgttgtcacagacaccaggaagcattcttgaaggcaagcccagcagtttcttttgccagcaccttgctggaggtggtactgacttggaaaattttcagtctctggcttcatactatttttcttacatctctttccctttgcctcagttatccattagaaaagaaaattttatgtatttatgtaagatacctcaaatccttctggaacaagatgaa

SEQ ID NO: 62599 - DNA, 1551 bp, Homo sapiens
gtagaagcacagctcggcggggcggccgcggcgccgggccgcgcccgcctcctccacctcgaagcctcgggacaggaagcgcaggtcgcggcgcagctgaaggtacaggtcgcgcccgaaggccggcaggtgcagcagcagggcgcgctctccgggccgggcgcgcggggcggctgggggcgtgcgggggcgtcgccgccgtcggggcccgggggctgcgggcagcggcggcaggtgcacgtcgtcggggcgcacccgccacgggagcaccacctccacgtcggccgccgcgtcgccgacagctgcggggagagaggagacgcgtcagcgcggcggggcccgcccggacgcccgccctcccgctggccgccagccgcgccagcgcggggacagcgcgacccggagccggcgctgccttcccttccctcgcccggcacctccacgctggcccgcgccacccggggagggtctccggcgcagccgcgcgagcacctcccggaacggcgccgcgcatcggcgagcggagacccggcggcggcgcgcctgccacggagccacccgattcccgtactccggccgcggcccgcgcctcctccgctcgggcgccgtcagcggtcccgccgccgcccccgggccgccaggacgccgcgagaacgcagagggaaggtagccgcaggacgcggggtgaagagggctgtgggagggggcgctacctgtgcccgggtccagtccccaaaccagcagcagcagcacgggcaggacgagcggaggcagcagggcgccgtcacacatggtacccgggaccggcagcccccccggaccgtggcggcgaagcaggagcgcgctaggcggcggcgccagccggagtgaagccctccagcctttggaaaaagtaattagcgctgcggacaaacccaacgtggtaaaccccaagccccgccttcccctcggaaggcgggaggggattgggccctcgctttcctccgccccgcctcctccttccctactggttgggatgggtcgaaaccacagtgcgtagttaggttgtcagcgctttcttacacgtggtttctgggcagtggcggggacacggcaccaggtggcgcgcgggagccgaccggagccgtgggaccctggaagagctggaggatgcggggctggtcttcagagcttgtcctcattttggaactctctcagcctgctgcccagtttcccgggaaggtagggcggaaatcgccccggccaagcggtttcatccaaaactgcatataatctttacatctgaagttaggttttagttgtttgtggccgcaaagactcccagtccactttcccgcacacctgagttagcacctgaaggctatatccgcggcgtttatccaaactcttcacacctcctgtcttctttaatcccacaggagccagtgcaacacgcatgctcacaccctcttacagactgaaaaactgaggaagagagagagcttaaggaaaaacgctgaagttacccagagagttcctgttggagcagaggctagaatttgtgatcctgat

SEQ ID NO: 62600 - DNA, 2780 bp, Homo sapiens
gccttcccctacccaaatccaagatcctcctcagtcttgaaaccttcccactgtgcccttaagagctgctgctccatatcctagatctgctgcctcttctctgagcgttctgtacttacgaatggaactcctttgaaaatgtaaggtggcaacaaaattcacatttctcagcatcttttttcccctaaggatggtcacttgtcacagttctggccactgtgatagaaggagaagctactggctagagttctagcagagttcatttgaggagcttccttctgccgctgtataccccttttcactgtgtctcttcctctttgctcctgactagaatttgcatgtgattcctggaattccagcagccatctcgtaagcatgaggaagagtgccagacccctgggaagcaaaaagatcaatgaactctgggttgctgatgacatcttggagtcaccatgccagacctgagctgtctacttctgcactttttgctatatcagaaaaaaaatatactcttgtctcttttaagctgttgctatttgggttgtctgttatatgcagccaaactcgacccctaacagacacacatatagacaactcccatcccccaccctgggctctgggctcctcaatttcctccttcagtgaccttctgtgctatgctgccccaactgtccactctcaaattcacaccctacaccttgtcatcacccctagctgttccaccttccaaaacttgaacatccacctctgaccacagcttcttgtcctcccagcatgctcgtccaaatgctcctacctcagaaggtctctcagtctgcatctcccaacccaccagcctctcttcacttgcctccatatccagcttgcattccaggccccatgactctgaaaacactcttgccaatatgctcagcaccctcccctatcccttttcactgcagttgtcatgcagaactacaggcctgggtaaactcaactctctactctcactgagcatgtggttgagctctgaacaccactggagccaagcatgcaacagggaaatctgcaatcaccttcttcatttgagccatcgccatgcccaccattgctactacactcctctgcccaactcccctttctctcaatgcagtgctgatctcgaaccctccccttctcagcttcgcattcctcatcttatccctttcttttggcagtggacaagcacgcacttcacagagtcatcccctggtccagactctttgccgcggtttgaatgtttatgtccctccaaaattcatggtgaaacttacctcattgtgctggtattaagaggtggagccttttgggttaaggcccaaagtcatgagggctctgccctcatgaatggaattaatgccctcattaaagaggctcaagagggcttcttggcccttttgccctgcatctcttctgccatatgaggacacagcatttgtcctcttcagaagatgcagcaacaaggtgtcatcctggacacagagagcttaccagacactgaatctgccggcaccttgaccttggacttcccagccaccagaacaatgagaaataaatgtctattatttataaattaccaagtctaagctattttgtcatagcagcaggaatggactaaggcactcctcctcccagctccagaccatgtatccagctgttcagttgaccacttcaaagagcgagaccatggcatgtgatccagtttcaaggatggatgagaatgtttcaaatctgcttttgtttttgtttgactttgaattaagaaatcatccagtggatgatggaaggatcatgggacactgatatcatttgggtacacattgtacttgtttggttaaccctatttggataaactgttgtggtctggatttagttgcttgcagccaaggtcatctatgatctaatgtcttcagaccattcaccagagtactatttctcctgcccaagctcctgatgaggactggccagctgaaagccagggttaaatccaactccatgcatgacccaaggaacagctactccctgatgctgaacaaggccaaagccatatactgtgaacaagcacaaaacagagccaggctggcatgtgcttccgcaaattgtgaagcccaaacagctgcctctgctgcagttgatggtgacttattagcaaagaaaacattttctttttggaaaagagttttagattggcttcaatgcttggacaaaaagaggtcagccctacaaggcccatgacactgagcatagctacaatgtattgaaaacaggcatcgctgatgcccacacagccctaaaaattgcatctcagtgcccatacaatgtataagtttaggcaattcaacttcatggtgaacttttcaaggttaattggttgagaaatatcaaaaaagcatttgtaaaagtaatactttgatttttcaaagagttgatcttgaaccaatctttcaaccagtggttgaatagtgagaccagtacctgcagatgacacacctgctatctaatgatggaaccacaccatccccagaaaagaggcccattatcctgtgttctggagcagatcctacacatccaaaatggtcctgaataaaatgtgcgttatacattaggctgtgaggtgggggatggggagagtccaggacacatccccacatcattctcatcacaattatgatctgatttacagaaaacagtatctttgaagtggcattaaagtgaaacttctggatgagcaaaactggccagaggtctacatttaactaagt

SEQ ID NO: 62601 - DNA, 3633 bp, Homo sapiens
gtatctggcaaaacctcccctgagatgcaattcattggttcctggggtaaccaacctgcctccctggcagccactgactcatcctgtgacgaagaatgcctaacctcctgggaatgcagcccagcaggtctcagcctcattttgcgcagcacctgttcaagatggagtcgctctggttcgaacacctctgacagctgcccgacaatgtgaatgtacttaatgccactgaacttacaaatgattgaaatggtaattttacgttatagtacattttactacagtaaaaaatgttttaaaaaagaaatcattactctcttgctaagatcttgtttcatcttaacacacacgagatgccttgtcttcatttcgtggacaggcaaggccgaattccgtttcacagatagaggactgagatctggaggcagagggcaggaattaaaaacaagacaaacaagagccttatacaggcagtgtctttctgagtctgatccctgttgtcttgagagctgcggtgagggaaagtcgtcttcagagccctcagggtcaaagcagtttgttacccttgagatagacaaagctcctaacctctccagctttttgccgacagctcgattctgatgggcactgaccttttccgaccctgttttcaggagccgactcctggcaggttggttgtaggggccctcttgagtgcttcacacacagcagtcctgttggggtgaaggtcaccgtcactgtgataattgttgtcgtcgttgaaaccacccagcccgaaagcagcatgggctgtgcccagagccgccgtgccagaagcccacgcttagaaatagagggccgaagaccaaagaggactgcgggttcttgggccaaacgtgaccctctcaaatcccccaactcggggatttcgttagctggggactggtgtgcccgggttccaagacccctgcgtagactctgtctataggtggaagaaggcctttgccccgaggcatccagaggtaacggtgagaggaacaagggcacgtgggggatcccaccacagcctcccctgagaccctcttcacgctggttgcaggagtagccaaccccgctccctggcagcccgtgagatgccacatcccctccagcagggggcggccggcatcggtcccgtcttcctaaaccggcgttggtgggaaatgccggcaccagctccctccccgctccagagccctgttttccccatttgtatttcactactttcctgttgagcttggattccagcctcaaattccgcgatttggccggcatcctaatccccgagtgactcttgccaaccactctctgtggggcctgtgtgcttcctcctgggttctggggcgctggcggcgtccgcttcaccgggaacgggagccccagcctcccgaggccttcctgcctggctctgggaatggccactgtccagaaagccccgcggccgtccatgctcgctcgctcagtcaggcccttgtggggatattgcagaacgagtccgagttactatccctttaaatacaggcgtttcggcctagctgccgccggtccaatccgcagcgcttccgtgccccactttcccgcgtcagcctggctccggcctccaccagggggtgctagtgagatcccagccagcctcagagctgagcgtccagggccttcaaatgtccccatccttgaaaaggcaactccagtggcatcttctgcggggagaccagaagcagcatctgacgaggagacagcactggcggtcccgacacaactgaatcggcaggatgagggcccttagtgttaggcaccggcggagctgcatcccaccccgtctcgtcccctgagaacagctgtgagaagccgcctatttttcatcgttctgcaacacacctttcccttccttgggatatttctcctctttcagcattgccgcatcagggttccaaagccccgtttctctcctagttctttctttgctcaagaaaagcagcttgtctgataaactaagctatgtatgattcgctgccagtacagactgaaaaacaaaataaactcccaattcacagtcctccgttgcgtaacagtgagcagacgttctgagaaatgcatcgtcaggcaattgcatcattgtgcaaacaatatagagtgtacttacccaaacctaaacagcacagcctactacacacccaggctgtaggctgtgcttctagactacaaacctgtacagtgtggtactgaacactgtaggcaactgtaacacaatggtaagtatttgtgtatctaaacatagaaaagatacagtaaaaatatggtatgaaagattgaaactggtgcacctgcctagggcacctaccgtaagcttggagcttacgggactgaaagttgctctgggtgagtcagtaagtgagtggtgagtaaatacgaaggcctaggacattactgtacactactgtagactttaaaaccctgtacactaggcccacactcaatttatttttaaaaattttctttccttcaataatatattcactttagcttactgtaacttttctaccttaagaatttttaaattttttgactcttttaataacagcttgaatacacaaacacattgtacagctatacaaaaatattttcattcttcatatccttattctataagcttttttcctacttttgaagttgtttattttttacattttaaactttttgtcaaatattaagacacaaacacacattagcctaggcctatacagggtcaggatcatcaataccactgtcttctgctttcacatcttgtcccactggaaggtcttcaatggtaataacacacattcttagtaaatgcaaatagtcatggctcagactgatatagtaatgatagactattcaatatgtggtattggacagctgtttatatatttgtacgaacctaagttagattctgtggtggttcaaaaatatatcctctaattatgacctgcttcccttcaacaggtgtacctaattcctctgcctagaaagtgtgctggaattactgcctggcttctgatgaatagggcgtattgagagtgatgctttgtgagttctgaggctaggtcatagaaaggattgaacttattcctgaatgttgctcttggatcacttgcttttttgggaaccaccagccatgtcatgaggacactcaagcaaccctgcagagaagcacatgtgtggagaggcacttcttggaaaggaggccaacttgccagaaccaactaatttgtcatgtgagtgagtcattttggaagcagatcctctaccctcagtcaggccttccgatgatttcagcccccagcctttgagtctgccccaaacaccatgagtagagacaagcccttcccactgtgtccaccctggctgaattccagaccgttaaaaaaacaagagaaaataaattattattagtgttttgagtcactaagttttggactaatttgttatgcagcaatagctaacaactacagagtcataacacaaactaaaattaattctaaggcatgttaaagatttatatgaaagcattcatctaatggaggtgtgcaagaagtggctataaaaaatttagggcacccaaaagcaacctgtagg

SEQ ID NO: 62602 - DNA, 1284 bp, Homo sapiens
tgtacatatgttgtattctcaaattgtccactctgagtacgagcagtggggattaagaggaaaataatagtagagaacaaaatcagagcttggcatggctctctgctggcaccgtgcagggtgtgattacatcagatctgtgcaactcagatcttggggaggggttggggggtggaaggtggagggaggaagggagagaaaacagagggcgggaagaagggaaggaagtgaagaagggaatgagggacggaaagagagagacagcgaagagaggagaaaggtgagtgcattctggaaatcaccggcagctccgctccgcagaaaggccttggcctgtgccatctgagggtgaagttacgtggttatcaaattccccttccctggagcccctggcaagaagttgatgccagaaacagacggagggggtgcgaggagggagggaatcagaccttttgtttctctttttccccctaggacctggtctcatgcttctccccctcatctctcccagggcacccctccgacccccgctgcgaggggtttcccgcgggaggtggacgaagcgtgggccaggacaggcgcctggcactggggtttcagagccgcgagtaggccctgaaggccgggagggaccgccagtccccactggaagccgcttccgtgcagcccgggacaggtgcgcggcgcccctcgccttcgcctccgcttctgctcttcccctcgcggccccgcgcgcccgcgccctccgcccagaccccggtgcagcccggccaggcgcggcggcggcggcgtctccagcgagggaaggtcgtcctcacgcgctccggcctcagggcgcctctccgcccggcctcgcagccttcccgtcctgcccacggccgaggccgcggctgtcggggtggcctggacgggtgcagggctgggcgggggcggcaggacttgaaccggcgcctgctctcgcggaggcagcagcagagctcacccctttctcgggaaatggtttatcgtggataaaacgcagtccccaaagcgaaggtccgacgggcggccagacgcaccccggggaccttcaggtggacacacggggcctccgcgcgccgagccgcgagggaagaggggcggcgggagggagggagcagtgggcggccggggagcctggcagaagagtgggggcgagcagggaaggaggggcgtcgggaggcggggggaggggcggtgaggaccccagtggggtgggggcggggtggagccgagaagagccgggagagtggggaccctctggcc

SEQ ID NO: 62603 - DNA, 617 bp, Homo sapiens
cttcaaattctgagatactcattaatatgtttaattatagtaggtagtatttactgattctttactgagtaccagacattgttccaaactatataaactagttaagcctcatgccaacccttatttccattttacatatgagaaaactgaggcacagagaggtggtataacctgttcaagatcacaaaggtcgtaagtgtggagtcaggatttaaatccaggatggactctcacatgtagcaacttaaccactacactctgttgttcctctccagaaaatgccgaatacacatggtctaaagaatgcagctggcttccaggaaagggcattgacctctctggctggatttccctggatgccagccaagggtgctgtctatacacttaagaatgaggcctggaacttgagtctccatccatttcccctgcatctaggctcttcaacagcactaagtcttctgtttggaggatcccaagttcccagactagccccaaattatggttggttaaaagctgttccttccaaaccatctaagtcttccccacatgttactctggtttctgtcaatcaacacatggaacattatgcttcccaaggaaatgattgtcatgggaga

SEQ ID NO: 62604 - DNA, 1115 bp, Homo sapiens
actggtttcacagctgtctttcagtaaggaaagcccacataatgggtaccaactgtgctaagtaaaatacccagggacaggtcctggagaggctgtgttgcaatgtcaggtggttccaagctttccaaagatgggcctcacctgggagaatgcccagatctccctcccaacctcagcaaacaagagtaggatttccaggacaagacatgtgagaacccaggacctagcgacctgctaataaaaggagtttgggaatctgaatgccactttcaccactttccaactacatggcttagggtaagcgatgttttctaagccctgaattcctcacagagcctgaaagcttagaactgtggctctggagtcaggaagcccagtttgaaggtcagtcctgtcactgaatagctaacggatctaggacaagtcagtctgtaaaaatagacacaacattttatgtttattttgtaagttctagatcaggattaaataaagtacatcatgtgtctcagttacctaatgtaatgcctggcacatggcaagtgccctatatactgttggcattgacactgcagtcactatttacatttcctcattgatggcactgtgcctccaagtggtacgatggccagccagcagtccctcatttcctacaataccctgatcagggtttaggtcactctgaccaagtgttggtgggggagtggcttttctgagggatagtgtcttttgcggggtgatttcctcagtgacagcaggatttcttacctcatgaaacttgcttgggcagtgccaccaaaggaatcattttatgaaaaagagtaggaccttgatcaagaaggaatttggaacatctctctgttgcccacagataaagaggaagctgggtcacttttaggaaaggatttggggttactaaggtacactgatgaagcaagctccaaattttaatattttaaaatgtgtttcttatgtaatgtttgcaggcagggtttcctgttgtacagcctacagcccccgcaagataaagcaccccttggaaaagaacaagatgacaaagatcctagttcttggaggagggtggggtgcagtgggtgtgagcgtttacaggagaggca

SEQ ID NO: 62605 - DNA, 441 bp, Homo sapiens
gtgaaggtggacaatttggactgcctaagcatcccagcatcgtctgttctacatatcactattccaaatggcatgctgctgtgtttgtgaatccagcctcccacattgggtatgtcaccattggcctataacaactggaatgacacatcttcactagaggcaggccttggccatcctccacagcagactattgagtaacaaaataagcagtactatttatttacttcttactatgctgtttaaaaaaaaagcctctgatgaaatcctggtggcttcttctctgttcttaccaatccaggaagtgtagagagctgttgagccctgtttccaaatccccaggtgaagctgcgctgacatgccttctgtccatacagccctttccaagactcagctatttgtgatcacccccaaatgttaccctgattctattaccaatttgta

SEQ ID NO: 62606 - DNA, 2351 bp, Homo sapiens
ggctctttgtcattcagatccctgctcaaatgtcacttcctcagagacctttcctatctgtcttagtccgtttcctgttgcttataaaataattcctaaaactcggtaatttataaagaaaagtaatttattgtctagttttggaggctgggaagtctaagactgacggaccacgagacagcaccgcaaagtatcacgtggccagggggctgagcaggctcacgagttgtcaagtctctccttaaaaagccaccagttctacctccgtgataacccattaatccatgaatagatcaatccactcgtgaagacagaaccctcacggtccaaccacctcttaaagactctacctctcagtactgccacattggggattaaatttcaacatgagttttgaaggggacagatattcacaccatagcactacctatctaatacagcccatcacgtcctggtcaaaatcgattccaccattctgcttgattttcctcatataacccatccctatctgataattttgtgtttgtttccccgaaatcactatcttgttcactgttgtctccccagggactagaacagtggccagtaaacacttgctaatgaataaagtgcttaacaaacgtgtcttgatcagtctatctcgcgttttccccacgacccctctccattcattcacaggaacccgccaacgttgctatcctttcaggaaggtccttggatcgtcatcgctatcccaaagagagtccgttctcccacttcaggcgaggcattgccagcctggaagctaacggggtctcaaggaccgacagccgcgccaagaccgggcacttgcgtctgacaagcgctgaacaggggcggagaaacaaggcacccctctactcgcttcctggagcctgccgccctcccaaccttaagccctgaaccaggctctcatttggccgcactcgtgcctcccctgctgccagcacggcggccggtcccggttacctgcctgggatctggctcaggcgaactctcttcacaccgccatttgagggaacacaaatgcccgctctgggccaccgtagttcacagaaagtacaagctggcacctcctcccgcatgcgcagagaccgccttcggcgaatagtgtctcttagcaacggctttgagtccctccgccaggggcggagcctcggaagccaccacggggaagctgtaaggggaagtgagtgagaccaatcggagacgaatctctgccccgttcggcacgcctcccttaactgtcgcgaatgcaaaggcaactttacggcaggcagagggtgggggctgccgggggtaaggaggagagaaggaagcaaccaaccaaccaagtcgtccctactccctccacccccacccatcccggacctggtttacggctccaggctcaggctccactgcgggcgctgattggttgttgaaggcttggtcccatcccagtgaccccaaagtgctgaagggagggggcgggggtggcccagtgcaaagtgcatcccgaaagccccctgtccggagaccccacggctggcacttcgggccccgtatgacctgggacctcgccgtcccgagacctcctgggtccctccgtagctggaagcctccggcccggagcgcggcagccccctgctccgagccctggaccgggactgcccccccacccgagccaggacttcctccctgcctccctgcacctctgccccaaggctgcccggcggccgggatcgccacctcctgccttctcggctgttcggatgttcgccgggctggggccgtgaggcaccgaggaggatcaggaacaccagggtccggccctgcctggggtatttcttcaatggagaagttggtgagtgtagaggaggctgaaaggaggaagagaagcagcagctgaggagacaggtaaagtcctttacttcccccgaggggaagagtgctggctgggagggtaggagggaggaaaatctctgctttttcttgcctgcccttgccactctccagcccctttcctgagctcccccctccccacctctgagacactacaccactcactggtttctgtttttctaggtttgagctggctgaagaagacgcgaaagcaggaagaggtctgcccacctatcagagaagcagaaggcacagtgcctctgaccagcatcgtctgtaaaggtaatgagccagccctcccctcccccgttgtttattcctggcccctacctcattaagcagtggtttattttcagggtggttgcctgggaatgcaacctttcctaccccccccacccccacccccagtttcccaggaaaaacaaaaacattacccgtgcctgatactt

SEQ ID NO: 62607 - DNA, 1724 bp, Homo sapiens
ctttatcttaacagaaaaacgtggaagaaaggacactaaagtttgccaggcacctactcaacatgtttaagtgactggcccatttacatctttcaatgtccctcccagcaggtataataaccacggccaacaacaactggcaagagtgaagtgcttgctgtgagcaaagccctgttttaagccctgcgtgaaatcagttgctcgctcctctgaacaaacacatggcaggttcttcagtgctcttcagtttacaggagcgttaggtgacacactctgacacaggggaggtggcagtgctggaattcggcccccggccatctggctctgtctgagcgctcgaccccttcatagctctctcgtcaagtggctgagtcaggatttgaacccagatcttgctgaggttttaaattctgtcacgctgcctctcaggaataaggaacattgtctttctattgtcctcccagcctctgctggagaagtgacaggtcccagctcagaacatcaggttctgggggtgcgaatgaatggcaggtggaaagggaccggaggaggggcaggacttagtggggaaggggcttctgtgcttgtgctgccccctggcccacggcaagacccctagcttttactgtgcttgttaactcagaggctcctggaaggatcagttgccctgatgctgagaaatgggctgggcaaggcaggggcaggtccccaaacagcttcgcataccacaggcatgggcgagaggccactgaacttctctatgaagctgcagccaagcaggtggctccgtgtcccctcttcttccccatcacccctcccttgaccgtcagtgtgagagtttgttgaggcgcccgtctcccaaccagcccagaagacagaaggcctggttcgatctcacatgctggcacagagcccagcaatcagtaaatgtttgttgaaagaattaatgaaacttgagtgtttaccagacagaggccattgacccctggttggaggcccatcaatctgaccttctgtcttcgagtggggacctggttaattattctcaggagacccagtggcccttggcactgaatccctggcttcttgactgtcaatgacagggctggcctggcctgtggccactggccttaggagcaggaggccgagcagccagggctgctttcccatcgctgtctcagctgctcccgctggccttctgctcaggctggtgtctccttggccggctccctgcttctcagctcatgcctccagccttctggactctaggatcacatgtggctgcccacctcggacagggttgactagaggtgaagaggtgccatgcactccaggagaagagctgactggatcctatactcaaagaatgggccacggatccctacctgtccactgtttgttactgggctgggaagctgcaagacccgatgctgggggtaagagtctagaaacatttgagcactttgacactgacacgatgcccaacagggatccatagacttgactttctgagccactcgggcagagatcagttcagtaaggacgttcacctcagatggcagggtaggcactgggttagaagaggaggcctcagaaatgcattttccctgaaggtctcttctgccccttcctcgatgaaatcccatattgaggcggttccaggttcttattccagctccgtcacctgctagccatgtggccttgagtgagttcctgagtgcttt

SEQ ID NO: 62608 - DNA, 3280 bp, Homo sapiens
gggtatagtactcacagtgccagggtgggcaggtcagtcatgggggtgtagtactcacagtgccagggtgggcaggtcagtcatgggggtatagtactcacagtgccagggtggggaggtcagtcatgggggtgtagtactcacagtgccagggtggggagggaggtaagggttacgatgatggaggagggtgtaaagaaagggagggagaaggtgctgagggtggggatgggaggactggggagaaagtggattgcagccatggggacattgagtgggtgagctgggaggaccctgtgtggcagccacagaggggatactggagatggagaccttggatgtggggaagctactggcaacagcagggtgagaccatgggagtgttgggggcggggaggaggaggacagctcaggcgctggggaggtcaggacctggctcgccattgagagagacagtctgccatgtggtgacaagagacgaagccaatgagcagctcaagtctgccccgaaatgaaggttgatggaccacagcagcggggagaggaagccagtggccaggaggaatagagaggtgtagaagcagccgtgggacactcccagcttccaacccacccccaactttcttacaccagcaacccttcccctccttgagaggctgcaggggaagtggggccctcaggggagggggcagccaggttcccgcacaaggaagatttagagaagaggtggaggagataggagagttccagagagcctggtgacgggtttggggtggggagggaatgaatggggagtcaggtcacattaaggaacaaatgaatgagctgccagtgaatgaaccgcagcagtgccacgctggttaactgggaagaggaaatgtcagtgctgtcatgctgtacgcattccacaccattgttcattgttgctatgctggtgccagcagggcggtgggcagatgggtcttgtgtgtgtgtgtgtgtgtgtgtgtgtgtgtgtgtggcgtgatgtgcctcaccggtgtacatttcagttcttggtaatcctgttttgagtctcacagaatctatttcctcaagccgtttgtatccttatttatgtaagtgactaattctttcatgggtagagccaagctttctgtctcagttacatagagatactgagacaaattactcatgaacattccagaaaagatgagtatctacaaattattgagacagtttcaatatgtaaatagtattgttgaatacgatttctcacagttatccaagttagattggatacggtaagtgggtaattccaagctagttatcccctttacacatggcatagtgccccatcgttgggtcttcccagcctgccatgtccacgtggccgggatgctcccaggagctgctggggaaaggagggcgggctgcaggctgtgtcttgaaggctgagaatttaacgccgctgccctcgatgtgccatagcttgttggtagagcagtgtccatttgaagggaggtagctcctgaatttactttatttttgcaatacccttctgaggagctaattggccctaataaaccttgcagaacataagccctgcccaaatggggagaaccacctgctgtcaagagtcagccagctgcagtatcagcccctgaagaggacgagctagcagtgctgatgtcagggaactttccactcctcaaaccgacaggaacaggaccgtgagcacaaaacgtgaacacggaccagaacgagttggcatgcaggactaggttgccttgacgactctgagttctgacagggaaatacaatgagttttatgtggacagagttccacggtctattgcaaaatcaatgtgctgtttgaatgaatcatcacttccaaccattggtcattggtgtctgaatcttgattgcagatgaagcactgagtcatgactgtaaaatgccacagtatttatgaaaaccaagaaggttttttatttatcctgactagctaaatcaaggtaggtcatcctaataatacttgtccacacaagtggcaaccccttgccaaagaaatgcaaacagaagcctgggatgtttccagctctccttaacttccttccccgacctccctgacaccagccaatgggtcctttaagaagtgtgagagagccagtagatggtaggcccccgcttcaaactcgccatcttgtcccttgatccagtgactatacctggaatttggcctctaagcgagtgtttctttttgcacttggacttcttgagagattactcattactcaggagataacaccaaagcattctcaaaaccaatctttggaactggcttccaggattatacatgcaggattagtcatacagaaaatccttaaagatagcaaatttgggtcctttgagagtgtatttggtttgtgaaaacaaagccattggtaaccaagccaaaagcaaacatgtgattctaacccatgaattcagaatttttcaggcagctgaccctaaagacacttttttcaaacaggtgactccttttcattaattcattaatcagttgttgagatagtgaaagaaaaaagaaactgaaagaaatcatcattaccagaaatacttgggttcaaattctagctctaaaacttcttagctgtgtaactttgggcaagtcacttaacccgtctgggccatatctgaaaattttccctaagggaaaaaaaaaactaaggttattgctcttcctttttgctgcttctcctcctctgagttgaggctcctttcctgatggaacattgccttcattcccctcttctccctctacccaggggtgtattggtaaattggaactctggggaaaaaagtcacaaagccctgatctgtggcttttgccaatttctgtggtgtacatacttccaccatggctgactttaatttcccaacagttaaacaacaggttcacgaagttcttaaatatttaacagctgggccctgtggaccatgggtgctggctgcagcatgtcacactgcctctaccctctcccctttctcctttttactttcctgagagcatggtggatgtcgtctgatataatttccatccatgtctctgctttttatatttaaccagcttccaaaaatagtttccttacttccattagttcttaaccagggagtgtgctggaattcaggtggtctggtcactgcctctcatcttcccgaattcttcttggccatatcaccagcaggaattttcaaaggggacacagcgctctttgttttttaaagggctgtgcca

SEQ ID NO: 62609 - DNA, 633 bp, Homo sapiens
aaaagaggctggcctcctgcaagagactggcttcccgggctgtttgctatagataaagaggttggtttcctaggcaggtcactgtgggtcgtgggccagagttctgttttttatatattgtgtggccatcgtctgtctgtatctcaggctcgctctgaaagcagcctgtccaccaagcaccctggcgcggtgcgggcagctgcaggcggcagctcctctgatcacaggaaaggccgccttgaagggaggtcagagacttgggtttgggagtcagctttcttctccagtctgggggaggcgcctggacgcttcagcggtctcctctgtacgtggacaatcccgccgcgctcttccctgtgagccgcctcttgaggggcggcactgagcccgcgcccaccggcgccctctggaggttggagggtgacttgcaggcgctgtgcacagattgcctgtgagacgcaggtgccgatgggaacaggtagctcttctgcacccaccaccgtggcaggtgccggcggccgagaaggacatgtgcaggcctcttgggacccgggctggagcaggcacacagacgcgcatttgcattaacccttgctttattccaagcccatgtgggccctgaactcaccctcc

SEQ ID NO: 62610 - DNA, 1233 bp, Homo sapiens
gcccccgccgccgcggcctgcgcctttaagaggggaccatgcccggcgcgcgctagcggcggctcgggcgcgaggtggcggcggctcctcccgctcgcgcgcggggacgcggggccggcacgacggcgacgacggcggcggcagacgagtccgggctcccgtcccgccctgcccgcgtcctccggctggctgggctcggttcgcacggcgcctgtccccgtcctcttcgtagccggcgccgccgccgcagctgcacatcctccggcttagctcgccattgcaacaggagcccctcacgtcacgcacggcgcgttatgaagtggccccgccggcggcgagccgtggcccctctcgggatccgtccgcgccgcgcgattggcgcaaaagtgaatgaggggcggttcacgtggccgaagtttgaccaaaaaaaaaaaaagccctctcgggcgccccgcccgcgcggtctgcgactggagctggcgggcggagggggcgtgggcccccgcccggcgcccgcggggccggagctgcccgtgatccgcacctagcacccggcgcaagggcgtccccgcgaggacggccgcttcccgcaccgcggcgcccgggcgcgaatctcgggagccagccttgcagtgggggcttctcggcccccagactccacgctgcgcacgttcctcccgcacgggccgtcctcgctgcaccccacggccacgcccttcctgccgccgggccggccccgcgctcccggccccgcgctcccgaccacactgcagctttgtccgcagtcccgcggccgcacgcagggaacagccgtcccggagccctggggacgtgcgcgcctgcgagtggaccgtgaattcagttaccttgttccctgttgctagtttctacgctaaataagaagaagaagaagaaaaagccatctttaatacttaaggtccacgcttctcatacagtactagcatttaatggatctcgaagacaaggaaaatgaagttaatgccctggatggtaaaccctactttcatttacatactgtgtgggcagatagccggctagtacccccagcctgggactttgtccctactttaatatagtccgtctgtaaaagtgccgtggatttctaaagacggattttgggtcccagatcctctactctggattttaagttttatacatttcctctgcaatacttcagctaaggcagcaaaagcggaggtctccatacaacga

SEQ ID NO: 62611 - DNA, 1535 bp, Homo sapiens
tttgactccctggactcaagtgattatcccgcctcagcctcctgagcagctgggactacaggtgcgtgccgccactcccggctattttttttttttttaaatagagacagggtcttcctgtgtggcccctcttacttttactaagagactaactcttaatataaaggaggtgcaaaaccaccgctttcatttcggttatcaggcactaacccacagcagccgcagctcggtccagctgcctctgcctcaaggctcttagccgggcggaaagcttctgaaagaccacgtagagaaggatgcagctgaagacgatgtaccagccataggtggccagcagggagcccactgaaaagaaaaacagttttcaaaaaactaaaaatgacactactagttgacctttccataagactcaacaaacacaaagtgtaactcctgccctcaaagccttcatggtctaggctgaggaaaaagcctcctaagtagatcgttaaaacacgaactcaagaagtgcgacaattcagggatcactgagaagtgagacttcccaaccatctggggagtcgggggcagttagagtgtggagggcacagcaactgggttttgaagaatgaagagcaactaatctgaatcaggaaggcaaaggcctttcagagccacatagaaaggggtgacagcgcggggagtcaggagtgtgtatggggctgtgtgggacgggtcccagaggcaaacgccaacggccgagtgaccccagtaactaccacaggaagggcttggttcgcaaaaaagacttgcgcaaacaagggacagccgagccgcccagggaagtgcggctcccgagaagcctccgcgcaaggtccgggcctgctgcccaaggtccgcgtaagcgccaacgcccgaccgttcccaggcctcccaggctccggcgcccggtgcagcggcggacgacccacccatcatggctgcgcgtcgcaaaagtggcggcgcgcgcccggctgccccgcaacgactcacccgtggtgtgcaggaagcgcagcccctcggtctccagggccggccgcgcggacagagactcctcttggcgttccatgaccgccgccgccgccgccgcccagccctgccgccgcgcctccagccgggcgcttccggtgcgctcctacgcacacgtggcgcgcccggacgcggtcgtggtcccggccaatcgcaggccgaccccgccccgtcgctgggccaaacgcaggggggcgtggccgaggggcgtggcgggggagaaatcccggctacgctcgccggggccgggacagcgcgtgtgggaacgttctgtgctatctcttggcttgagtcgggggtggaggacggacctcgttcacggatttcttaccgaatttctactttcttttttttttctaattggacactgaagccaaggaagtcagtggtcgcccggaagcaggatttgcacccacatccttgcccggggcacattggacaacagggctcagttggttgacgactcccagcatttgagggttgcagcc

SEQ ID NO: 62612 - DNA, 2584 bp, Homo sapiens
cgggagaccaaggcgggcggatcacctgaggtcgggagttcgagaccagcctgaccaacatggagaaaccatgtctttactaaaaatacaaaaaattagccgggcgtggtggcgcatgcctgtattcccagctactcgggaggcttgagacacaggaatcacctgaaccggggaggcggcggttgcagtgagccgagatcacgccactgcgctccagctggggcggaaagagcgagactccatctcaacacaacacaacacaaaacagtgggatttcccaaaggtcggcaagaaatctaagcagatcccgcagcgatgctgctccgaggccataggtccccatgggaacaaatctcaggctacgacagcatggtcttatcctcagagaagttgctctatcacgtcccttttaaagccgtctcctgaaatgccaactagctagctgccctcccagtatcttaccaagtcttgctaaggttgaaatagtacaggaatctgaataattgcgagcgcttccacaacttacacacagcacccggcggtgcaagcctgggtgacacagttcaatttttaaaacgtcttcatataggggaaacgccagacaattaaagctactaagtagaaaatactggaggaaacaatcgcggttgttcggggacttagtttcctccctcacattaggaataatgaacacatatcctatctacgctcaaaatatcatctggcggcaagtattaagaaccaatcccgcgccctgcacttgcgttacaaccattaatgagccgctcttccgggccctcaaacagccagcggcgaaacagccaagcaaggcctaacagggccccacgaggacgcaccaggaagtaatgaagtcacccgtgcctgtcaagaggcacggcgctaacagaaggctcccaggagcttaaccggatgctcatctggcaacaacggcaagaatcaggcccggcgttccctgcgcagcccggtcggagcccagacaaccggcccgcgggccaagctccggccttcggtgcacgcggcaaagcgcggaaaataaggcggctcggtgccgcctggggactggccgcccacgcccccggactcaccccggaggtccagctcccggtcgcgcaccgcgttggtgtactgcgccgcctgctcgatcagctccgccgtcagcttgaccatcctgcagcctcccgttcccccgcgctgtggaaagcccgtggcctcccgccagcgagacgtcccagcgtgccccgcgccccgccgccaggcagcaccaatcgcagccgccgagtgcgcgcgcagctcgaccgccaggccgaagcaatcgaagagccacgcctccgggggcgttcttgccggaagtcgtggcgcgcgcacaggggatgtgtctcgttctgggttgtttcctagggtgtgtttcggagtctggaggacccctgattccagacgttggtgtttaaaagttaaggcgaatgtggaaacacccgaggggaactttctcatgcattagcgcacctcgaggtgggaggggaagcggtgactgtcctccctccaccagccgtcgcgggaacccgtggggttcagtgaagggtccagcagttcaggtgcccgccccgggcctgggccttggctccgggctacagtgtgagatcccgggctaggtggcccgcctggggcaggtcgccgggacaaccccaccgccccgcaagtccagcccggcctcgggcacggtagggtttgcggttaagcttgtgacctttagacttctgaatattcatatgtatgaaatgtgatatacataaaagtgtgcatatcaggaatttacagtgattaatgaccagagtgaacacagctgcgtagccgacaccgggatccaaaacaccgctattctgaaagcctccctctttcccaaaaggcaaccgcgaactcaacactacaaattcggtttgcttgcttttgctataaatagaatcatgcagtatgcttttttttttggcctagtttcatggagtctatattatgtctggagtccatccaggttgcatacagagatggtttgtttgcttttgctgctgaagagaattccattgtatatattataccataaattacttattctgctgttgatagacatcaaagttgttttcagttagggctattctgagtaatgctactatgaattttctggtacgtggttctgatgcacgtttgcatgagtttgtcctggagtgggactgctgggacatagggtatatctatcatcaataagtaatgcccaacagttatgctaagaggctgaaataatatacacactccagcggtgtgtaagggttttcatggcttccagcttcagccttcttggcattttaactctataacttcagctattctgatgggtgtgtggtggtattgcactactgctttgctttgcttttctctaataactaatgaagctgagaaccttctcatgtgtatggtgcccattctgatagcttccttggttaagtgttctttcgagtccctggctcattttttttttttccttatggagttgtctgccttttttcttattgat

SEQ ID NO: 62613 - DNA, 1568 bp, Homo sapiens
tgactcccaatttcatctccgcagctctgccgaggagggctctcccccagctctgaccaccaatcccatgtaccctgacccacgcccagcgcacacatcctgtgttacagagaagccgatggcatagtctttcctggaggagaaattacagcacagacagcaggacctcctcttctgatacctgaaatcagactgagttcaagagtggctggccctagccacctctctgcccttgctcagtagtggacgttgactctgttgcaggtgggtgaaattccctggacagccaggatgtctctcagcatcacttggaacttctcctggccaggtctgtggggaagtgctattaactaacaggtctgggtgctttgatttcatcatctctgcctccttccctgttcaaagtccttactcagaacaacaaaatacacggaagcagaaggctgggaaattctccctggagagaggacacgggcccagaaagttggggctggctcatcagttcttgtacccacaaacaagccacttactttcatcagcataaaatcctgcaggacagagggtcacacaggtgttcatctcctggtggtgatagaacccgcggcggcaagacaggcactgcgtcgcagctctgctggagcaggtctcacaccccttgtggcaccggcgacagcgtcttgctgctgtgtccccaaagtagcccaaggggcacacactcacgcacttcctgtaggagcaaaggcaggagggtgagggccttgccaacccagccccagccccaggcctgcccctttgtttcctctgaggaaacgaaggcttcaggagtgaatgtcaaacatgatgccctttgtcttggtgagtgcagttctgaggttcctacgtacacaggtggagaggctggaggccttgcatagaacctgggaatcctttcttttcaaagctggccctgctggaaggtcctgagggtgcgcatggtttcccaagggcatcgtgaggttcgtatttgacttttggaactgtcggctctggcaaaaccctctctcgggcgccctcagggagtgagtcttgtgggcagtgagtgaggccagcagggtgacagcctttgcactttggccagtgagtgcgctgtggctgggagctcgaggacgccacgagagccacatgggcacccggcttgaccttgcacggccgcacccgtgcctgagccctcatgggtgtgcaccagtggttggtgggtgcatctgtcacccaggcctttggggagcctagcagtgtcctgtcatcgtggcctctgaggcctggcacatgcggggcataatgggtgctcagggaagtttgtgaaatgagaatggacaacagggcagctgcaggactggcagggaagagaatctgagaaagtggtgatgccaggagctggagcagctccgtggacagagcccagggcctgactgcagaggccacacaggagggcacactcatcacagaagggtcagcctgaaccgggcaactggccatatacgtggggtcccaggtcagagctcctgatatcctcccttggggtaaactca

SEQ ID NO: 62614 - DNA, 4183 bp, Homo sapiens
ctgctctgagcacctcgctgggccaacatccaaccagctaaagagctcagtgagaaagctgactggtgaatttaaagaaagaaaaatcccactccccgacaagtgcccgtcactgcataatgtgcaacgtggcccttctctcactgacaggcgacgattcatgcagcacactggagccatcttgccctggatcccacagtccctcaaggagtggaaggacaggctcgagtcccagaaaccccagaactgtatgcaaaatggtgccggcatgagcatgatgtcttttttcctctggagagcgagaggccccacaacttccaacagcttttcaaaggggcctgtgattcccccaaatggctaagaaccactgaaccaagctagacagaggcagaaagcagatccaagttctccgagtgagggattggtcctgtggctgtcatcttccagcagggcaagagggccatcgtgacaagtgagagacgattacatggtttcgtgagagcccatcatggcgagatgcccaggcccacctccggcgcagcactggctcacctaggggtggggccgggaaaccccaggctgccatggcaaacacacagcgggaacccagtgagtaagcccgggcagtagaggagggggaggaggaaccagaaaataaaggacattctaactcagcctagaaagccacccccaccaccacctcccgtgtcatccaggcagctgcgagcccagctccctccccactgcctcccctgcagccataactgcaacagcgtagagaccatttcttgaattctttccattgaagttaaactacaggtgccagaagacccctgcttaacagtcatgagagagggaagtcctcgctctgccgatgacggaaatgggacagtgcgtgtgaaagctctttgggaaagtaaagctactcatttgtaagttagttcttattttgctgaaaggggacagaaggtgcccctctccccaccgcccgccacccacctccactcactgacaacagaagaggcagctggagcccagcttcacctattgttaggggctgacctgtgaacccctaaattcttatgttgaaatcttaacccggggtagctcagaacgtgactgtaatgggagataagggccttaaagaggtagttacgttaatatgaggtcatgatgcgggggaccctaatccaatctggccagtgtcccatgagaagaggagattaggacagagccactcgcagagagggacaaccacgtgaggatcaagagacctcagaagaaaccaaccctgccaacgccgtaatctcagtcttccaaccttcctaagtgtgagacaatacggttctgcggttgaagtccccgcatcctgtgggactttgttacaactgcccccgcagactaacaaactatgaggtccaacactgctcaacgtgtctgacatgcagtcactgtctgtacctctgttattttagcttcagcaatacaggatacagctttgtcaactgaaaactatatttaggatttttccataatttagccaaggtgggtcagaatttacttctaaagtatttacatagaaagaagttgcttatgttacacacaacttgcttataggagtcacatctctggaacttgagatatgcttcaggaagcattgtctactgttctctgggttgctgctggacttgtaagggagtaaaagcaaatgatatgtggccttgaccctcgataacctcctgttgcattggcaagagatgggcttgcatgctttgaactccaagttcctctctcccgaggcatccgcacagcagcgtcagtccgccttcccatcgcctctcctctggttctggaacactgaacgccctcccaagcctgacgatccaggtcccccaggaaccacctgcagctcccctgccgactctgtctgtccctgacagatcccaaacaaactgaactagtcatcgttcccaacaaacactgctgtgtgctcctactctagggccagatctagaatacaaacatacgactgctagaagagcaggccaagtccgcagcctctgagcaggcttcctggtggcagggatattggagcccagaggggaaggtggggaagagagcaacagcaggggaaggtggggagccgtctgtgcaaaagctctgcagagggaaaaagagcgaaagtcacccgaggaggatcttaaaggccagtggtggccgtatttcagaggatccctcaggagcatgggaggtgactggccggggcaaggatgcccacatgaggccagcaaggagggcagtgcagtggtgcaggcaagagatgacaggagctgggcctagggcaggagacacaggacatggcagggccaggttgtacgggaggtggaacaagtgtaggggggaaggagaggccgctggcactgcagtggaatgcggatgagcgcttccctctgagacagactagggtcagagacagtgagctgggtttgggacatactgactttggattgtctttgagatatctaagcggaagggcagagcatgtcgtgaaagaataaaatgctgtcttttaaggtaaatttacacattcaaactttttaccaattcctagcagccatgccactagaaccagctgggtggtgctgaaaatgtgaacagccaacttgtcactgtcattcgatcaccctcatgggggagcagtccaccgtccccacgtgggcaaatcctctgggccctgggcagctgcctggccctgccctcagcccatgacacagttcatcaacccctgagaccaatgtggtcacttactgtctatgtgctcttgtcaggaactttctgtttgtttgcactttgaattgctctagcacacaaaactgttagataaaattccatctgtggttaatggaaagatctgcttcaacattgcatcactgctggaaggaaacccgagctttgattaaactccgggggcaaagtcccatcctacaaaacagaatgcctcctctggtccttgcaatcattttgcaacttctaagctttaaagcactgaaatgaagcattgaacccaagcctcctacggccctagaaggagccaccaaggctccctctgaacatctttatccttccatttccatcaccaatctggctgagatctgtagggaaggaaaagagctgaacccaagtcatcatgctaaaatgtaaggtctggaagacacaggcagcaacgactaactataagccagcttggaacataatcagaacaagtaattttaaaaaaatttgtgagccctttcagtgattggtcgacgcttctgtaatatccacccttctccagacttttggcaaaagaacaagttaaaaacaaatgctttcagtttgcttaaatgacaagccttggaaaaacccagcgaccgataactgcacactgcgaacacttgggctgttcctccaaggacagggctgagtaacaaagcaatctgagcaaaatggcccttttcaaagacggtaagaaaaacatcaagtaaaggtaattaagaatgcaaggaaaatgactgtaccattccggtacaggatcagtgcgaagaagatgcctaataagtgtgcgtgcacacacgtgcttaacagagtcctgctgctgacacccccttgagttttgttttgctttcccaaatgtacattctatctgcttttatgtgacatggggtggactgtacattccatcacttatcaaagcactcctatacaatagggactggaactaattaaaataagataccgtctgcatttgatggaactttatcctaagccccataacattcatttccagtttggtcatttgaacacaatggcagcctcgcattccgaagtctctgaataatattaaatcatcttttccttttgttaataatattaattacacaactctccagatgtgaaggtatcataaaaatgctttgccaacgtagggaaacgttctgatgcactgcaataaaagataacactaaatacttccataaaacagctaatttcaccaagtgtttaattgtaatgactgggtggagtaaatattagtcagactgacagctaattgatttggtttgcattaaagctagacaaatttaaacagaggtatttcagttgcgattctgaattcataatcggttcagatgtctgtgtgctttcc

SEQ ID NO: 62615 - DNA, 5088 bp, Homo sapiens
tgttttgttgattttaaaatgctgagagatcctcactcacatgatttagttcagatggtctgattcgtagctacacctgtcttgctgtatttaaagtgaatatggaaaactcatgtctatccagaatcacattaaaatccagactccgccatttttaagaccacagacccaaaccctccagcccttaggaaagcatccggacactctgtacctgggggtccattctgaggaaggtgtgagggcctctgctactcaaggttgatcttttaaaggttttgctgtgataaaaatggtagtaatcttccaggtttccaatctgcaagacaagaagcagaatgccatcaattaatagtctcacgaacagcttccaaaatcttccaccccacaagaatctcccccttatctgaggggctcattctcccagaggaaacacaccctccatcaccctgctcctcatatctctggcatgtgtgcagtgtttataaacgtgaaggtggattcagacactcatttttagataaataacactaagtcatatttcccatggaccacatactccatcacatctcacggtaaattaacatcatttaaagtttggactatcatggccaagttttttagacagaaatgaatgttcgtttagggccaagaatccctgaagtagctaagttggtgtcaagtcaggtctacaccaaaacattcatttataaacaaaccccatcctctccaccccatgggtaaactgaaatatcgaagaatgaacactcactctccagtgcaacaggacagccaaagaaaacacatggatccatctgcttggggattgtgaaagggtcagatgagaacatctaaacctccgaggtgtcccaattttctgccaggggcagtttgtcaggacagatttcagcttgaggaccggatggaaccaacagcagccctgtgccccagcccctggccttcaagaagggctggccctcgctgtagcaccagcttgtcctcacgtctgtccgggctcgagcatggggacattgttatcggaggcctgcttcttggctgtagagaagggctagttgatcaccatcctccaaaaaggattttaaaatcaagatggactggatatcatacagaccctcaggttgatcttctcaggctaaaccatcctggtttcttttctagcttgattaaagggtaaatttaagactaatggtcctctacagcagttctatatgatgattacaaacatgggttttgagtcagatcgatttggtccaaacccttcctacccctccaccaagattagccatgtgaccttggacaaggacatttgactcatgggaatctcaattccttatgtgtaaaatggggataaaggtacttacctttaaaagttaagtaggactaaagcctacccgactcacaactccttggctgcctccacctcattcatagccatttagtctgctatagtctgacctcaatagagttgactggcccaggtggagacctggagggacttggatgctgtggccattttcatatctttacacaagaagataaggcaggagtgcaagagagagcctcccagcccctttgcttcccttcagttctcctttccggcaaccctggcagccttgctgtctcctgttcgtgggtttaggagacaccactttgtcctcgaaataaagagttcccttttctacttcagcttgctccagtgtgtttctgttgcttacaaccacagaacatcaaatacgaagacagtcatgaggaatcaatgggaatcacctatatagagcctagctgagtgtctagaacctagtgggcattcagcaaatgctggtggtcctgggagctgggattctctctcgggctcctccactcccttctctgggtctgggatgctttagcttttggccaaatccaggtctgcatctaatgtgacccttccctctgggtgacctgggcttaccctctctcagtttccttatgagactaataaccaccaccctgaagggttgctccgaaatttgaacgcgatatttacgtgtgaaagagctagcagagacccagcaggcaggtagtaagtgctcgatacacggttttccgcaattctgattctcacatttttctgccatcataaacctcattatttctgccctattttgctcacaagcacttttatttttcttcctacagataagtcaccttgctcacttcttcaacaaagttaactgccacacgtgtcaaaaggctcctcctcacccgcactagagctgttatttagctacggaggcaatcaccgagtctcaacttgccgcagtgtttaatcaacatgtttgctcataagctgccatcatccctgggagacgttacgtaacttttggtcttttaactctgggcattcgagtcaattcccagtcagggacatggaggaacgaagagttgaataaaacttgctggcaaagagactaattgcagcagtgctgacccttagcaggctcatgacaggggggcctggaagccattcagggcagcacctggcctttgaccagctaagccaggcttggggaagccacctttcccctcaaaggccagtcccaaagccatccagccccctgccccggggccgccatgactgtcctttgcaaaggcccctgggtctgggctgatgtcaactgttctccacgaacgatccaggaaaggcacagacagtccccagaatgctgaccaggccaaccacctctggaggcagcagcggccagaactccatctgtttggacacttatgtccggcctagcatgagagctggggggccggggagggacgctcccactgcaggggagaaggggacaccagccaaggctgcccttgcaaagccagctgcagaagaagctggaatcacacattcgtcctctgtgactggcttatgtcattcagcataatgtgctcatgtttcatcagtgttggaccatgtgtcagaatttccttcctttttaaggctgactaatcttccgttatctgcacatctcacattttgtttattcattcatctatttatggacacgtggattactcccactgcttggctgctgggaataatgctgctgtgtacaaatatctgctcgtgtccctgctttcaattcttttgggtatatatccacctaccgttttttgataaattttcttggaacatagccacacccaccctttccctactgttcatggctgccttcctactacaatagcagagctgagtggttgcaacagagaccctagagcccacgaggatcaaagagttcatatgtgaactctgaaacagaaaaggctgccagcctgtgatgtacagcatttgctgctgagagtatcaggggagttcaccaaagtctctgatgtcaagcaagggttctctagggctgggaagtggcggtccatacacggagtgactcaaacacaggtgcggctgcaagcctagaccttcagcatctcattgagtctctgagacgtgctttttccataaaccttgtcagatgctccaagaggccccgtccttctgtctgactcatgtggtcctgccctctgccctccctttgcaacatcaggcaccaggtcaggagtgtgaggttttcatcacgggcaaaaccagtgagagaatcaaaggtgacacagcaggaggcaggagcagctgcccaggaacacaggcccattgaaagtctcgtcggcccggatgatgctgcgtttatgatacagccattgctgtctctcgtcctccccacccacctaagcccttctaggcttctcatctgacctaccacagcagggtccaccccaggtacgaggaggttctgcccctccccagtgagggaggctgttccttcacatctctgggtgccttcatggggaagggggacaggatgccaggctgtgaggcccccaggctcacgcagggtcacctgtggggatgtggccactggcctggttgaacatgaaggacacctggctgccctctggccctgactcacagattagggtgtgacaaggacccacagagatgtccccatttcacagatgagtatactgaggcccagggaggttaagactatgtcacactgtggggctcccagttcctaaaccagcagcctccccattctgctcacagacaagcaggtgacaaaatttgatactaaatgacatacagatacacgagtagggtttaagatgactgccacacttttaggacctcttcagggtcaaatggacagcggtggactcaggaagggggcggcctaaagacaaaattccaaataatcttccaggtaaagtgaggttctttttttatgtggcatttgccctgatggcaggtgttcctccctgctcagcagcctggacgtcctgggtggctgctgcttggctgtggcctcggacggtgtccacaccaggcgctggctctgctcccgtgctcacagctcatcgactacgcaccgcttctccagccggtgcctgagcagcccgcctttagaatcaggagcggtggcttccacggactgccgctatcggagggccctggcagcctcctcctccttccctcgattatagaagggaggcgctgcctccaccatcccaggctgcgtcccagtcctgctcagccccgtgtcctcccctgacctccatctgctcttcatcaatgaatctgactgctagtccacaaggcattgtctttgtaatgtcataacatgaaatttaaatacgttcttgttctctttggtgcccgtggtatcttcacaatgaattaattagagcccgtctcatgcaccattcaagaaaataaacaatttgctgaatacagggtgctcatgtttctttactcaacgttgataggcgattatatgcattacttgatcaaactgataacatcattagaacatcattacaaaccttgctaaatgttcttgaccagaacactggaaggaatgagatcaaagaactcacagtgaagagagtttaatgtagtgtaatcctctttaacaagatgctctgacatttaaaaaaatataggtaatatgtgcacatgatacaaaacatggaaggtac

SEQ ID NO: 62616 - DNA, 1832 bp, Homo sapiens
ggccctgccctcacacaccgtttcacacccctgtgctcgctcaagtcccctcaactcctactctgcttttaaccatcccctcggctgtcactgactccaggaagccctctcaggcctcccaggccctgtatgcccagacatggctatgacaccctttgtcctccctccctccaccataagccttcaagggcaggagctatgttgtctgtcaattctcagggcctggctgtgtctggaacacagaggagcttgaaatctgcctgatgaaatgaacagacttctgtctccaaatgacattgggaggatacacaggtctccccccatcccatctgtgtccagctgtccagtgaggccccgcatccagaggtggggtgagcatgcccccagtgccttctggcccgggctctgctgtcctgtctttgagctctctctcagtccccgtcccaggacagctgtgaggtcgggaggaggctatggagccaggcagaccacctcccggctgtatggtctgggcaagacccccactggcctctctggtctgaggacttgaggcaggcaaggcctggccgggcactcccttccactggccagtgcccttcattcatggcacgcaccagccatgagaagaactctcgggcgcaggtgtggacaagcagaagcggcttgcagggccacacaagggaggggtaggaaccctcacgaggggaaaggcctggcttggggtttacagaaagggcctcccccatcatgtcgtttctttaaatgtgaatgtagctggcttcaaacaaaatctcagtgggcgctgccagctcgggttcactctgccagaaaagactaaatgttttttgaagatcctgaggaatggaggaggaaagcccaatctactttacatgtttaatttgcagcaaagtcaccgagaagcacgccgaatctaccccaaatgacatcaaatagttccaaaggtccacccgcccactcagctctccaatggacgtgactgcagacacaggtgcagttcgtagccctcgagcaggctgcgttgttggtgggggtgggtcggctaagcgcatactttggtaagtctgcaaaatccccaccccacctccccaggccagcccagccaaacccttccacacgggaacagctgataagcagccacagaatgtctcaattcaaggcctcagtgatgaatggactgcagatgaggcttctgactttgcaaaaaaaaactgtactttatcactcccaaagcctgcccttggctggaaacagatgttccaaaccccgtccgctccgcagctgcagcgtgcctgcttccggagccgcttgtctgtcttcagggccggcatctgccgagggccttggctttctgggaagagtctatgtctaaaagtcatggtcgtccgagttcagttatataatgttattgatcccggttggtttgcttaagaaaaacacaactaattagactctataaaaacctacacaccaaattaattctgtattgctctagtgacttccgcctgaaaaaaacgttataaatatagatgaccactggacctatatttagccagcactggattacctggtatttataattaaggaagtccagaaagagagagagagaatggacattttgttgttatttcttaaagcattttttaaaaactgcttcccatttcagtcacatatacacatagcaacattctgttattgcaataattacaatcctgacccaagttaagatgattgcacaatttcccagtctcctaaaattactttcttcaacacatatccacccaaactatgcaattaagctgttcaacatccta

SEQ ID NO: 62617 - DNA, 2234 bp, Homo sapiens
cgggtatggtggcgtgcacctgtaatcccagctatttgggaggctgaggcaggagaatcgcttgaacccaggaggcggaggttgcagtgagccaagatcacaccactgcagtccagcctgggcaacagagtgagactccatctcaaaaaatgaatgaatgaatgaatgaatgaatgaatgaataaataaataaataaaagggtacagagtttcagtctgagaaaataaaaaagttctggagatggacagtggtgatggttgcataacaacgtgaaaatactaaatgccccaaactatacacttacaaacaggtaagatgatatattttctattatgtgtatttgaccacagcaaacaaacaaacaaacaaaaaactctcctctgcattctgtccccacctttcccacctctcttgtgtcactcaggatgctgggactatggctccagtgtaccagcagcatctggaggcctgagagggagaaggcatagccgaccccaaggcacagccaagcacggcagtgctgcccagctgttattattaacagctcttagctccggaaagcgcttcccatccttggcccctctctattgtgtggtttcccttaaagggaacaaggacacaggaaggaggtggcaatcatctcagggacggccagagtcacctgaccgggactgacagtcatgggtggtgagagtgtcagccaaacaccatgcaagctcagcttccttttatcctggagcctatcccaaatgatggcttcaaaggcctgctgaccaggtggcacagtgaccaagctcctatgctgctggccttgtgacagcttgccctgctgaggtcggcagctcccagtgcatgaagatacagaaagctttcatccagctgcatcaatgccccaactcaatcacaccaattaaaaccaggcacagagaaacatgcactgtcattctgcttctgtgactcaaccccacgctggtaattaaaaatgaagaagctactgatgaggcagctgtcatgacttcaccaaaatacaactgagggacatcctttcccggttgcaaagcatatcttggcttgtaaactaaaaatagactttgtgcaattttcatatggctctttaaaaatggcatttgggatttctccggcaagctgtatgctaagaagtcaggggaccaggtcccagcccatctctgcacccttgctggccacagtttctactctatcggggaggcactacattgccttttctctccatcccatttgcactaacatctgtggcttatggaatatttgccaataaatgatttcaacagaacttgcatactcaaagtaaaacttcagcagcactaatttacagatgagaagtaattgcttggaaggagggtaagagaagacagatcatcctactccagggatggaaggacggatggtcccctccacgtgctgattcacgtaacagcagcttatcaacagggacttggtgaagacccacccacagtgacgagactctgtgcagtcaccgtctgtgcgtttatcaatagtgacgcccaccctgactcctgggctgctccaaccgttccttcctcttctgtctggaacccttgtccttgttttctcaagccactgcaggtctccagaggcgtctgtccattccctcattccttccctcaacaaatatctgggcagctgctcgagccaggtattttagacatgagggacccagaagggcccacatgggcccagggcctggatccaggggagaggctgacaggagcgagcatgacacagcaagatgaaggaggcacataggaaaccgctttgcctaccgggctctcagagggcataacaaggaacggcaatctgccagatgcacccctggataaaaacagggacccacattcttagaagctggagtcctagcagtggagggaacatcttctctactcgtctttcgaggcaagatggagccggggagagaaagggggaatacacaaggtgagggtcaaagggaggcaaggaggtagcaatgaagggaccccaggccttgccttgcatgaccaaggacactccagagggagtatcaagatctcagcttgggctgggcacagtggctcatgcctgtaatcccagcactttgggaggccaagcagatcacctggggtcgggatttcgagactagcctggccaacatggtgaaaccccgtctctaccaaaaatataaaaaattagctgggtg

SEQ ID NO: 62618 - DNA, 517 bp, Homo sapiens
atgctaccctctatgcaactgtgggtccccctccagcctcttctctcctcttgggatctggttctactgtgttccacttgcctcccagcaggcaggaaacacagggttctggtaggcagaaaggagggtatccaagaaaggttccctgaccttcagactcttagactctacatcaagaatgttgccttcattcctgcatagataagcctttgaactgagctccaggccagagccctgataaggaggggaggatcccatagtacaggaggacttcttcacaggtcccttctgccccaaccctccatctgcctggactgcacccctctgccctagccacttagaaagccccaagccaagctccgtggcggctcacatgccacctgctccttgtagcctttcctaatagacacagactctgtctatgaggaaggcctggaatgcaagttgcccaggttgaaagccttgctctgacccttactactatagcaggttactcagcctctgtgggtctcagttt

SEQ ID NO: 62619 - DNA, 2602 bp, Homo sapiens
acatgtgcgtatatgtatgtgtgtatatgtgtatatatgtaacattttatatatatatatgcatatatttaaaaggtctccaaagatgtgctagcattctttcagtaaactcgaacctgccttgtgaagattccttcattcgaatggtggaatccacccctccagccacacacctaatagtacatcaacgtggggcttgggatgcagaactaatgtcatttctatcaatcagggacgccaccacaccttgctggcttctgccacggataacgatgaaactacatttaacactgcctggcactaaggtttagagttatgagtcggtgcttccctgtcacttcacttaaccctctgagtgtgtagtttgtagatttgttaactgcactgagaggtcccctggtgtgacctcaaaataacggcctctccaggagccataaacatggatcaaccccaactcaccgcccctcagcccggtagctggttgagagaggaaaaagggacccgccgggaggtcctttgagggtaatgccgcctttgtgcccagggcgtggcctgcttgctcactgacagaagaggggacagccgagggctgcggggctgggagggccccgtgggggccggtgagggtcaggccccggtccaggctctgtggcaacgcagcattagatctttccgacaacccagcggtgtagacattgccactgactgcaaaggagcttgtcaggggagcgacttgccaaaggtcacaccgctcggccatcagaaccgcggcagaagcccccacacaaagcgccctccctccgctcctggagaggttttaaacccaggacccccggccctgcgctgtcccaaggcctctccgacggcggccgggctccagggtgcaggctcccggccatctacccccgggagccgcggacaccgagggagcgcgagtccccgagacgccgggccacgctcatgtcacccaagcagcggccgcggccgccttggcgcgcgcaccgggtccggagctcgcgccgcccgtcgagggcagaggggccgctcccccgcgggggagagccgggtgggcgcccaggacccagcggcggacggcgcgcgacgcctgaggcagcccagactcccccggagcccggcaggtgtccgcgccgccccggcttctgaggccacacttccgagcgcggggttgggcggcactgccgggggacttgcggtcggcgcgccggacctgcgtgggcgcccacgcgggaccccagtcccccccaccccgccgagtgtcccgcgcgcgcccccccgggcgacacccccccccgcagggcgccccggccgcccgccgtccccaagcggtcccggagccttcccacgcgcgcgcggggccggggccgggcggacaggactgcggaggcgcccccctcgcgcgcgccggaggccgccgggaaagttttgggcgcgcggggccggccgcactcacctggcccaagttgaggtacccgtgcgccgccgccacgcggtccgcctcggccgggccgcccagcacttgcaccgcccagtggttggtgtagacggggcgcggcgggggcggagcaggcggcaggcagcgccagcagcagcagccagcgccagggacgcggcgcgagcggccggaacccgggcccgccggcgccccccgcgccccccgcgccccccgcgcccgcggcggtgtcggtggcggcggcggcccggggcggcggccggggcccgggcgcaggcggcgcgcgcggaggcatagcggcgacaggctcgcgcggcgcccgagctgcgagtgcgccggggggtggagtgccgccttttaaagccgctccgcgccggggaagcgccgccgccgccgccaccgccgccgccaacaccgccgcgggcgggagccggggaggaggaggcggccgcggcgcgttcccgcccccgggcccgcgctcctgcgaccgggctccggggccgagagccgtccgggaggcccgaaacgccccccaccgggggaacttccccgccgacttctggggctctcgggacgcggtgccgccccagaggcgtcctcggcccgcgagttctgctgggagcggggaggccccggcgtctcaggtgagtccccggttccctagaccggccggacacccgaaggccgcactcacctggcgggggcctcagacgcctggcggcctcgcccgcctccctagacggagggctcgcccgtgtgcggggtcccagggagaagaagctgcggggaagacagtgggtcgcccgggaccaagcctggctgaagggacacattgagcggggcaaaggcatgtggcgcatcagccgggctcacgagcgtgtacccgagaaaccaccgcacggagcccatggcggaggccgcggcccatgctgggaggcaggccgtgcaggtgaacccccaggccgcgcaggtgaacccccaggccgcgcaggtgaacccccaggccgtgcaggtgaacccccaggccgcgcaggtgaacccccaggccgtgcaggtgaacccccaggccgtccgcttagcctcgctgcgatcttgggcaaatgactgtggtggctgagggcaggcgcccca

SEQ ID NO: 62620 - DNA, 2134 bp, Homo sapiens
ggtccactcaaaaggtgatcctgaagaaattatgctagaatcagcagagtgggcctcggctgagtgtggaatccagcccactacttgctggctgtgtgaccctggaccaggcacctaccctcctatgcttccgttttctctgctgcagaagaggctgccaatgatgccttcccttagggagtgagccaggccgtaattcaaggctaggcagcacctggcagctggcatgctggcagcagacctcctgacacacgtgcccttggtttggcagatgctggcaagggttgtggtgacagcggacacgtgaaccacgacagctggaagggaacagtggaggggagggcactatgctgagtcacatttagacctcactaaaaccgaagtggttcctgttaacttgctttggtctatgtggtggatttagggcttccaaaaatcctcttaaggctttttatatcctcctcactatttatagtctaaactcccccaaatccccaacccagacaaaatcattcctgctatgttttctttcgatgccaagctcaccagcagcagagaacatagctgcatgacatggggcccgataggctgctcatgcctgtgcccctccctccaggagtgagacttgggaaatcctttaccctctgcaggttctgtgtttatcctttgcagggtcacctgccacaatgtccaactcctgccacccacaggaactccagcaatgctactgattcccaccatccaatattgtgatttttcaaaggttgaaaatttgataagcaaacaacacatatgtggcccaaataattttgcatctgggtcttttcatctggactgaggccaatgcccttattcttcttccttctccttcggagccctttctccctccatcctgtaaaagtaatctttcattagaaatcagcaaagtggaacagtatactccctcctgagcatgtaccagtcacaggtcacaggtgatcaccactgtcaagaagaaagtctaattcagtcctcacctttgatagacgggaagtctggaaccttcttagtcacggcctctcaggcagaagataacagaagacttgccacagtgcatggcagggccacaagacagcaggaggggaagtgacactcaagtcctgtctcctggaataggcaggggatggtccaagtgaagtgggattgctcaggcaggaggagaagaggcagaggggcactgtggctagggaagaggctccagccctgaccacctgggttctcatcccagctcggccacctcccagctgcctgacctcagatgagtccattgacctctctgggcctcagttttcccagctgagcataaaatgggcatatttgtgtccaccttaaatgaattagtgtacagtgcctggacctgggcctggcactcagacagcattatgtgagagctgttctcatcaggccagaggtttagcaatacctcattgctacttgtaaacatgcctggttctggaagtgtctgtgtgggtgtgtctgagttaacacagacatgccccaggctggccaaccccacaggccggacttgtatctcccccagcagagacccccaggccagcctctcctctccctccacagcccagacctagaaggactgcacagcctggggacctcagctccttcccctacgtgcctggtgaaaggagggaaacaggcagtgaagaaagaaggagcagaggaggagacaaaaactcacctctcctgaaccctctgtaaggcttttgcatgcattcgtgtctgagctcctaaagtccgtgtcctgttttacaaacaagaaagccccgatcctccgagggagccagggctttgcctgaggtcttgtcaggtgaacagttagggttctggaatgggtggctgtgaaggcacaaggcaaaggcagagggaggagcctgggcagccacccggccccatctcttcctgccacgccgtgagggcatcctcagataaggacccaggcacaagaaccttgacgggaggggagaaggacaccccggctggcccatccccacgggtcggtagaaacaggagacaggcccgaggactccctggtgaccagggaccatctgtggcatccccctccaggactgtgccccgg

SEQ ID NO: 62621 - DNA, 2511 bp, Homo sapiens
aaccactacgtctttttccctgtttttattttaaaaaggatattaaacgaacatatcttttaaaaattaaagtgaattgaagttcattttcattttatcctgagaggttcacagtagctcttgaaataaatgaaagtgactttaaacgggctttgttttgaggtgatctcagcagctctgaggatacgcacagcagtcttggagtctcacaaaactcggctggaaatctctggccccagagggaggaagatgcttctctatttctacctgaggccttccttaggctcctggtcaggaagggagaagagaccccgggcaaggggtgagaagtgggggtgggggagtcttgccccttcctctggacgacagagcccattactagagggaatttcaatggtgtttccaaccccaggtctcacccaggaaggaggaatctaaacaaactcagctgccagtggctcccccatagcgacagtttgaggccggattcactgaagttttcacagatgagtctaggtaaagttgtgggggtttttgctgttgttttgttttgttttgtttctttgagacagggtctcagtctgtcgcccaggctggagtgcagttgagtgatcttggctcactgcagactccaactcctggattcaagtgattctcctgcctcagccacccaaggtgtgagccaccatgcccagctaatttttgtatttttagtagagacagggttttgccatgttgcccaggctggccttgaactcctgagcacaagcgatccgcccacctcagcctcacaaagtgctgggattacaggcatgagccaccgtgcccagccaaagttgtggttttaagcaggatgttccaaagtccagtggttatgaccaaacgccacacagagacagaagcctcccgcacagccccaactcccagcagccatggtgttccaggtcctccaaagtcagcttctcctccaggaggccactgagctccccagctgcggggctgaggccacacagccctgtgcggttcatctgccatccgggcccttcttcctcttctgagcttcacagttagcccagggaagaaaacaggcgtgtcttccacaaaccctgaagggaatgggaagtgccaacagtgagaaggacttagatgtaaaggatttacacacggtcacggcatttccacaaccctctgggcacctgagtacacgtgtgcagacacacccccagatgggggcgaggggtggggtgccccagctattcacacctaaccatgagcgtgtgaggcagcaacacttaaaggccacttgctttccgcagcatctcgatggagcaggagcctgcctggggcatctccaggcagcttggctgagcacccaggactgagtgcaaccctcagcgtttacattttttagtactattcactaagagagagagagacagagagacagtgatagagacagggaaggacagagacaaagagagcaatgggtgaagaaagagcaagcaagcagggatgtcggacatttcacacaacgcagtcaccagggaggcaagaacacttacagaacagtttgagccaaagagtcactcagggacaggaacagcaatttcttaaatatttaaagcagacaccctgtgagcggctgtggaggcggctctttgttaatatttaacacgagctgggcagttgccgggaaaacagctgtttacaggagagattaaccaatattcatcattgctcaaagctgtggggaggcttcaggggacaggcagctgccggtatttctagaatacagcagctcaaggccacagggctggggaggctcacggtgtccccagggtgcatgaaaactgtaaacaggcagttcggggtcacctaccctgctccagaatcacggtttgcaggaaacccagccctgcagctgggcctgggtggtggctgctggccggccagccagcacctcgctggacagctgcgtcccacagtcccaggctgggctgtccttcaggcccatccacagtcccaggcagactcctcgtgcactccctgcatgaagtcgggggcaggtgctcgaaagtagaggggttcccactgatggaaagtgtcaccagcctgcctgcgaatcccccagctcacacttgggcttgcagggacaccagccaggccgtcttgcagagaagacaagctgcctattttcaggggctatgagtcttgttcatgacagttttctcctctatgtgccaaacattcaagagcctggccattttcacacagccccatagcctgggtgaatcaggcctcactcccctgtacttccttccaaacattctatcactcccaacaccctccacccaggcctcatggaactacacacagatcacgcttgggcccaactggatgcggaatcccagctcaggaccaaggaatgctgctgctgtctccacaatgccctagacctgcaaccctgggcgcttcctggcataccactgcccactctgcccacaccacagc

SEQ ID NO: 62622 - DNA, 1819 bp, Homo sapiens
tcccaggcatggcagcatggcggtacctctctggggctgtcccttgtgcatgcactcttactccagcagtctctggtccctctacctttctctagtggccctcgggctgagaaaccatgagagtgtgtccaaagcaggcagcggccttaaagaaatgccagcccacctcctccccacctagtgtccaaaagagctgcatgttggaagcaggggtctgtgcagccctcccctctcccctggtacaccctacttggggagcagatttgcctgggcaggtctgcacggggtctgctccctggcccagcagtcactggtgagacacccagccctggcatcctctgttcctaattcccatgaaggtgccttttgtggctgcacctacttgcataaggactgaggcatcggccaggaaaagacgtcaggcttggccagctccatctagcaagacactccaggtcaccggggaaagggcttttcactaaagcctccagggagactttggaacatgagcagcacagcttggagacgagccagcagagcacgtgacagcgaggaggcagccgtgcacgtcgtcacccaagccccaggccacagcatccacgggagagactttcctgcagcactgcgtgttgggggtagggaagagaacaaacttaatcctgggctgttacgggaagccctgacgagccccaggaatatcagggactgcaggaagggttccagtgtcactggggaacccggattcccacaaatgccttgcttcccacaacccggcctcctggtcccacatgcctcacctgttgttccagcctctgcacctgctcacatctctggggagtcacccgatggggctccccagtccccgcagcagcattttcctctgactctcagggccctgctctgccttctgtgctcagcagttgtttcggattgggagtcaggaggccattcccacacttgaaacaaggctgcaagaggaggctgagcagaaaccgcacaccccgagggcaaggcgacatgctcattgcccttgcgcccttcctccttccccaggagcaggacttctggccgctctgagtgcacgggtgacggctgccgtttatcagccttcaaatttgtgcccgaatcacctgcttccaactcctcaaatacagactggcttagctcagcctgattaagaccaaattaggaagggcagctgtgttccaccagagcccagggagccaggcagagggcaggaggatcaggccaccaaaggtcacctacacacaagcccgtaccggtgatgtcatcgtggatggaggagatgggctggcattttttaaggctggccccctgcctgggacacactctacatgtttctaagcctatgggccactggggagagctggaaggagccaggcacagccacagggaggtgccaccatgcttgggaaacacctcgtgggtctgggctgcaaatgaccatccacagtcccagccctggcaaaggggtagctcatggtccttatggggtcccgacacccaggcaccaggacacgctcttccacggatgcaggttagataagaaaccaccttcaggactctcctacacatctcttcacacctgtgcacaaaggaatcagcaaaagatcccctcccagcctgctgtgaccgcaaaattccatacccaagaccagggctgcttaaataatttgagctctgcaatggaaacctacaaagccactaaaagcagcagagaacgctggtgagcagctgtgagtggcagctgagattcattacagttccacagtcggactcgggaaaatgcttccgtgtg

SEQ ID NO: 62623 - DNA, 1116 bp, Homo sapiens
ggggtggctgagctcttctgcaagacctgtgtccgggcttccctccaccacagctcagaccctcccaggggcccatgtccatgtcggtagaatgcatgagggacgcccaagcccattcggtcccagatgcctccttcgaggcagggccgtgtgtgtgtcatcagcatcacacactcacacacactcacccgcaggcaaagcccctccctgagcccaggaaggctccaaaaggggcgtggtcacagcctcctgcgccttcaggggcgggaacccagaggaagagcagcccacgtgcggactccgcaggaatgaatggacacagttgggaggagaggggagtttcttggaagtaaattccccctgacattgagataactggttcagggtcccatccacagagtacgtgcctgttagcagggcaggaggccagagggcggggcctcgggaaagctgcccaagctcagcagggactccactgctcacagagcaagcagcccgacttgttcagcttggaatctgggctgggaccgctggggtcagcaaagaagatctaggagacatcccataaaatatcagactatcaggatccaatataatacgtgtgatattgagctcattgcacagaagctacaagtaaacattgggtttaggccactcagggaaaaatgacggagcctcatttccataaggagctggcctcatttgaaagctttccaccccacctctcgcctcacctcccccgcgctcctttcttgcttcataaactttcaccactgccatcgaccaaaaagcaaacagagacttggaaaccccgtgtacaacacgtacactgcgctctcgttgatcactattgggtaaactaaaatgtagcttaccacccaggggaggcgtgatgtgtgggtgtgtgtgtgcacgtgtgagtgtgactgcgggtgagtgtgtgagtgtgtgatgctgatcacacaggataaggcatagtcctttatcctgggtctgagaagatgcatggtttgtagaaacagacaaatctgtgaactgcaggatgaatggccctggctgctgtgagcccatcaccctctgatcacacatcataaagagaccttgaggaaggagtga

SEQ ID NO: 62624 - DNA, 2568 bp, Homo sapiens
aagtgcactgctgttttttacatccaaataagaatcagtaaaatatctctgccagtttcaattcactgaagtaatgtcactttaaagtgatgaaattatagtcagagcctccacctagcaaaacacactaatgcttgtttaaaactggtcctactttactcactgtattaaggaacaattctacaaaatactctttttgatcccgtgactatgtggctggaaggtggacacttagaatcacaaagcagaaatgactttaggtcgtcagaccaaccccaccgctttaaagatgaggaccaaggtccaaagaggataaataatttgttcaagatcccagtagcaaaaccagatctagatttcaagtctccatcagtcccgctgtaatccttccatttccacagtcctgagggagcctttaatattccaacatcaggaacagggttttagcagtagaggaaatttgctgaagggaaagaagcacggactgaaggttattttgatggatgaagtggaaaaataatagaaataaggtgacaaatgagcgtgggattggaaaaagagaggaggcagaaacgtcaaaaggtataaatacgaagactatctactgaaaatggctgtgtatctacccttaattcacataatctaaaatacaataaatattcaaaaatggaaagtgacttcgtatactaaagggaatttttataaaaacaaagagaaactactagagataactacatgtatttactagaatagaaaacgtctagtacctgctgccctgggaactactgtgaatgtgcgtgttgggcccggatcctttattgactgagccagcgcctgcgattgctctaaatttaaggatcgtacaattagagaaacacgttatcccgggacaagaaaaccttattttgtgtggttaacacggcgggtctacaccaggccaataagctgctcatgaaaacctcacggctggtcagccagaaaacacaaagcttagggacgaaacgtcaacagagtagacatcagttcaggtcagccggcaacgagggaccgaaggatgacatcgcgctccagttccgcctccccggcccagcccccaagcgctccatctccgtgccagggctccgcagccgcgatggcgggctcggtgtcgccggagcggaggggcggcctcgggccgggcggccagggcgccagactccagatgcagcgacaagcggcccggagcccggcactcggcctcctccccgcgtcagcgtccgcccgtgggcccggcctcctcgcagctcccggggccctgctgccactcagccccacccggcgctgaacccagcctttgactcaccaccgcccgacagaatgcagaactgcgagaggaagagcagcacgcgacacaaggcgcggaggcccctcagcgggagcacccctcccgccatcttgccagcgcctgcgcacttccgggccggggggcggggcgcgcctgggagccggagcgtgaactggacgcaggcgcgctgcgactcctggcggccggcgtttgcgctttcgctgtcctcgcgcgggtcgcgggttttcttccggttgagccttctgggaggtccccgaggaggatgcgagcctgggaggttgttccatttccacgcgcccctcacgcccttggacgaggccctcacccctggttccactgcaggagacctgttaaaggtcatccgtggaccgaaatgcgcgcccgaagcaaccaagagcagaggcgggcgaacgcgggaggctggccgccccagtgtgtggtcggatgttgtgtgctggatctcgtgcgaaggttccgaggacactatcgcgtggcgtttcatcctaaagacacttatttacagtcggggaagcggccccgggacgacgagggcccgagggacccctcccctggggccggcgctcaggcctgccgcggctttcacttctggccggcctcttgaagatacgcagcacttccagaaagttcctctcaggcctggagaagcaggatggcccgaggcgctgggaagtgaggggagggtccagagcccagccctgcctggggaaggtcgcggccgtctggggagccgcgctcaggccccagcttgcggagacccttgccggtttctgtcacagcacacctgggagaaagcgctggtgacaggtgctctcctcccacccacgtgcttcgggatcgttcattccgcggtcttctgactaccaccccctcacgtgcatgtttgctgaatgactttttaaaaaatacatggaaaagtgccggcacataagccctgaatgttagctttaaaaatcgtatcacggccgggggcggtgaatcacgtctgtaatcccagcactttgggaggcccaggcgggcggatcacgaggttaggaaatcgaaaccatcctggctaacaacacggtgaaaccctgtctctactaaaaatacaaaaaaattagccaggcgtggaggcacgcgcctgtggtcccagctactggggaagctgaggcaggagaatcgcctaaacccgggaagcggaggttgtagtgagccgagatcgc

SEQ ID NO: 62625 - DNA, 1119 bp, Homo sapiens
aataaaaatgttaaatatacagctatcctctcaagatgaaccaccaaaacaagagcacaaaaagcgaaaacttctcgtccaaaaaaaacccaacaacaaaaaagaaccagagggaatgagagtttacatacgcagctgttagtctttctgaccaaggaaagaatgagttttaaacactccagcattttttcaaacaaatgaaaacactatttctgctactgaaaaagatgcgtggcaggctctttaatggacgaattgagaaatcaacagcatttggttaagtctggcgactgctggaaatccggcggctccccaggccacacgggaccaccgagcagggcagggcgggccagccgcagggcactgggagggcactcccccggggcgcccccgcacctgcccccgcagttgaaaacctttcggtgcgcaccgtctcggcccgccccgcccgcgtcctctccagtgtccccaccgcccggttacctgtgcgccggcctcctgcgccgcctctagctccgcgctctccagcgtggcctggcggctccgctcctcggcgaggcacagccgcaggctgcacaggcggtggcgcaggtcgcagttctcggcccggagctgcgccacctcccgcgtgaggcacggcccctccgcctggcagctgtagggcgcgttcagctgctcgtccctcaggcgctcgacctccgaccacagccagcggatgtcctcctcctgccgctccaggcgcgacgccacggcctccgccgccagggcctcggccgccatcgcggcctccctcaggcaccgacgccgagcggggtgcccgcgactgcggcgagggcgacgcggacactcagcgcacggcagaagacagggctcccgggaggggcggggcgatggggcggggacggagccatggggcctcgttggagccgaggcctacacgttgcaggggcggggcgctgggcggggaggggcggggcctaggccagataccctgcaggggcggggcggggcggggcggggcctgaggccagataccctgcaggggcggggcggggcggggcctgaggccaggcccaccttagggtcacgggcagtggggaaatggggtctgaagggcct

SEQ ID NO: 62626 - DNA, 1124 bp, Homo sapiens
aaaaaaaaaaacaataaaaaaaaataaagaaagcacacaatacattacataatatattagaaggtaataagccctatggaaacaattacaaagggaaggagaataaattggaaggaggggctgaaatttaaaatacggtaaagacaagaccaatgagtaaggtggcgatctaggggaagagtgaactgagcaacagcaagtgcaaaggccctgctagcaccatgagcacgatgagagatcgtccaggaggcggtgttgatgcggcaaagggcaacaggaagggcattaggacttgaaatcggagacgcacgcaggggagggagtcagtgtcggaacctggtaggccctgggagaactccggcttttcgtctgcgtgagctggagaagagccgaaggtttctgcgcacagcacggacctgcgtgcctcagctttaaggaaatcaccgtggccgccgctgtgaacgcagagaagggcgcgagcgtgggagcaggaacccaaggcggtgggaaacggtggggctttctgagtgtattggaaagtagagcccacagatctgctgcagaccagaaaggggcgcgagaaagagcggacagaggcagacgccggggctggcggcgatggagcagcagtcggaggacgcggaaggcctgcgagagtcgcccgcgcccagcgccggccttcgggtcccaccttgcgggtgatgttgtgcacgtaggggcacgtgttgcaggagaagcggtggcagcgttgtccctcctccacgatcagcccgttcccgcagccggggcagaacagcagcatggtctcgaactccgcaggctccaactcccggcagctcccactgccgctcagcgccgatgcgccgcccgcctcgagctcacattggtcctggcagccttcccgccacaccaaccaaccaatagacagggcgattctgcgctcccggccctgctgcaggctgtctcgcacttgtcattggtcactgcagccgccccaccccccccggcgcgccagtggctgggcggcctcgctggggcgggccgcagttcctgcgcgtgcgcgcttggcctccctagtgcgggctggcagtgcgggcagagcccggctgagaggggcggccctg

SEQ ID NO: 62627 - DNA, 1540 bp, Homo sapiens
tgagcatctggggtctggctgtcaccccagccgggagaaggcctgtccccgttggcctctgcgcacagagtgagagtctgtcttcgggagtcgctcccagcccaccctggagcttcgaagtgtacagatgggggagtcagtgtcgtggggcagaaggcggagtcagtcccccacccccagctccacggctcctgctattcccatcggtgagggcagccgggacagggaccatcccgccctgggctggagtttcagctcggagacaccacccgccggtcgtggccgggaaggaaaatgcagcggggggagttcagaggaacctggggcacccccggactctagactcccgctcctgggaccctcagctgttgggcgggggctggagccgagctgtcccgcccggccaggccgctggggctgctaatccggccacgggctatttttgcggcgcgccgggctaggaatccggggctgggccgcctccgcgggcgactcgggaaactccaggaagaaaagcccggccgccccgggggggcctcgccgcgacccctccccggccccggccccggccccgacacggccccggccgctctgagcagctccggccccgggtgctgaggactcgccccgccctccggacgcagccccggaacccgcccgcccccggagccctgcgctcccggccgcgctcactcactgccgccgccgggggctctggggggtcctgagggcgccggggaggaggctgccgccgctggccgggagggcccgcgccgagtccccgcccgcccgccggtccggcccgcccgggaatgccctggagcgaggggcgtgcgcccgggggcgggcccggccggagcggggcggtcgcgctgactcagagctcaggaatgcgcgccgcccgcctgcccggcccaagtcacctcctcccggaaggccgccgggctcccttctccccagggtccgcctgcggggacacctggggctggggtctccagcgcctcggcccgacggaggacctggtgggagcggaccgcagtgtcagcgctgggcggctccgcctctccctggctccagattgaggcttgagctgtcctgccctgatttgtgctgagaagagggtgaggagggagagcaggcacggggtaaagggcggaggatgggtgtgtatccctggctcccctaaacccgacctcctccagaggcccacgctgacaagtcctgtatcccacactcacccaatcccactaagcactcacattccctcacacacattcatgtgcaccgatcactcacaatcatacacacacgtccccacatccttccacttcatgcgttcattcgcctgcacatgcacgtgctcacatgcacccacctactcatgtacatctttcatgggtacatacacgtgcacacacacacgtgtacacaccgatgcacacactcagttcaggaccacagtcattacccctccccctgccctgtgcccctacccccagaagccccgctccaccagcaggcactcaggccaggctgcacc

SEQ ID NO: 62628 - DNA, 2036 bp, Homo sapiens
cagataaaccttcaagtggccagaagcgggggatggctctgctgggtgctggggctgccatgggccgtgggagccagcagtgtgcccagctccctcagggcccgtcccctaggcccttccgtccactgggccaagcaccgtccctgcccctccctaggggcatggatctgacttgagaggttgtgagagcttacaggcgctgggccgtcggggaggcctcagaagcgtaggacggctgcgcactgccgggccgtgttcagccctggtctggcctcggcctctagaggaggctgcctgcgctccagcaggcccaacccagaacgtgggcgagctcccttcagcatccctgggcggaaagagggatgggggctctgctgcagaggcagaatccgcgccgctccctccttccttcccccgaccagcctgtgacaaccccggccaggggcgggggcctccgcacaagcctggcgtccacttcctggataaggactccccggcccactccggaccagggctggggcggcctcccaggcgctcactccgctggcaccccaccggaaaacacgtctgcggcccgccccctcccccaaagcacgaccactccgcccgggcccctcgaggatccactcaggttcacgacgggcccgtcctctcggtggtctgaccaccggctggtggagtgggctctggggccgccaggcgaccagggcgcaggcgggggcggacagctcattgggaggggcgccggggcacagtgcggggctcgccccacccccaggtgccccttccccgctctcgcctcgcaggcaccgcatcgggcccgggaatcggtccggacctggcggtgggcgctgggaagaggatccacctccacgtggcccgccccgccccgggggcgcagccagttcccggcgctcactgccccccttctcccggcttccgtccccttctgcgcaggcgccgctccgccccggtcctaggggtgcttccgtggtcggcggctgctgggctccgcgccggggtccgagtcccacgaagccccggcccgagccgccggatgcccgcgcgcagcggggcccaggtgagcgcgcgcctcggccgccccgcggaacagacgcgcccacccccaggcgcagcagcgagcgcggccgcgggagcgggagtgccggggacgggcgtagcgcccaccgccccgagggttcggggcagagccagagcataggccaagggccaagctcgggccgagagcagtggccgcagcgcccgggggctgaacccacggcgcgctggcagcgcgggccgagctgcggagacggtcacgtcagcgtccgttccaggccgactggcagtctccgttctacattaacgtcagcactcccgttaaaaataatgcatctctcccatgccaggaggacttaggtgctgctaaagaccagccctccgggtgctgccaggccggcgctcacccgccaccttcatcttcccttctcctttgccccaggacagccgaggatgtgtggttaggttccccctacccatggggaggccagaggtgggaggctggcggcctgctcggtctcagcagaccctcctagtccctcaggagaccttgcctttgccccacttgctcgttatccagcctgggccatgaagcagaggacagttagggaccctgagcacgcggtggtcaccccggtgctcacccctccctgtgtgtccgaccttggccctgctaagatcctgtgttttgaattctggcaagggttggatgaaagggcagggctccagaaaccagctcagacgtttgcttgggacctgcatgatgagtgggaatcggagggcaccagccctgctgtcccaggctcaggcccccatctgctccccaggtcatgcagcctgggcccccatgccgtgcagctcgcacatatgtggggcagagcagccaccctgcccccagcagcagccgtccatcgtcagacgtgatcatttcctgaggcctcgagtgtgtcagggtgtttgtgcctcataacaaccca

SEQ ID NO: 62629 - DNA, 760 bp, Homo sapiens
attatccgggtgtggttgcacccacctggggtcccagctactcggcaggctgaggcaggagaatcacttgagcctgggaggcggagcttgcagtgagccgagattgcgccattgcactccagcctggcgacagagtgagactctgtctcaaaaacaacaaaaacaaaacctgcaaggattatgtcaccctcggaaaaaaacacgacaaaagtggggaaggctcgaagactggactctgtatcccacctcagagacgcccagcaaacatctgttgattgaagacatgaatgaatctttcctaaggaaattgtcccaaatatgggaaaagcaaaatcctcctcacagactagggaccaaagtacattaaaatatgcttagctaggattgaaagcaaagagcacggactggggagggtggaactaggcagcgctttgctttctgtcatttccaaattttcagcaatgtgcccagatatatttttataattaaaaaatgttcaaggtattgggggacttgggaacaggtggtgccagaagactgggctcagttctttccttgcagaaaatcaattaaattgccagggcatggtggctaacacctgtaacccagcactttggcaggccgaggcgggtggatcacgaggtcaggagttcaagacgagcctggccaacatggtgaaaccccatctctactaaaaatacaaaaattagccaggtgtagtggtgtgcacccataatcccagctactcagggggctgagg

SEQ ID NO: 62630 - DNA, 861 bp, Homo sapiens
ggaaatgcctgggtgccctaaggaggcactgttgttcttaaggaagaacaacaatggtgcctccctcaccaaggactgaatggaagaaattagcgagccatgtaacaaactaagaacagaacctgccctgagcaaagaccctgctagtgtctgtggtcaccactgtactgctgactactggtaggcagaaccagtctacaatttgtaagaattcagtcacgacaggccacgttactacagggatgcacggtacaaaaagagaggcaccaggccaattgttcactgaatacttttggtcctgaaggatgagaagctcttcccagcagaagtcacactggttaacaagaaaaccagcaggctccaggcccatatctctgcccaagagctccttctgcaaccatgatgactgggtcaaaggacagtgcaggaggctctcaggaacaagaggggccctcgaccctctggaacctatcagggaccacagtcagccaggcaagcacatctgcccaagccaagggtggaggcatgcagctgtgggggtctgtgaaaacacttgagggagcagataactgggccaaccatgactcagtgcttctggaggccaacaggactgctgagtcatcctgtgggggtggaggtgggacaagggaaaggggtgaatggtactgctgattacaacctctggtgctgcctccccctcctgtttatctgagagggaaggccatgcccaaagtgttcacagccaggcttcaggggcaaagcctgacccagacagtaaatacgttcttcatctggagctgaagaaattctctatattctcatcagatcccatgttcacaaacagaactcacacctggatgg

SEQ ID NO: 62631 - DNA, 1516 bp, Homo sapiens
cagtggcgcgatctcggttcactgaaacctccgcctcccgggttcaagcaattctcctgcctcagcctcccaagtagctaggattatgggcacgcaccaccacgctcggctaatttgtttttttttatttttattttttcagtagagacagagtttcaaccatgttggccaggctggtctcgaactcctgacctcaggtgatccacccgcctcggcctcccaaagtgctgggattaccgccaccggccttgttcgtgtaattttgtattttctcatgatgaatacatcccaaactcattttattttattttactttattttttaaaggctggagactgatgaaatgtcagcagtagttgctttggtgtggtgaacaatgcatgattttaattttttttttcctttttctacttttcaaatactctacaacgagcagatctcgaatgcccagcaaaagctaagctccgcgaggcggccctggaatgaggcgaccccggaatgaggcggcccccgcgagcgccaggcccccgcccagcgctcacttacttgtctgggacgccgggtgctcctggcttctctggaaggggtacctgaacagcagcttattgcccctgctccccgagctcaccagaatcacgctgatggggctggtgttgtcccgcatcccgccgtggggccggggccgggggcggagggggccagaggaggacggagccggaggcggagggggcctgaggaggacggagccggaggcggagggggcctgaggaggacgaggcggggacgcagggggcctgaggagggcaggggtggaggcggagggggcctgaggagggcaggggtggaggcggagggggcctgaggagggcaggggtggaggcggagggggcctgaggagggcaggggtggaggcggagggggcctgagtagggcaggggtggaggcggagggggcctgaggagggcaggggtggaggcggagggggcctgaggaggacaggggtggtggtggacgcggagcagcgccacagttaccaacccacgtgccacgctccgggctcgcgagacttcggcgacaccgtccggaggaggtgctaaggcggcggccgggagaacggcgcaggcgcaggcgcaggcgcaggcagcggaatgcgcaggcgcggggccttctggaagccaccgagttccgcggtgctgtctggagccgtacggttcgcgtttggggcacaggggcccctcttgctggtgcggatgggaaaggcgcggggtcgagtcagcgtccctctcgatgttggtttcttcgttttacaaataacacttgggcggggcgcggtggctcacgcctgtaatcccagcattttgggaggccgaggcgggcggatcacgaggtcaggagatcgagaccatcctagctaacatagtgaaaccccatctctactaaaaattagaagaaattatccgggcgtggtggcaggcgcccgtaatcctagaggagaatcgcttgaacccgggaggcg

SEQ ID NO: 62632 - DNA, 829 bp, Homo sapiens
cctggggcacacccccagtgcccagatccaggcgcgcctctttccacctccagcaggtttggggcctcggccatgggggcaccgaactgcgtgcagcctgaccctcccgaatggggtggtaggtgagggccgcgggacgccccgggcggcgggctgcgaggacggccgactctgcccatcccgagggcggctggcttcgccctccccactctgcgccgagcacgcggcccggacccaccgcgagaactccgcacctgcagcgtgaacgcacgcgggcggcgttaagggcccggggctgactcggagcaggttagggaacagcgccccctcccggcgcgagccggtacctgcgcagcacccagccgccgcggctgtggcctggaatcggggacctggggtgccggggggttgtggtgaaggaggtgggaccagccccagcacctagccacgtagctggcgaggtggaccaggaaccgacccagacccctgccgtcacccgacatcactacggagagtgaagcttttttatatttgtccacataaaaccaatcatggtcattgtagaacttccgaaaacaaggcttgctgcaccttcctgtgtatcccaggtccaggaatgggtgcagcacatccttcagctgccgcttgacacgcggcaaactgtgtcatgtgtaaacaagaacaggacatggctgtcatatccaagagcacatgtgtaacacagacatgccacacacacacacacacacacacggggtagaggcaggcctcatccacacccctaacatttgatgcgtagctgttccagtcttctaggcacatgtagaga

SEQ ID NO: 62633 - DNA, 1232 bp, Homo sapiens
aatgtgccagtgtgaacttacaacttcattactcagcagaaaagaaaacacaaaccacagcaggtatatagttttgcaaagatgcaaccgctttctcctgtgacaaccatcatgatcttgagctcctccctacacagtacaacctacctaacgactgtcaagcgctggctacacagaggctctcctgtgtgctggggggaagggggcagctggaaaagtacttggcagaaacccacgttagaaaagctcagtttacggttccccttgcaatggtacagaaccagagcgggccaggttttcgaggcccatccggctccctcgggtgtagcttcttcccaaggagcctcggaagagttctgccacccggctgccagcgacctggagcccacgctgattccagccctccgccgactccacagttcgcggaggggcacggagccgcggcgcccgccggggaggaagtagcaggacggtacataggaaggaggctgaagccccatccatggcgcagactccgagagaggagcccgacctggacccacggccgcctcagagacgcaccggcttagacaaaggcccggcgcctgcggtcggagcgcgggggaggaggagcgatgccccgcgcaggcgcaggcgcagacgatcgcggcccccgcctcaggccgcccggcggcctcgcctcactcccaccccagaccctcgcctggttggccgctctgactcaccgtcccgagccgtgcccatgagctggtccagcagggcccgcatctgcgcctgggcggacatggtagccggcggaggcgacggggtcggccgcgacgacttctctcaggcaggcggtggcagcggcgtcgacaaacgatggtcgcgtcggcctcgagcccactcggctctttcccgccgcgggggacgccgggaggaagtacgacggcgccggcgcacgccctgctgggaaatgtagtttctggggtgggtgcttagggaggctgaggctctgagtggtcgcaagttgtccaacggcggaaccaaaatcccaaccctgattttactctagacccccaggacctcaaacgagtctctacggagggtaaactacaataaaatgaaatacagtcaatcaaaaacaagatgaatccgtgctttttctaagctagccatgaaaccgtgagcatattatttagctccccgacgctcgtttttttaaatctgtgaaatgagggttctaaaggtgc

SEQ ID NO: 62634 - DNA, 1365 bp, Homo sapiens
accttgtaatccgcccgcctcggcctcccaaagtgctggaattacaggcgtgagccaccgcccccggccctggcaccgtatttcaaggccgaaaattcgcatcctcagtgccagcaattctcctcgtggtcaaagaggagaaacactggggagagcacccggaagcgggggcgaggacgcagatcgggggtcgacgtcaagaaagaaggcgggaagaggacaaggtcgggagaggaggaggaggggagcgaggacgcagagaaggaggggaaagaggacggagaggagcgaggacggaggggggacgggaacgaagaggggcgaggacgttcagcatccattgcgacagcgacaaacaggacaccgccaggttcccggcggaggcagcgcccaagatccccgttgccgagcaaccgaagcatggcggtggggcggggtcggagcctgcgcatttccgcccccgcccgcccggctggtcggaagtgacgccagggggcggggccagcggcgcggtcgggtgagaggccgcggcggcaggtgagtgagcgcggcctcgtactcgcgcgtgcacgccgcaggggcgccgcaggccgccccttcgctctgggaccccggcccccaggttccccagtccctcggcccctggaggaccccgccgtgctgccccctagctcctccgccttcccgagtcgggtgcgggccgggaggctgcggcggggccccaagtccctcagcgggtcggcagcagcgcctctggaggctgattctttcgggtttcccccattgccgcagcctgggtttcagtggcattcagaacaagcccacatgttcctcaaagcggggttttacctcccggtagggagctccccgccgtggcgcagcgtaggtgagccggccgtggtcgctttcgctcttggtgccgcctgggttgcctgagagtgtttttttatggtggaagaatgtggatgagaagcctcacgggggtcggagaggcgtgtcctctctcgggacgctgtctgcaagcttgtccgtccggcaccccgggaaagctccccgagcgcagccgaggttgctcgtctgtgggagggactcaggcatagaacacaaaacagaggctagatgggaggaaaacactgggattagcgttcctggctctcccctacgttcgttggccgagagttgtcaaggagagagtttgcccttggacagactgataggatatcagggtaggcaatttcacttactctctggttctaaaccttgtgattccagctgaggaggctgtgacgcgctcccttccatgtactggctgccggtgtctttacggcgccagcatcagattacactacttcccttattgcaatt

SEQ ID NO: 62635 - DNA, 1228 bp, Homo sapiens
cggtggcgggtgcctgtagtcccagctactcgggagcctgaggcagaagactggcatgaacctgggaggtggagcttgcagtgagccgagatcgcaccattgcactccaacctgggcgacagagcgaggctccgtctcaaaaaaaaaaagattgccagcacccccatcaggtcccagaatactccacctacgtatctcgtgggtgttctgcatggcggcagacacttggtgtcaccctcaggggcaggaacaggtgatgggctgaccagacagcattgaatgaccatggggcagggcactctcaccccttctgctcacactgaatgagcaggtgatttctcggtcactcagggtggcagacacaaaagggcaagagaatgagtcaccaggcaccaggcaggagcttccggctcagccctgcggcctgtgcctaggaggcctcgctgtggttccacgctgcggccagccttttctttgttttataacaccgctggtgcccccacccactcactgtgaaccgcacaacacaccaaaggccctttatgatcaaaatcaaacagtgacgatagggagggtgtgtgtttctgcagactgtccacaggcgcagcacaggcggggcagccctggcagccacccacacctgccatcccgggagtccaacagctcaaactgtggccaaatgcccctcaccagcacttactggctactgaccacaggcagtctgccaattcctagcttacaaagcggaaatgacagtggccacttctttataaagtttctgagcatttcagcaaacagtgcttgggtgaggccaggcacatgatgcagaaagccctcactacagcctagcaaccaaagtgtcctgcacattagttaggggactgggtgggaaaggctgcaggtcacagttaaacccacaattccaactaactgtctgtgagactctaaacaaatgcttcaccaggctggggacagtggctcaagcctgtaatccgagcactgtaggaggctgaggcagaatgccttaaagccaagagttcaagacccacctgagtgaaaaggccagaccttgtctctacaaaaaaatgttgcaaaaattagccaagggctgggcggggtagctcacacctgtaatcccagcattttgggaggctgaggtagatggatcacttgagtcctggagttcaagaccagcctggacaacaaggtgagacctcgtctctgcaaa

SEQ ID NO: 62636 - DNA, 1054 bp, Homo sapiens
ccgggaggcggaggttgcagtgagccaagatagcgccactgcactccagcctgggctacagtgcgagactccgtctcaaaaaaaaaaaattatcttagaggacggtggtcacccctgtagtcccaacaccttggaaggctgaggcaggtggatcgcttgaggccaagaattcaacacctgctgggcaatatagtgacaccccatctctacaaaaaatatatatatatatatcttatagatgggctgagaaaaatccccagagaactgacatgtttttctctactttcttcaatgccaagctgaaagtttcactgctcgggcagtgcagctctggtttcacgggggctaaattccaaagtgcggggcgggggtagaatctaagaaccacacccaagagaaagaccagtgtttgggcagcaaggcatcaacctggagggtacggacgccggagcacgcggctactcaggccgaaccccgacccggacccggcacgcggcctcggcgagggcgggcgggagtgtcctcctccgggacagccggactcccgccgacttctgggcggcggggagggctccaggcccggctctcccgggcccccgcacgcgatgcgcggcccctgcagctgctccgtgccccgagacgcgcccgaggcctcggacctccaagcggccaccgcgccgccagtcccgctgcccagggacaccccggccccagctccccgcgcgcccaccccctcggtcccacgcgcgtcagccacccgcgccccccgccgcttccgggtcccgcccgcccggcctaccgcggcctagcccgccccggagcccggccctactcacccgcgcgcggtggtggcgggaccccgggcccggctcccggagcggcgcggcgcggtccgggcccatgcgctcagcggcagcgcggcgggcgggacccggcgggggcgcggcccggggcggcccccatctcggcggctgcggctcggcggcccggaggcggacgcggggcaggccgcgggggcgccgcaggggcccagccgccagctcccacccgcccg

SEQ ID NO: 62637 - DNA, 863 bp, Homo sapiens
gcccgcgcccacctttcagggttcagagcccaccggaaccggaagccgatctgccgcgcctggccctcctcccaccgctgactggctgtaaaagccatccgtctaccccctcgtcccgccccgcttccgtctttagggaccgtaaaaaacaccccacatacagcagcagcagctcaaggcaccgttagctacgtgcggccccggcgtttccgcgaagggcggcacgggcggggcggtgcttgttctcccgggccccacttaccctacccgggaaggagcacagaaaaaatgtaaaaactcgtttagtttgaaaaatcaatgtagaatattaaattcaccaaacacagatagatcagatctacataaaaatatgtcttaatatcttagaattttcctttactccaaaaaaccccatatatatatgtttctcctttataagcttagagattgctttggtggtcaagtgcagggcggctgggggaggtaagaccttcaggaaggccatatcccggacaagacccagaagggaagcccccagagccaagggtaggagggccccacccgggtctcagccactcacttctccagggcggatccgagacactcacaggcctcagggaggggccaggtgctgctcctggtcattgcttcccccacaaggtttgcatgaggagcagagacagtccagtctcctgaacacccacagggcacagagcccagtgcagggggcagacaccaccgcagctcctgggaccaagaggaagctcccagaggggggcccaggaacgctggggtgggtggacagggctgggtaggggttccttctgggccaaacccccagagcagcagagcaccccagtcca

SEQ ID NO: 62638 - DNA, 1944 bp, Homo sapiens
cagaaaggacacggcccctccagagtcccaggccacagaggccggggcaagtcctcaccatctcagggtggccaaggcctgacggtctccacacccacgtccctaccccgtggaagggctacgccttctccctggtccagccgcctccttggacctcagtcagggacggggaccctcagggaacagaaatgcaaagggagcccggcgagtttcccaacaagaggggagaggggcgccctttcctcagcccctcttccgccagctgggagtccctcctcccagaagccgggccggcggcaggaagcggccgtaccagggctgggggtcactgcggaagggctggagccatgacgcccacgggcccccgctacagggtctaacaactttctcccggctctgcccctctctcaggccggacccggccggtgagctcacggcccagccactcctcccagctggagtcccgggcagagtcccctgggcccctccacttccccgcgccgggcgcgccggacctgggcgctctgggaggaggagggaggggagggggcgctccaggggccgatgtggcccaaccccgatcgggggaccgaggaggaagcgcggggtcccgtccgcctcgacccctaggacacgaagcgccccaaagggccactgtgcacccccaacccgcggcggggacccccaaccccgcgccggcgccagatgagcgcacaggtgcgcccggggtgtcacaatcccgccccgcccgcagccccggccccacgcccccgatggcgcccgcgcctcccgctcaccgctcttcccgctgtagccggcggaggcaggcgggggccgggcaagcagcagcagcagcagcggccccgccaccaccgcggccaccgcctcgcccccggtcccggtgccagcccggcccatggctccgcgctcggcccggcgctacccggcccgcgtcccgcgccgccggcccccgccgccgcccgggcagcctctgccgcctccgcctctgccgcctccgcctctgcccccggcgcccatggcccggccggtccccgccgccgtcgccccgggcacttccgcccgcaggccccgccccgcaggccgagccgggaaggcgagggcggggtcggggggcgggaccggggggggcgcggacgccggggggaggggtcacgtggggcgccggtaggggggaggggtcacgtggggcgcgcgggggacggaccggggcgcgcgcggtccggggggacgctggagggagggcgcgggatggagggatcgcgggggtcccaggacggagaggtcgcgccgggcgcgctcggaacacgcaggaaattctccccgaggcgtgggctccgcggggcttccccgccggttcgctgagtcccagctccgctcggccgggacctccgtggcaggctcggggagcccgcggggggcagaggcgccgacctccgcctgggaccgagaggaacccgcgccctgccctgccccgcccggcgcgcgtgggcctgagtcaggcgcctcagcacggggacccccgggccggccttcacgccgcagagccgctgcaggtgcgtgtcagatccacgcttttatgcacagacgagaaggctgcttgtgtttagggactgtagtacccgatcggggtggcggttcacacgggtgcgtggcatcaactcccggcgctttgcacctggatggattcccaccatgtaagatttgagccgaaaaaaggaagcgataaagcctagaaaactcggggaagctttttccgtcttagggccaagtcggcttttccaagcgtggcacagagtccagaagttccgccgcgtcgtgggtgggaggggggtgggggcgtctgcaaagccaaactgcataagcgaagtccaaaagacgagcccccgactgggaggtgggggacacagcttgcagctcacaccg

SEQ ID NO: 62639 - DNA, 887 bp, Homo sapiens
ctgggctcacgcgatcctcctgcctcagcctcccgagtgggccttcctccgtgggaaagcgttaaaacgatagttaacggttgcgtcggtgtaaagacgaatgcaattcgagaaggattcattattattttgttttttcttctgatttttaacagaaattggcgttgaacatttcccccgtgagcgccgggccacgggggtccggggcggcggggggctccggggcggcggggggctcccgggcgggcgggggcgggtctcgggctggcaccgccctccgcgcccgctcctcgcgctcacagcggcccgcgggccgggcgtcatgggcggcctcttctggcgctccgcgctgcgggggctgcgctgcggcccgcgggccccgggcccgagcctgctagtgcgccacggctcgggtgagtggggccgcgcgccccggcggggacgcggaggggaggaaggggcgcgcgccgctcggcctttgtgcgcgcacgtgcgggctggggtccgactcccccagaggcctcggggcgcgggctgcggggtccgtccgagttggggaaggcgccggctcgcacccgcacgcccctccagtgcccgtccggctctgcggctccttctcgcctccccaggccccaggctgcaggcgcccggcgagttggcagcctgggcgggtccggggcgaccgagggcccgggagcgcaaggaaggcagaggccggctgcagcactgggcggggagggggtctcccggccggggtgggggtgggggtgtgggggggtgagggagtcggggggtgggggtgggggtgtgggggggtgagggagtcggggggtgggggtggggggagccgctccgctggggcgttcgctgaaggccaagttaggcca

SEQ ID NO: 62640 - DNA, 1690 bp, Homo sapiens
ccgcctcggcctcccaaagtgttgggattacaggcgtgagccaccgcgcccggccccggacccttctttattggcctcaaaacgggtcattttgggaagcggcgcggggctggccgcgcttccctgggccccggccctccccatggtgtttacggggaggcgaacggggagcccagaggctgcgagcctggcctggacccaggagccaggggtatcccacaagtcctggaggctctgaacgcggcgctgacgccgaatacctgtgaaaaagactcggggaggagacccgcagaccgccgagcttctgccgcgggaaccgcgcccccggccccgcaatgcgcctgcgcctcgcgcgccgacttccagtcccagcaggccgcgggcgggggcggggcctccggggagaattcgggggaggggcggggcctccgggaagcaatcagggcaggggcggggcgtccggggagtggggcggggctcccggttccaggcgagttcgcagctgcgcgccgggtcctggaggccgaggccgctcccgcccgttgtccccgcagtccccgacgggagcgccatggcccagccgccgcccgacgtggagggggacgactgtctccccgcgtaccgccacctcttctgcccggacctgctgcggtgagcggggcctgggaagcgagcgcagccttggtgcggggtccggtccgcgggcgccggcgcccccacgtggtccccgagggctcgcgtgttaggaaacctgtcttgcctggctcctttctttcttttttctttctttttttttttttgagacggaatctcgctgtgtcgcccaggctggagtgcagtggcacgatctccgctcactgcaaactctgcctcccgggttcaagcgattctcctgcctcagcccggctaatttttatttttagtagagagggggtgtcaccgtgttggtcaggctcttttcgaactcctgacctcaggtgatccacccgcctcggcttcccaaagtgctgggatttacaggcgtgagccaccgcgcccggcccaacctggcctctttcttaacagaaaattttaggttgaaatcatttttccggaagacccagaaggcccaggaatgccaggttttgcccagcagctcttcattttcctgcaaacgccttggtgttcacaagagaaggcagcccgggcaaaggtcgatcctccccggtcacctgccctcactcggctaatgggcggatccttttttttttttccttttctttttttcaattggcaacattttcaagtttctattaaaattttgatcttttgccaggagcagtggctcacgcctgtaatcccagctctttgggaggccgaagcgggtagatcaccagaggtcaggagttcgagaccagcctggccaacatggtgaaaccccgtctctgctaaaaatacaaaaaattagccgggtgtggtggcgcacacctgtaatcccaactacttgggaggctgaggcaggagaatcacttgaactcgggaggtggaggttgcagtgagccgagatcgcaccattgcactgggcaacaagagtgaaactccatctcaaaaaaagaaaacaagttttaaattatgttctccaaggacaggtattgacaattctctctgagtgttctgcaggaaaaaaaaaaagttttttttcgaaacggag

SEQ ID NO: 62641 - DNA, 1664 bp, Homo sapiens
gtgagactgctctgtgtcccttccctgctcctcgcttctccctgcccgggccctgctggatgcccgacccctggaaagatgttggtgggaggtagatgtcccctgctcacctacccgacaggatccaggtgcctgccagagggactggggagcggtcgaggattgccctggggggagtcaggacttcaaggcccctacaggtcagtggagattgtgtggctctggtctggggcctgctgggacctcgagagtcagggctgtgtcgggccccagtgctggcgccctgcagagcacattttctcctgggacacaattctgtggcttcaggccagggtcagcaacttatcccacctgacagtggctagagttaggctggggtgggggaaagggacccttcctcagttcccctgaggcccctgcttttcagaccaaaaaggtgagtcccacaggaagagatatggcctttccactggtggctttgtgctcagggcatctgaggaccagatgggacattgcagctccagtgggacctgcctagcaggggtagctacctttatggttattgtgggcaagcaacccccgaaccagaagagccgagaaaccaaagaacaaggcagacagatcccgtttgtctgtgtcaggtgattttaccagggaatttgtgggcagaagcgtagtcttgggtggctgtgagacgggcgtctccatgctgttacccccaggcccagggcttctataccacagggaaaggggtcctgcttcagagggagtgtgtaggaatttgtttaggataacatcaaggtggttttgacctaaaggcaggacttctttgtgctctttcgcaagaacagtagataagctggaaatcctagcggcattcctggaaccagggttcatagaggccaacgtggtggattcgcatccacgtggtcaggaaggggagcagggagcaccccgcttcagaacagtcctccacgccagccccacagggagaagggggtggagaatgtgggcccagcaggccccaggcagatgtgtgggctgggcgtctgtggctcacagctgtctctgtacctggtgtttggggcaggacccgcaggcctgtgcggtgggatgtcccatgccagaaaccccggggtgggcaccacctgaggtccctccagagtacctcagtcctgttcacgcccctgtgccctctgccagctgggccttcagcctggactggtacttccgcctgagagactcctgctcaggagctgggcagatgccccgggagtgcccctcgcccacactgccctcacacctgcttctggttttgcaggcacggctgccatacggtgattgccagtaggagcctgccgcgagtgctgacggtgagagggcctctcccatggtcccctgttcgggtggctgtgggggggctggggctgggcctgggccaggagagtccagaggctatggggatgttggcaccaaaactttttttttctgagacgggagtctcgctctgtcacccaggctgaagtgtggtggtgcgatctcggctcactgcagcctccacctcccaggatcaagcgattctcctgcctcagcctccggagtagctgggactacaggtgcccgccaccacgcctggctaatttttgcatttttttggtagagat

SEQ ID NO: 62642 - DNA, 3308 bp, Homo sapiens
gggtttcaccgtgttagccaggatggtctccattttctgacctcgtgatccgcccgcctcagcctcccacagtcctgggattacaggcatgagctaccacacctggcctaaggtgggaggatctcttgagcctaggaggttgaggctgccgtgagctatggtcgcaccactgcactgcagcctgggcaacagagcaaaaccctgtctcggggaaaaaaaagaaaagaaaagaaaagaaggaactgctacagcccacagcctacaaaggggacacagatagtagctctgaacagcagacggatagacgggaacttgtccctttagtctttcatgaacagcctctaactggtccaggcagggaggtgcaggcttccaggctgtggttccatggaggacaccagccgggcacgcaatggacgttttccagccctagcacagacagagcgtgcgggcccctgctctcagaaagccagccttctgcctctggcagcgccggcacataaaagcagagggagcctgctgtctctgcctcgcccacactaacacccctatttagaaaggttgacacatcactatcactgcttctgaaaattttatccggccgaaggcatcagcccaaatttgaattcttgccaaagctgctggtgatttcgttctttgaatgcagtatcttcctcatgaacacgtacagctcttacaagaaaatgagaatacggtttggggaggaggatccctcacattccttttcctaatgccagcctcgcgaagtctggtcccatgtaccctgggattctgccacggaagatgactcacttaattaacacgctgctcctgaccgtacacttggaagcagaggttccgttcctttggttcttgccaaagctgcttacgaaaccatatcttgtgttggtgcccatggtgtgtaaaaatacaagttcatcatttccctgatacaaattatgacaggctaaatttagtgcctcacctgtcctaactagctttcccaccatcatgcctgccgccgggctgtggtcctttctgaggtcccgtgtccctctgaggacagggacacccagacacagaggtcagttgtcagacgcggccacggtgctcgggaggctggctgcagacgggcgattcaccctgggtgtcttcttgagtcttattttttgtagagacgaggtctcgctttggtgctcaggctggtctcaatctcctgggcgcaagcgatcctcccgcttgggcgtgggccagcgcgcccgtcccaacgctgggagtcccggagatcttggtcacaggcttaagggaaaggcctagcgcgtggccgcgcgtgcctctggtttcaagggacatggactgcgtgtctggggcccctccgcactccgtgtcagaccctgcgtcccccgggtccgcgcgggacccgggcagggcgtcgccctctgcggcgtctgcgccccgcgaaccctggggcacctgcaacccctgggccgcggagccaggcgtgcgccgcctcctggtctcatcaacgtgagaacgctttacccccgaagagctcagctcctagggggctatgtccctttgcgtctctcgctcgccaggcggtgccgtttactcgaccgcaccatgcgtgggtagcggtcgcgcccgctggtagctgtgcggcgggaacacgttctaagtaaggcctgactccgcgcgcctcttgccagggacgtcacgtcacgcctccactcgcagcctcggagcacccccgcgtcccgcgcccgaagctcgggacccccgctctggcgaaacgaggaatatgacatacagcaaaacaccccttcgcggccgctgcactgccgcgacacacccggcgcctgcctctacagcaagccggcgaggggctgggaccccgccgggacgtgctgacgtcaggcccgacggggggcggggcctgggcggcggcggcgttagttctccgggtacctcaggcgcctcagcctccttagtctcctcatcctgcttcacaggctccgcggcctccggcctcctcggcccccgtcccccggcctcctcggcccccgtcccccgccatccgccgcccggatcctcgccgccctccctaggccgccccgccgccatgggcctgcgcccgccgcgccgccgggccgagggcagctgaggcgcggtgcgaagatgggcgaggacagagcagggcccgagcgccagccccagcagcccgggcgccccgcgcgcgcccgcccgcgccgccgaggggatgcccgcgcccgccgccgcgccctgagcgcctttgtctgccgcccgcgcccttccgcaccactagcctctcgggagcatggcgtcggccccgccggcctcgcccccgggctcggagccgccggggcccgacccggagccgggcgggccggacgggccgggggcggcacaactggctccgggccctgcggagctacgcctcggagcgcccgtcggcggccccgacccgcagtccccgggcctggatgagcctgcgcccggggccgctgcagatggcggggcgcgttggagcgccgggccggccccggggctggagggaggcccgcgagaccccgggccgtccgccccgccgccgcgctccggcccgcgggggcagcttgcgagccccgacgccccgggcccagggccgcgctccgaagcgccgcttccagaactcgacccgttgttctcctggactgaggagcccgaggagtgtggccccgcgagctgcccggagagcgcgcctttccgcttgcaggggtccagcagcagccaccgagcgcggggcgaggtcgacgtcttctctcccttccccgcgcccacggcgggcgagctggcgctggagcaaggtcccgggtccccgccgcagccctcggacctcagccagacccacccccttccgagcgagcccgtggggagtcaggaggacggcccccgcctccgagccgtgttcgatgccctggacggggatggggacggtttcgtccgcatcgaggacttcatccagtttgctacggtctacggggcagagcaggtacggagcggcccgggccggggcgtgggaactgggcaggtgcgcgctggccggcggggttgatgtgggaccggtcgacgctgcccctggagtcgggaaaggcactgtcaagacctgacggtcctgctttttctgcttattcaccacttcggccctggatttctggttgaattgcgctggagtccctcttcccttcttaaaaggaggttctattctggggagtcagtttcttcccctccccccagcgcctcgtcag

SEQ ID NO: 62643 - DNA, 1832 bp, Homo sapiens
gaggctgggagagggtccccccatttcataggcaaggaggctgggagagggtccccccatttcataggcaaggaagctcggagagggccagtgctttttaacggtcacgcagttctgagcatcaggctgtcagcctggagcctggcttggtactgaggttcccaggatgtataaagaactgaacacgcacctttgctgttggctcttctgtgcgagtgctctgagagttttctgtactcccggcaagtttgggttggtacagattcaccacagcgaatctgaccacgtggtgaccacaagcacgcgcttactgcgcgcctaagttcacactccctggagaagctcctgccccaaggccgcagcctatgggcctttgcgtctactcaggaccatgaggctgtgtccccgagcctggcccgggtagtaactggcatggcctgcggtgctgggggcgtgtccacaggagctggtgccacagaggacacgtgtgtctgctgtcttcctggactcggtcggaccagtttcccagtgtgtccgtgagggtgacactgagtgagacttctgggatccacacctttcctgggaccctcactcttcctgccacagaaagcacctgtgaaagtctgagatcaagaatgtgcacaggggaggtgtctgcaggtcaaggtcctgagctgatgtctcacaggcctctggtagagacgagattgttcgtgtctctgcgaagaagggcatgttttattgcagccaagtacaaagtcctctctgccactcgctggctgggactgaggtcatgttctgtcaggttccaaagagcgccaggaagactctgagaccacagagcacggcctgctttctcccagcccctggtaaagatgtccagcctgggacctccccctgtatatagtgctttaagtgggagaagaccaccacccagatcaggggaggacctgtcccctgcaatgctgctgcctgcttttcagattgacttgggagtgcttgtgctgacggagcatgtcctgtggtttttccctttcttccctctgttgttgtgccttttctgtaggtacctgcaccagtcaggggccctgaccatggaggccctggaggacccttcccccgagctcatggagggcccagaggaggacattgctgacaaggtaggccctggagggctgggtaggtggcaagtaggggatttagaacacagccacgcctaagggccgctgcagacaccccgggaggtggggacagcacagccggaggtgaccccatgtcctccagggctccccagactgtccatccagccccgatgctctttggcaggtttccccaaggggtctcgtggccatgtgagaaaaaggagtcttcctgttgtgcacgaagggccagctgggaggagtggactgggcagtgagtgagcaccctcgggtatcccacccccactgtgtctgagtcgggctgggggacacccagacattcagtccaccaggcccatggagacgcgacctggggcacccatgatttgggagaaaagggctggccctgcagttactgcagagccaacagcctgaggaacgggcttctcctggggccttgaatggaatgggtgacagcagccagggcaaggcagccttgccgtggtcaagacccgcttttcagccagatgtggtggctcacgcctggaatcccagcacattaggaggcctaggcgggcagatcacttgaggtcaggagtttgagatcagcctggccaacatagtgaaaacccgtctctactaaaaatacaaaagttagccacgcatggtggcgggcaactgtaatcccagcta

SEQ ID NO: 62644 - DNA, 3568 bp, Homo sapiens
ggccctcagcatcagatcaacaggttcaactgcagctgcctctctggtggggaggttataaggcctgctggctagaccactggcccctggccagggagccacctaggcagtgccagggaaggactgggaagggaagagaacctgcggtccctgagtgaggccttgactgcaccctctcctgtggttcgaaagccacacttggccagtatcctgccatgcaggtgaggaagctggggaggacagggtcccagagccttgtccaagttgcagagaggagagccagctctcactctgcagccctctgtgcccccagacccccactggcccccggggacacatttcctgcccttgggatgctttggcatggatatagtctgggaacaaacggcacatccagctgccctgcctgtctccacagagggggcagcagacctagggggaggtgtccaagacacaggaatgaagtgtccttaccaaaagcttccgaggacagaaataaacccctcctgccagcttctgcactgactgcagctagaagccgagctccacgtgggacacaggtgtccctgctgcggcatctcagcatgacggaggcccatccttggctttcctggagcatgaatatcctctgaggagcactggccctggccttgtaggtcttgctgagactggcttagattttctggcccaggagcaatcgtcacccaacctcccacttgtaaatctcgccacagaatcggcccacaaccgtctctccggaatctcggcggaccagccctgctcctgtgtctccctctcccgcagagccactgccttctcaggctcctcaagtgcacctaagagcgggagtctggctgccctcagcactcgcgtcccgccctgcagcctgataagcttgacgccaaggcattctcccgagagccggcccagcagctgctggcaggagagtggcctcagggcagcgggaaggggacctccggggagagaatgaggcctgcgcaagggtcctggaaggacccaggagtcgccccggcttccctcccccaggccctggttgggcgccgtgggccgcgtcccagttgagcccggcgtggccgtttaatggcgtccctccgcgaccgaggacgaaggggcctagagaggctgtgcccaagcgacgctgcgaggccaggccgcgtctcgggccagggcggtccccttgccaccgccgctcttggccgccaggaccaagcacagcacgcagcgtcgcgaaaggggcggtcctggaaggcgcgaaggggtctccgggtctcgcgaacacggcggggtcggggcggagtcgtgggtcctcggtcgagcggccgcccagagccccgcgggacacggacggccccagcccggctccccgcgagccccacgcgtctgtgacgccgctgatgcgcagacgccgcggctgcaggccccgcccctccgtgcccctcgcaaggccctctgggagttgtagttccagctcctcctcgggccgccccactccctgataatcctggagcgcggcgcctcccggggaccgaggcctcgggcccggccgtctccagcagcgagggcaggagaagtggcccgggcggtcggcggactgggagggcgccacccgaggactacaactcccggcctgcctcgcgcaggcaccgccccgagcttccgccccgtcggcgccgcgcagccctgtgggagccgtagtccgggcgcgcgattcacagcgccgcgtgcgccccgggcgcgccgtagccgcggggcccgggccgggcgctacgctacgaaggcagcgtaaggcgggcgccggacgcgggcaggggccggggccggagccgggtcggggcgccccgcggctgaggagcgggaggccgtccgggcagcgcggccggcggcgagaggggccccgccgctctccggaggcagaagttgtggatcggccggcgggggcgagcgggcccgggggccggggccgcgctgcccgggccgcgaggacgaggcggcgccgccgggctgtggaggtgagtcccgtcggccgggcccggccgggcgcccagccggggaccccgggcggggagcgcgggcccggagggcggcggggagcgcgggctcggcggggcgcaggaggcctcgggggccgggcgcgccgggctccgagccagggcagggacggcagggcccccggagtggggtcagcccgccgcccgctggcgcctccaggctggtgggggccagggctgggcgatgcttcgcagaggaacccagaggaaggcgggaagtcggcagggacctgggccatgtgggtcacttgaggccagccccgggggccgcgcacaccggaggcggcctcggccctgcctgcccttgagtgcccttatatccgggcccatcgtgcggtcctggccgccttagggatgttgtgcttggtgcgggcatcactcccctcacttggggaacggcctgggggcggccacctggcgtggaggggctggcgggagccccgtctgtgccagccatgccagtgttctcttccgtgttcctctggggctgctgcggcaccagctgggaagttgcaaatctgctgtcctcccgctggctgcagaaggggcccctctagtcctgaccgggggaactcttgtgtggtcagctggccctggccgggcgagctctcggggcccccttactgctctggagtttgttaccggactgcaggtaacaagacccggaaagcaatggtgaggcccagaacctgaggccaggcctgggtgtgtggggccagtggggaagactgggactccgttgggtgctgaagagttgtgtgcttctccttcgggaaacccggatctcttcctctgcccaggtctgaggggtgcggaaacgtgagtcacagttcagtgtgggagtgccccgtaattgcctccgcgtttccagagtctggggctgggcaaggatataggggtgattctcccttccggttctgagtgacttctcaactgtgaagtggggcaagagaaattgtttttctggcctgtctgggggaggcaggtcctgcaggaaaccagcttggcctggccttgggttgggtgtgccttgcctcctccgaggtccttctgcttgcgggaggagcacccctctttttcctgcttctgtctgtgtctgaggctctccagagctccttgattggcagaggagccagtgacctctgagtccccaggagagcccgaggctcagtaactgcataactgcgcagggcctcttgtctgggcctccacagaccgtggtctctgagagcaggaagtggctggtcccctgtaatgctgcatctgtgtgacagcctcaagccctgctggctctctctccgggcacccctcacttgcttcttgccctggccttgggcagcactccggtaaccccagtgccacaggtgaggaaccgaagctggagacagctgttcatggcaggggaggggccgagggaggctgagcgcctggtctctccctcctgctggttccaccagttcacacgaggcaattggagggaaggattctgctgcccggaa

SEQ ID NO: 62645 - DNA, 1231 bp, Homo sapiens
ggggagtctaggtggccacctggctgtgtgcctgtgcctgcccaagctgggcacctttccctggcagtgcctgggaagctcggccgccctccctggctggtgctgctctgcagccccgctcatggactcttgcccacggcctgctccttgtagcagggtcgggccgtgggaggtccggacaggatcttgaatggccctgtctgcggtcctggctggccggaggttgaccgcactggacaggtcaagggccttaaaccagggtagtgaggagcctgctgagcccctgctgctccccgggctgcctttggcgctcggacagacacccaaggacagaagctcggacagcttctaaggcgaagggtctcccggggctgatttcccgggactctggctcctgcagagagggctggaggcggggctctgtgttccagggtcagagtcctcctggtggaagctgaggtgcctgattaaatgcctccctttctaggcagcagcccagacgcggcacagagagggcctgggagcttgctgcagcttcaggtgagtttgttcccaagccctgcggctcgtttatgggtttgcttgcgctgcagaactgtttgtggagcagcagggttggagtgcccacggctggggggcctctcggagcccttgattcacagaacccctggaggccggcagccctgcctgccctgaagagcctcgttctcccagccgtttgggccgtggtcctgtcgtgggaggcgacggtgagggcggcccggggtcccgacaggggtgtttgtccctttggggacctcccctgtgctgtggccccggcccccagatggagctccccatccccacggcagcgctggggctggggctggtgaggagcctgtgcacggcccccaccgctatcctcagccaggagggtgcctggtccctggggagcggcctgcacctgtttctggagaatgctgtcctgccagttgtcatttggggcgggcggtcggagtccacgtcctcccccagggcggggccctggccttgtttcttgtagggacgatgggaagccctgtcctcagccctcccacccgactcatgcaggagcttcctgtccttggggtcatctcctccacaggggccttagcgtcagtggggacaaaggcagagttgcctgtcttcaggttgtgggcaccgactgagcttcgtcccggtagtggctggctcttgtttcctgcctggacca

SEQ ID NO: 62646 - DNA, 1436 bp, Homo sapiens
tgccagccctgctcccatgtgggctcccagctccccaggtagggacgctgaccccgggaggtgcctttgcctgcatccactggagcctcaggagcatgcgttccgtccccacgggtcacccccactgagcccaccacctaccgagaggcacctcgagaccctgtcctgccacgggtgggctgtcaaggccagcaccagagacccccagcagacctcagtggccgcagatggagcggggcggcaatggtcacctccgggactcagccctgtgctgagccccgggcagtgtgatcatcctggcccttctcgtgcacgtcccctggctggatgctccttgctgccctcacggggtgtgtgtgtggcatacaggacagggaccggccagttggccctgctcattaaccacttgtccccacagggcagtggcggcctcacctctgcaattctctgaggctggatctaggccaccgccccgtttaaaactagggcatcggctcccagggagggcggggagctgcacagttggacttgtgggggtcaggcatggatccacacagcccggggccctccgcaccctgcccctccagggagcccagaggcgggcgtggctgcagcctggctctgtggcagtcatgagtcacggccactcttgaggcgccgccctgagagtcagccctgtggtcacggctcctgctggttcccattcgcgagcacctgaaacagcctggcccacagcagaggcccggggggcacatgcagctcacgggagcagcacagatgcttggccggcggcaggccctacaggagcagcagcggcccagggcatgtccctggggtcaggggtcagagttcggcatgctctgcgggggcctcaccctgctgtccctcggcctggcctgggcacactccttggtgacagtgcccctgcacgcccccccccccccccggttattcagacagggagccaggatgggaaccacggactgacctgacctgcgtcctcggggccactgcactgggtgattcacgtgtgcccaggccctgaggtgggccggacctgggagtggcaggtgagcgttcctcccaagagcctctggctggccgcagcaggccctgtccctgctgtcctcagtggccctggacatgataacccccctgccgaggtctggccggagccagcacccacggccgagatgcagtcagccctggctgggcgctgtccctgggggtggctgctggtgctgccctccctccttcccaccacttcttgctcctctttcctggggccctcccatcggagtcttcctcctaaatgcagttccctccctctaggggaacgcgggctgggagcctattttttttttttttgagacggagtctcgctctgtcgccccggctggagtgcagtggcgcggtctcggctcactgcaacctcc

SEQ ID NO: 62647 - DNA, 1124 bp, Homo sapiens
gcgtggtgacgggcacctataatcctagctactagggaggctgaagcaggagaatcgcttgaacttgggaggcggaggttgcagtgagccaagattgcaccactgcactccagtgtgggcgacagagtgagactctgtctcaaaataaaaatacaaaccctgagcttgggagggtccaggctgcaatgagctgcgatcgtgccaccgcactccagcttgggcgacacagtgagacgctagacggtgtctcaaaaaacttaaacagaaaaatgtagaaaggattgtcgttccctttctcgttttccagagggcagaggactctcggcccctgctttttgagcaccaggccgagtttcagacctcgggatggcctctccagtctgcagctcccggcagcctcgggccacactcccgggatccccagggactggcctgggactaccgggggtggcggccgtggctctggctatggggagggaggcagagccgcggggcaggcgtggggtctgctgtgccgggtatgtggggcgtgtgttagactttggacctggcctgcggggtcaggccgtggtgtatgatgacgccacgccgctctttctctttcaccctggcctcctgcctggccctcccctgggtcggcatccctggggccactcctgcccgtgcccgctgctgtggggcctgggctccaggcagctcctgtctgctgctgcaaacaggcccccaaggtgcatggtgaggagacccccaggctagagatgggcgagagcggtgggcgagcagactgcgggaaggcagctgggcctccacacgcggagccctccccaccacgtgcatgcacaggcgacccctgccgtgctccgacggagggcgccgggactggggagggtcagcgcgacagccctggcgtttactgaagagctgcctgcctggctcgctgccctggtggccgctgaattctcccaacgccccaggacagcaggtgctgtggccccatgaccgctcccccacatggatgaaggggtggtgcacaggctggtggagcctgggagagccagggcagcctgcggccatgcggccatgcggccggcgtggggctgaggtccctgtacagctgacagagt

SEQ ID NO: 62648 - DNA, 2442 bp, Homo sapiens
ccattttacaagtggggaaatgaggcgtgaaaggagaggcgtctgggttactccgtgggtctggggtccagggaagggcctgtatgggggagggagctgggaggggacggtgtctggctctacccctgtggggtggggaggtggggctcccctgtatcacaggacatcccccctgagaggtccctcatatgtctgggtcctgtgggtgggggactaactgcgcaatgtagttaggtgctcaataaacggagttgccgctgaggtctgggctggggtcttgttcctgggatcgggaggggctggacgcctgtgtgttctctcctgacgatcgctggcggcagcctctgggctggtcctaccagggctcaaaattcccggcaccactggccttggggatctgggggcggcccctctgcagacaacagagtgacgggggcgggaccgggctggggctggggccttcctggaatcccgcagggcctggggacctgttcacttggggaggctgggagccaggcggggtccgggttccacgaaggccaggtccagtcagtttctcaggtgaggaaaccgagctgacgcggggctggcggcccggaggcaggctcgggaggtccgggcctggggactgggcgggcacgctgcgccgcggaacgctcgggtcgggcgggcgggcgggcagcccgggcgcctttgggggccggaccgtcgcgcggcaacgcgcggagccggcggaagtggggctcgggtcccgcggcggggctggaggcagcgagcgccgtcgtctgcccgggcccgcccatcggggtccccaaccccatccggaccccgccgcccgagcgcgcggccccggaagcacccggtgagcagggggggtgggcggcgcgcggcgggacctcgggcagcgcccctgcggctccgggcctgggctgggggctccgcactcccgcccgcggcgccgctgctttctcctcccagaagtggggccgcccccgggcccgcgccgacctgggcccctgtggaccctgtgcaagggcggtcggcggcccgggcctggctgtgggcccttcgcagttgtcccggtttgcaggaaagggcaaaaaacggaatcgtaggctcttcccaaatgagaggggaaggccctgcttgaggaaggcaagcaagtttgtttgtttgtttgttttgagacggggtctcaccatgttgcccaggctgaactcgtgtttgtttttcattatttatttattttgagagggagtctcgctctgtcgcccaggctggagtgcaatggcgcgatctcgggtcactgcaaccgctgcctcccgggttccagcgattctcctgcctcagcctccccagtagctgggattacaggtgcccaccaccacgcccggctaatttctgtatttttagtagagacttggtttcacccccatcgaggctggtcttaagctcctgacctcaagtgatccgcccgcctcggcctcccaaagtgctgggattacaggcgtgagccaccgcgccaggttggtgtttatttttcaaacaaggcgctgggaaacgcaaattctccagagctcttgtggagcggtggcagggaggggcggctcagccagagatggccctggcccgtcctaactgggctggggtgcccccattccctcattcacggggaggagagggaagtcttagtcttactactttatatggtcgacctccctacctgcctggtctgggaatggcttctcaagagcactcgggctcattcttagcagaggaagctcttctggctagcctggcgcccgtgtgtgtgtgtgtgtgtgtgtgtgtgtgtgtgtgtgtgtgtgtgtgtgtgtgtgtgtgtgtgtgtgtgtctggctagcctggtgcccgtgtgtgtgtgtgtgtgtctggctagcctggcacccgtggctagcctggcgcccgtgtgtgtgtgtgtgtgtgtctggctagcctgtgtgtgtctggttagcctgtgtgtgtgtgtgtgtgtctggctagcctgtgtgtgtgtgtgtggctagcctggcgcccgtgtgtgtgtgtgtgtctggctagcctggcaaccatggctagcctggtgcccgtgtgtgtgtgtgtgtctggctagcctgggacccgtggctagcctggtgcccgtgtgtgtgtgtctggctagcctgtgtgtgtctggttagcctgtgtgtgtgtgtgtgtgtttgtgtctggctagcctgtgtgtgtctggttagcctgtgtgtgtgtgtgtgtgtgtgtgtgtgtgtgtctggctagcctggcgcctgtgtgtgtgtgtgtctggctagcctggtgcccgtgtgtgtgtgtgtgtgtgtgtgtggctagcctggcgcccgtgtgtgtgtgtgtgtgtgtgtgtttcctcagtctttaaagatgctcacgttgctttctcccgtc

SEQ ID NO: 62649 - DNA, 3651 bp, Homo sapiens
ttcttcatcagccaggggatgaccctttcttgtcccaggaggtgggaactaggcagcagtggcccacggctgggtctggagagcgttttactttgtttttcttttttaaaaaagtttatttttgtgaagaccataagaacatttttaattgtttatttttgaggcacttttttttttttttttttcctgagacaagagtctcactctgtagcccaggctggagtgcagtggcacaatctcagctcactgcaacctccgtttcccgagtttaagcaattcttctgcctcagcctcctaagtagctgggattacaggcacgtaccaacatgcctggctcatttttgtattttcagtggagagggggttatcacgatgttggccaagctggtcctgacctcaggtgatccacccacctcagcctcccaaagtgctgggattacaggcatgacccaccgtgcccggcctcagaaagcgtttctgatttatgttctcaggaaaggaggagacggctgctcaccactatccaccccccgcttccaggcagtctcagaaaccgaggaggaaacatcacatctttggtgcttcccgtccctggagtgaggggcctcagggacttcacagccagggctcaagtctgggcacaatgacctctgagcagaagaggctctccctgacccgccaggttgtttccgggttaatgcctggggaacttggcaaggcgccatctctacaaaaaatacaaaaggtagccgggcatggtggcgcctgtagtcccagctactcgggaggctgaggctggaggatcgcttgtgccggggaggtagaggctgcagtgagccgagatcgcgctactgcactgcagcctgggcgacaaagggagaccctgtttcaaaaaagaaaaaactggtgcgtcgatgtggtcgccgcttagtcaggccatgtcttcagctctgggggacgggaggtcactggaggtgtggggctgcccgtcctggcgtccctctgtgtaagcagcacctgctcccggaggcacagccctggtcggggcccctctggaggagggttcttgccgggctctgctcctcgccggcggggcagacgtgacgggctccgcacccggtctggagagggctgcgctgggtcggcgctgacgttactgcttttacttacgactgtaacagcgctactgaacgcagagcacgtatcacaaagctcacccgttccgagtgagtaacttcaccgagagaggcaggaccatccccacgacggtaggaccttctcgtcaccccagaaagaaccacgtgcccactcaacccccgaccccacgccggggcccgcggacgcagccgcctcgctcgcccacgcacctgcggcagccgggcccggcagggacgagggctcggcggcgcccccgggaagagcgcggtccgggccctgggtccccgtccaggaggcgccgctgccgcagtgagcacgtcgggccgggtcttgagctcgcgccggccgcgctccccgcgtcccgagctgtggcggccgcgtccccgggcggaaggctcacgctcggtgacgccgcgctgtcccagaacctcagcgactttgcagactcactggtgacccaacggtgcgccccgccgccgccgggcggaagtcccgcccctgccccggagaggaagttccgcctcatcgagcgccgattggccgcaccgccttagagaggacgcgcccggggccaccccgccgctccctccgagggttctgcggaagcaggcggcacagcctgcgaggggctttcgtttcccggactcagccgcatcgcctcggctcgggcgcgcctgcatcctgccgcccgtccgcgcgttgaaggggcggatacaaacaacgtggacttccgagcccctgattggcgagcgtgtaggaaaggggcggggttagcagagccgtgatggacatgcaagcgacccaatggcgccggcgacggggcgggcgaggacaacggcgttgtgggccgggggcggggcggccggcggctctgggatttctctgggaggcagccgcagggaagggaatgatcttggtgaacttataatcgaaccaatggttccgggaaagcaggaggcgagtggccaatggcgacggcgatgaggcaggcgtccgctgtctccgcaacgccgtgtgggaaaggcgggggaggggcggtcatgacagacgtgcagacaggccaatggctgagggaaggagggcggcgggcgacctctggtgactacgggaaggcagggcggggtggtgaagaggcggtgcgaccggaggtctggcggcgccgtgtggaacgccgtgagggcggggaagtcgtgacggacgggcgggtgggccaatgggctcgggagggcgggcgaagggtggccaatggcggcggcgcggccgggggtggggcggcgcggcggccctggtggtgcgggaagcggcggggcggcggcgaggctgaggtgcgcccgggcgcgggcggggcggggccggcgctgggcttcgggcgcgcccactcggccgccgtggggcggacgcaacgggcgcaggtgcggggcgcgggctctctcacgccgcggcctcacccggcggtgcttcggcaggcggccggcgcggggcgcaggcggcgcggccatgggctcgcagggcagtccggtgaagagctacgactacctgctcaagttcctgctggtgggcgacagcgacgtgggcaagggcgagatcctggagagcctgcaggacggcgcggcagagtccccgtacgcctacagtaacggtaaggcccggcccgcggcgcgcgctgctacgcggggcccgagcccggcgagctgggcacggagctcgccctcggcccggcccttccaagcgccgccgaacgttcccaggaacgcctttgcctggcttccagactcggtagctcggtggctgcggggtgcccgtgctccagtcccgaggtgacgccggggggcaggaggacggaccagagggacgcgcccagcggggacggtgccatggacccggggtctgggggacggtgtcacgggtccgggatctcaggggaaggtgtcatgggtccgggatctggagcccaggggaaggtgtcatgggtcctagagaaggtgtcatgggcctggggaaggtgtcatgggtctaggatcatctggggtccgagggaaggtgtcatgggctcgggggaaggtgtcgtgggccggagggaaggtgtcatgggtgcaggatctggggtctgggagaaggtgtcataggtccgagggaaggtgtcatgggtccaggatctggggtccggggaaagatgtcatggtcccggtagaaggcgtcatgggccaaaaggaaggtgtcatgggtctaggatcatctggggtccgaggaaaggtgtcatagatctgggggaaggcatcatggtcctaagggaagctgtcatgggtctgggatcatctggggtccgagggaaggtgtcatagatctggggaaaggtgtcatgggtctgggatctcaggggaaggtgtcatgggcctaagggaaggtgtcatggtctgggatctcaggggaaggtgtcatgggtctaggatcatctggggtctgagggaaggtgtcatagatctgggggaaggc

SEQ ID NO: 62650 - DNA, 2080 bp, Homo sapiens
ctcggcctcccaaagtgctgggattacagacgtgagccactgcgcctggcctgaacgtttgtttttaacttccagtggcatggctaaaatacactagataggtggcatcactggggcttgcctgcctgagcatgcctcttaatttaggtggttaacagagtgagtgagacggtgtggtcctcatcccctctcatgggggcctggacccagccgaatgggatgtggccccagatgaactgggagcagtcagcatccagcctccccagagtccatctgcgcttcagggaatgccatctacgctggcgaacttacctctcctggtccctgccctctccccttgctttgtttcttgggctcttgtccgtcctgtctgactgccctgagcgtctgctatttgctgaattgtctgcctttggctgctgagagtgtgggcgcagcatcccccactctctcaactcgggggttggcagagcgtgggattacctggactgaggctgagcgcgcttcctcctggcatggcttcagcagtgggcagcagcaccgggggctctggaagcttgtgctcctggcttcagcctggaggaggggttggaaagggccagggaggaagagctctgtgtccattttgaggtgggggaagtgtaaggcccactggggcattgggggctcacacgttaggcccctgcacctgccgcctcctggtcctgcacttgacagtgactgccccagaattggtaactcctgactcaggtggtgggcggccaagttgattgtgaaggtggcgttgccttctaaagcttggctccaggggcgctgcgcactcccaggaggctggcggcgtgcgtgtttgtgcatgttcagaagagcacgggaaggattgggtttcatcaatcggtgttttcccaggacatgaaggcgtgcttctgagggccggctcagccatgctggccagctcgcctacccaactgcaccacacagccaggagctggagagacaggaccctccttcctccctgtccccttcgtcgggctgtggggcattgccacacttcctctgacatgctcactgaagtggggccagtattgtgtaagacgtggagacctgcctgcttgcagagacttcagaggctcacagtggcttggaccagaggcagagaggagagtccactcttagaaagacaccacgtgctctcagggcccggggcacacttccaggtccccgcaggagtcctgtggcctcgagcagagaaggaagcgcctctgggctgtggaacgcgctttctgtgtctaaggtctcaaggttaagacgtgcacagcacaaggagcaggtctttgtggtcaggtggcagcttgccaacctcaggggccagccctcttcatcagggtgaagttggtggatctgagggtttcccaagggggctattcagggtctcagaagctcaggagcagctggttctcaggactcagcatcttgagaatttattctcctttgaaagagttgtagcaggagctttaggcctctggccctcgtgggaaggacgtacgtgttaacctccattgctttctctcctttgttgggaggtgccctctgtgtttccagcttccgtgtttcttcagggctgcctgctgggcagtgggtgcccttggcagggaggccccttctgtgcaaggcttactgcttcagcatggcccacagctccttcagctcacaccggatcgcttacctgcctggaagtcttgtctggcatgttcctcagacaggtgtgtgagcgtacattgccctctccagcttcacaaacaaatgagtcatcgaagtgacctttttcttagtactggcacctgaggcagtggcgtgtgaccacacgcccagcacctgtgggagcccctgtgagctcttccgtgtctcctaatgtgggtgtgcgctgggtttctggatctctaggtctggaaaggctttcctttctttgacacccagcagtgatcttagggagtgcttcatgctctcttcaggatggaacagagcgctttgcatagagtgcccctgggtgatggtggcgagttacccggcaggaattatgctt

SEQ ID NO: 62651 - DNA, 1524 bp, Homo sapiens
cacggcagacacccatgctgggctccccacagacctccgtgcagcgcagggggctgacatgggccatgttgatgcagagcaacaggtccagcgactgtggcaggatcccgccccagtgctcccagccccacgtcacgtccaggtgtagcggggccttcacgttggtcaggccctgggcttgcgtggtggccgcgatgctgcaggaggcgaacgcttgggtgggggccgagtcctgtgcacccgcctttccgacgcccccacagaatttcttaggggaggctggggggcacgttgaggagcggagaccaaagcggctgggaagggggaccccgaggtccacccacttccgcagccgcgggggccgcacagctagggcctgccccgggggcacccccaggctcccaccccgcaccctcagagcccgagccgcatccttttcctccggggctgcgggccgtgggctcttgaggccccggaccgccgcaccgatagaagtggccgccccgggggccgcacctgtccaggcagcgctggtccacgtccgacggctgccactcggccagggggaaggcccgcgcgaagtgcgctgcgtgctggccggagcccgaggccacctcgaggacgcggacgccacgctgggccggatccaggtactgccgcagcacgtgcaagatgggatccttgttccgctccgcggccgccgccaccagcatcgcggcagcaacaactccccgccgcggacgcggcgcgggtcgcgtcgggggcggtggccgggcttccgcggggcacgtcgggagctgtagtccagataccgcggggcacgtcggaagctgataaactacaactcccaggagcacgcgcgcctcctgttaaaggaccagcagtcgccagaggcacggtggggagcggctcagcggtgtgtggcggtcccaggcaggggactgaacggcgagcttggcttgctggtttacaggcgcctcagctcaggcaccctgtcgcccatggccgtccagggttttcagggcacctgtgtcactctccgaaatttgtgtcagcgctgcgccagactgggcgccttcccttggtttcgggttttctctacttttaaatttctggcgttagcgagagttcgatgttcaaatgggaaaaaaaactaagtgcgccgcccgggaatcgaacccgggtcgcaagaatgggaatcttgcatgataccactacaccagcggcgctgtctaagacagttgctgcccgcggagacaagagactgtgacgcgggaagtcctccgggcgtgcgccgccgctggcgccgggctcagcgcaagggagctggcgactgcataggaggacccagctggcgggaccgcgagggtaagagtctcgcggtgccccccagtgccggaggggaaggagcgggcgtgaaggacgcgagctggaggacagtctcgattcgggcctgagccgtggaagccgttggccttcgtgagccgatgggggcgaggccctgtcggggcggggctggggaga

SEQ ID NO: 62652 - DNA, 2423 bp, Homo sapiens
cgcagcacagggatccagcacagggactcctccccagtacagggatccccccaagcacagagacctccagcacagggatccccccagcacagggccccccaatacagggatccccccagcacagggatgcccccagcacagggcccgcagcacagagccccccagcacaggcacagggacccccccccagtacagggatccccccagcagagagacctccagcacagggatgcccccagcacagggccccccagcacagggatccccccagcacagggatgcccccggcacagggcccgcagcacagagccccccagcacaggcacagggacccccccacagtacagggatcccgccagcacagagacctccagcacagggatgcccccagcacagggacccccagcacaggttctcctccagcgcttgtcaaaggtgggccctggggctccgaggaccctgctcgcacatcgccgctgaccccgcagggcccctgggtcctcgccgccagcagtctgagtgcggtgccccgacactgacatggcctccaggcagcaacggccttcccgggcagcagggcgcctcgtccgccttggcctcgggcctccgggggctggggcggggttgctggcggctccgcccccgcctgccagtttcccaaagggcgcaagcgccgcctccgccgcgtgtccggggtcagcccgagcccgtgcgggccctttaagggccgggggcgtgtagcgggcccgccccctccccgcggcgcccgcagtccgttaagtgcgagccccggcgcaggggccggatctggccgggggccggcggcggtgtgggagcggcgcgtcatgtacaccatcaccaaggggcccagcaagctggtcgcgcagcgccgcacaggtgcgcacgggccggggaacgggaacggggacggggcggggcgcggcggcggctgaccgccccccggtgcccgcaggtcccacgcagcagcaggtggagggccggctcggcgagctcctgaaatgccggcagcccgcgccgccgacctcgcagcccccgcgggcgcagccctttgcgcagccgccgggaccctggcccctgtcgaggtgagacgcgcgcggccccggcccggcccggcccggcttcccctcccccgccggccgccctagagcggagggtgaccttggggaaatgttagtgaggtccggccacgtgctgcaggcggggcgggcgctccgggcgcggggggtgcgcgggtcctgcccactacgcgcccgcgggcctgcgcctcgcacttccgcctcacctggccgggcccgggcccccagcggggagaaagccggccagttcctgggtcgcaggggcctccagcgtccgaggtcggtgcttcgggcgaccttgggttgctgctggaaccctgacgtgcagcaggcccaggccacggttcgcggagagcgtcgggcgctggtcctcaagatctcccggctctgcccttgcagagctcagtgggggagacgtgcgtgcgcttccctcgggcagggccgctgccctcctccgcccttcaccccagacaccctggggcagtggggcctccccccatccggttgcttctgcttttcctaacccagttaggaaactccgagaccacaggagcctcagtccggccactgtggcctccccgtgaccatgacccagaggttggacagccccgcagggctggacgtttgactttggctcagttcctccaccgttcccttcatttatcctgtgcctctcccaggcctgtggattttgctgtggccccaagccggcccgaaggctcctggaggtggtagggtcatggcctgaggcggtgctggggaggagagctcgggccaggagttcagggcagctacaggtgggggggtgccgagccaccctcagcctgccccctgcctacctctcagaaaggtgtggaggttccagcggggcgggggctctctggggctccatcctagtgaggtaagtgccctctaccagaggcgccttctggcgggaggtgagtgggcccctaggtgcttccagcatcccagctctgctgggacgctccgcggacatcacccttggtcctcgtggccgctctacttcccaggggaggaaaccgaggcacacctgtagccaccacctggtccccaggcagggagcatgaggctggagtggcccagggtgacgccgtctctcttaacctggggaaaccacctttcttctctctccaagaccccactgctagggagggcaggggtaaggctgtggcacagttaggaggagttagggaagaagatggaaatgcttcccagagttctccatgggaccccaagggtcccagtgggcaacaccaggcccactggctgttgtctctttttttttttttttttttttggagacag

SEQ ID NO: 62653 - DNA, 5006 bp, Homo sapiens
gcctcccaaagtgctgggattacaggtgtgagtcaccgcgcccggccacctttgtttgtttttgagacagagtcttgctctgttgccaggctggagtacagtggcgtgatcttggctcactgcaacctccgcctcccaggttcaagtgagtctcccaccccagcctccggagtagctggtattacaggtgcccgccaccatgcccggctaatttttagtatttttagtagagacagagtttcaccacgtatgctaggctgatcttgaactcctgacctcaggcgacccacccgcctcggcctcccaaagtgctgggattacaggcatgagccaccacgcccagcccagatacacctttgacaagttcttcctcctggtgggagatggataggggaggcagtaagataaactgaggcgatataagtaataagatgaaacggggccatgtgatcacccgaccccagggcagatggagggtgtggggaccgccacaggaagggacaatggaatgaaccccacagggcgagaaggggcagcctgcaagagacgggggtggggaggcccagtgagggcaggctgaggggctggcttgggggctgtactgggtcagggccatggactctgttgttggatttgctatgatatcctggtgctgcccccacccagcatgtaatatgctcaggtggattctctcccaagcccagcttcatgggctgaaaaagggatgggctgtggaggggagaggagaggatgcactccacagccttcacctccctgggctgaagtttgcccggagcagtgtccctggaagtgggagaggttggcggtgatccataggtgctcgccgggccggtgccctttcccccagagagcagcagccttacgtaaccagagcccctggggcggtgcctgcctcctggggcccatctctgcccgagagccgccacctccgcccttcgattcacagcccctggcaatgttcttgtcttcttagacattgataatccaacctccaagctttcttggagtttctggctttccgaggtgggagtgggttgcaggcaagggggctttccaagtggacaaactttattccctgtggtttgtgcagaaactcaggcagcgggcaggcctgggaggtgcccctgcccctgtcccatctccacctgcacgttttaagatcctctgtggccaccagaccctgccagccctggggccggcaggaccctgcgcccctcaagacactcctctttattttagtgcccctctcagctgaggaggaaccgagagcggcgctggggcacctgagcccaggaaggcaacaggccggccgggaccgcgagtgcctggcggagcaggcgcagcccaggactcccggctcccacctccggctgtaggtgcggccccattccctccacggccctgtcccgggctttgtgtgctcagggctcggccagctggggccgctcatccctgccctgggcccggctggccgggacgggcccaggggcccaccagacgttgcgtgcggcactgcgggagccatctcctttggcatcgccccttgtctcgggccggtggggagtgggcgagggttatagtcactctcccgactcagggactgcccatcccggcacccagtcctcatcccatgggacgtgggggcagccagggagagggcaaaggcccccgttcccgtccaggtccatccgtccatggagggaaacatcgtggagatggaggtgcttctgtggggcgagaatgtggcctagaactacacccagagtgggggggttggggcagagagacatggtcatggactgggtcgtggctcaggtcagaatctgggctgctgatgggatgcaggtggcagcatgggcacctgcaagaccctcggggaggggtactgagtggggcccgaccaaaggtttgggacactctaagactgaggcccccaccctacagtcactcacttccctcaggacacagggctgcaggtgtgagctgagctgccgatggcttggggactgcaagagaggcctgggccaccggctgctgtgggtggctgctctctctggttcaggaagtgcctaggctggccaagtctggggaaagtgggctggcccggggctgctcctgagttctgccaggcagcaccgcacctgggatgggcaccaaccatgtccgtctcctcccttcctgcagtccagggccaaggcttgtgttcaatcgtgtgaatggccggcgggccccctccacgtccccatccttcgaggggacccaggagacctacacagtggcccacgaggagaatgtccgctttgtgtccgaaggtagcgagcggggccagagggtgcggcataggctgctgggtcgcaaaaccatggacccgggatggccccacttcaagctgacccacagccgctgcatggctgtgcttttccttggcactctgcccttgtgtcctgtgaccagccctgtgtggggctggagtccagggtgaccatcaggccctgggtgggcgatggggtgcctgggacctggctcagcccgactgccctcctcccacagcctggcagcaggtgcaacagcagctggatggtggcccagccggtgagggcgggccaaggcctgtgcagtacgtggagaggacccccaatccccggctgcagagtgagccccccaaccctgtccccccaggagagaccccccagcccctctgatcctgacccaggccctgccaggttcccaccccaggggatgagggaggggactcttgtgcagaaaccccttcttcccagcgcctgccgcactcggagtccgggtgagcggcttgtggttagctccaggggagacttgccggctggcctgggaggcagcatcactgcccagccttctctgcccacagactttgtgcccattgacctagacgagtggtgggcgcagcagttcctggcgagaatcaccagctgttcctagtggctgctgggagggggcgctgctacacggccgacctgtcgccaggagagaagcatggcgccctgcccacccactgcgcctggctgggtgccggccacacctgaagtgccagcatttggacttttgcacctttttttcccttggcccggctgtcccaaccaagctgccatggccaagggccgaacccgtctgacctcagccctgctcactgtgcccagggaccagcgaccagcccctggggctggcagggaggagctccaggctaataaagtggagaaactgtctttttggagtgtctttgacttgggagggtgtagggggggttctcatgtccagttccagtccacagcctgggacgccaggcccagcacaaactccccttgtagccctgttccttcaagccgttagcttctcacccagctgccctgcgacaggtaggagggacgttagccagcccaccttgcttggaagtctggggaccccacttggttcctctttcctctcccgttggcgttgactgggaccgaagccgagactcaaggcctaaagacattaaatggccccggagtgcagtccaccaccccccactaccggcactggggctgtgtctcagaacgccaggtcccattctgaatccgccgggcccggccgcaggacactgggcgaaggagtacgtggggaacctgataggacgaacgtgggaaccagcccctccgcgggcgcccgcactaccttccctgatggacggggatgacccagcccacctgagtcaggacccagggtacccaggtgtggagcaggggcctctggacggcgagagagcggcagggtgaggcccggccgtccgtggcatggccaggcctcagcgcgacctcgcctcgctgcttgcatgcggcgggagccccggccggccgaggcgctgacaggtgggcgcggcggaggatccgcaaccggcgcgggcttcgaagccggtcgggctaacagggggctgccttgggaggcccgcggggcaaagggcagcgggattcgcggctggagcaaccctggaggccgctgacgtgagcggggtactcccaccggggaggtcacgtggccagggcgccgccatgacggcggaagtaatggcggaagtggcaccgttgccaggcagccgttgcctggcgtcgcggggcgtactctgcgctgggcgcgcggaggcctaggcgggaagctcgagcggcggcgccatggcccgaggtagcgcgcggctggcgggggtcccgaggatcccgggttccggggttccggggtccagggtcggcggccggagcgctcagggcccccgcctaggccctgaggccagagtccccgctcaggcagggtcccgtctgccgggcgcccaccctcgggctcccggagcttggcttccctcgggcgcccggcctcgtcccgccagcctagctggcgttggcgtcgccggggaaggcgcggagagccccggctcctgcctggtccccgaggcccggcccagccccgcagtggccccggctcgcgtggccgagtcccctgacgcccggcgcccgctccccgcagcgtggcagcacccgttcctcaacgtcttcagacacttccgggtggacgagtggaagcgctccgccaagcagggggacgtggccgtggtcacggtaggcggccgggggctcgcccggagcccacacccctgccctgcccccaggagagctgccccgcccccgagggccccctcgcccccgctgcacttcttctgggtgctgtcggtgatgcgggctcccgcttctccaggacaagaccctgaagggcgccgtgtatcgcattcggggctcagtctctgccgccaactacatccagctccctaagagcagcacccagtctctggggctgacgggacgatacctgtatgtgctctttcggcccctgcccagcaagcacttcgtcatccacctcgatgtgtcctccaaggtacggagcccgcggctgggggctgcgtgggagccccggcacccctgcgg

SEQ ID NO: 62654 - DNA, 1501 bp, Homo sapiens
caggctgctcttcacggccgcccgcaacgagatccttgtgtgggaggtccccggcctctgagatgcagcagggactgtggtggtgggcatcacgcctggtcatgccaggcacctggacacaggcttggcagaggcgccaggttgtcaatggcctcatgctgggacaggccaggattcacgtaaatcgcctggagcaagctgttgtaaatttggcgccctgtgaatactttcatacctgttgcccttttgcctaagaaatctttaatgtttctatcttgtaataaacatgggcatttattgcattattgctgcattgttgcactggctgtctctggtcactcctggcctgagctcagcctctgcccgtcccttaatcggctgtttgtcaaggcccctgtggtgccgtgaagcaatggccgctcggcctgccagggcgccaggaccctgcgctgtccgccgtggccggcgcgtccacacggtggcgcgccgcacagcctgtccgctctggcccgcccggctcgctggtgcggctgtgcgggcggggccggaagtgtggggacagcgcggggccgagaaccggaagtgcggggcgggcgcgggggcagagcgaaaggcttgaggaccaggtcggggccgggttccgggtcggggagcggctccgggcggcagctatgaggcgggacgtgcgcatcctgttactgggcgagggtaggcgccggcccgggggtctcggagctgcggcggccgtgaggcggggtgagggtctcgggggtcggggggcgccgtgaccttggccctcgcgctgaccgcctcgccccgcgcagcccaggtggggaagacgtcgctgatcctgtccctggtgggcgaggagttccccgaggaggtaaggggcacgcccgccgcgggggtgggagcgggcccagccgggggtccctggtgagcgcgcgggtcccttgcaggtccctccccgcgcggaggagatcaccatccccgcggacgtcaccccggagaaggtgcccacccacatcgtggactactcaggtagcggccgtagcctcccgggggcccggcccgcagcggtccggcgggcctgctgggtccgcagtggagtctctttgtccccctagaagccgagcagacggacgaggagctgcgggaggagatccacaaggtacccgtggtgcgcgggacgagggaggggctgggcgcgggctcggcctaatccgcttcgcagcctgggggattggaccgaggtgctccgggtgtccttggccctgataattctgtgacctccgcactgagggttgtcggggcccctacagcgcaccccgctgggagccggcaccgctcagtccagtggtgctccagggataacaggacccttccccgcgggctctccctccctcctgccggggtggcagcagcgtttgctcttcctgtgggctctgtgtgcgccacgtccccgtgctgtgtgctccagcccaccgtcccggcctccggg

SEQ ID NO: 62655 - DNA, 731 bp, Homo sapiens
agcggctgccgtggaggtagtccagtgtgctggagctgcgccagagcgggggtgggggccggcgctgagacgcggtgctagctggaggcggttcctgtccggggtgtgcgtccgcgtgcagggtgcgcgcgtgtcttggccgcgcgtggcggcgtgtgcggcaggggcgggcaggcgggcgactcggtgacgcggcccaagcgcggcgccgagcggagcgggcggagcgggccggctggggcggagcggagtcgtccgcagagcagcccctcccggccgcggccgccgaccccggaccccggcccccggccaggctctatggacaggagctcgctgctgcagctcatccaggagcaggtgcgtcggggggtggtctggggagctggcaccgcccccaatgcggccctcctgccgctgagctgagcttgtgcgggaccgagctccccgaaagccccgctcggtacctacctcatccctccacgaccttggtccgtgtgtctgggaccccaggagaggactgactggaccagagctcctggctggagaagggagagtcggggggagggagggagggagggagggagggcgggcagctggctggtcttggaccttggccctcgctttccaggatgggtagggtggaagacgggggaacaactgaggagctggaggactgggacccaggcaccagtgccctgccagctcctgggatcaagcagggtcccagggaa

SEQ ID NO: 62656 - DNA, 1316 bp, Homo sapiens
ggggaggggtctctgcgcgttgggacaggggcggaaccccaggtggtcgggacaggctgttgcgggagcgcgccctcagcgaagcaagtgaggcatctcactgggaaagtcgaatgtgtgtggcggccgccgccgaggcgggttccgaagagacctcagcagggcaggccagggcctacgcgaacgcccacccttaagagcgcggggacagggaactggagcgttcctcccagcccccgacgtcgcgggcccagtgtccccgtccaggctggttgggcgcacgcgcggccccactcgcccccacgcgtgcgtccccgctggtcccgcccccggccggaagttccggcggcggagctgggccgggcccgagcggatcgcgggctcgggctgcggggctccggctgcgggcgctgggccgcgaggcgcggagcttgggagcggagcccaggccgtgccgcgcggcgccatgaagggcaaggaggagaaggagggcggcgcacggctgggcgctggcggcggaagccccgagaagagcccgagcgcgcaggagctcaaggagcagggcaatcgtctgttcgtgggccgaaagtacccggaggcggcggcctgctacggccgcgcgatcgtgagtgcgcccgcgcggggagggcggcggcggtggcaccggggagggccgggcccgggcccggccggccccaccgagggtctggctcctcttcggggcgtgtcctcggctcccaaagcccagccgtggttctcgagcccagcgccgggtgccggagaacgagggtgcgatgctggatggaggccggccgggtggggggagggcaggggccctcgacccttgaggaccccaggtcctaagcccggactctccaaagatttggaaaactttacaaaaccaagtggaatcaagcggataggctcagccagtactccactgtgcacagatccttggacccaggggctttgacaactgagaaacctagtttcttgattctagccagagcgcagaagctgggacgggccgtgggtcagagtgggcacgctgagcctacgccctcatgcggctggcccggccttggtccctagacccggaacccgctggtggccgtgtattacaccaaccgggccttgtgctacctgaagatgcagcagcacgagcaggccctggccgactgccggcgcgccctggagctggacgggcagtctgtgaaggcgcacttcttcctggggcagtgccagctggagatggagagctatgatgaggccatcgccaatctgcagcgaggttggctgacaagctgcccggttgt

SEQ ID NO: 62657 - DNA, 1733 bp, Homo sapiens
gctggagcggttcccagcaggccaaatgggggtggggagtagtgccgaaagagagaggcccactcggtgaagttgttgtccccgaagaagtacagggtgtctgccaacagagacggcggggacagggatcctggcacctggagactccaagcgtccccaccccctaccgccgcctagggctgcctcaccattgcccagggaggtggggtcctgggggtgcagcagctgctccacatactcctggaagggcaagtccactgcaggaaagagacgggtcaggaccgtctggtccagccgccccggtgttggcaaatgggcgggccccaggggtgaggccgcgtacctttgtggtaggagtaggtgttggcggtgctcagccggaccactctgtccccaaacgaagccagcaacctgtcgcgggagcacagggcccggaacctctgcgggggcggggaggggacttagtggccgggcccagcacgggcgagagtggccggggacggacgggcacgcgctcaccgagttgtccgtgagtccctgcaggatgacgggcctgacgaaggcgtacctggaaagaagggcagagtcgcggccaggccggaccgccagcctcgccgccccagccccacgcgtgcgcgcgaggtcaggggaaggcggccttgggcggtcggggcagacgggccggtgaacaggacgcgacctccgcgatcaggggcgcacgtactgctgcacgaactccgcgtaggtgaggtcggcccgacgctccaccgtgcagcgctcctcctccgccacggcccccggcccgcccgggcgcctgcgggcacagctgggtcagcccgcgccccgcccgccgcacgtgaccccaccgcccggcccctcccgggccgctcaccacccgccgtcgccctccgccccggagccgggtagagccacagccgccagcgcccagagcgcgagcaaccgcgacgccggcgccatgagcctgccgccctcaggcagccgcgctgcacgccgggaaccttgggcccatccgccagccattggccggcagcttcgtcgtcgtggcaacggccgggaaccgggacggaccccggaagtgacctcctttggcccgccccggaagaggcctctacgggaggcactgggaaggccgccccgagagcgactatgggcgccgccggttaccatggcgacaaccccgccgaaagcccccgcccgccagctgccccgcgggcctacggcgagcccgccgcgctatggggtgacacgcagtgccgacagcggctctacttcctttattgaggtctcaagttccagcctccgcccgtctcgggcacaagaccaggcggggttctgcacgcggccgcccgggcaagcccagcagatgccccgtcaggagtactcgcagaggtggccgcagcctgcgggacagtgggagctgccttccagccacttcatgatgtgctgcaggtggccgccgtggctgcagccctggcaccacacgaagagacccttgactacgtggtggcagacggcacacatgctggcgcagcggtggcacctgggggcgggcgggagggagggtgcctcagcgggggctgctgcgctgcctgcaggcccctgccccacctcccgaccccactgccccacctgtcgcagacccagccccggctgctcatgggccgcttgcagtggctgcagttgacgtgcagggtggtggaggcctggttgag

SEQ ID NO: 62658 - DNA, 1233 bp, Homo sapiens
cacgaactgttcctcctcgatggcatagatcttgaagatgctacggcctgccacgaccacctgggctgcgtcgcggcacacactgatggcattggcgggagcatccaggtggcagtgcatggtgcggcctgtcagcacgctgccacccagggctgtggtcacacgggacatcttctccatggctgcacaggtgatgaggtcaggggtcaggaggtcagtgaggtgggctggcctggtcagcctgggtgggtcatcagttcagaccttccacccaggttgggaccccagaactgcttggtcccgggctggtcagtcttagtgagccaatccagggctgtctatcagccaatcagcctgacaggcaagctcaaattcactggagtctgtcagtccagcccatcaccctggctgagcggtgaggggacttcctagcttcccttaggcctgtcagtttcatgtctgacttccacggaagactctagctggacattcccggcccaggccacctctcggtacccccatcagccagatctgggcagtcactaaacgctcggtcagtcaatcccagcaggggagcgaggagactcccgccgtccacactgtcagccctgagggcggcggggctctagggaggaacaaaagaggggagggaacagagggctagaggggcccggggactcaggcgatagacgcgggaagggcccagagggacgtcaaggaccgagctacttaaggagctcgaggtgtctggcgggaccggaggcaggagagaagccggcgaccccggagtacagggttcctgggagcggcgcagtggcgcgggggagcggacgctgcgggacgagaaccagagggcccggggcagcccttctcccccgcgcgaaccccaatcttttactaaaagcgcacggttgtccggaaccgccgcgccggaagccgctgtctttcccgtccctcgccggaagtggtcctcttcttacccatccctctcaggaagtgggcacaaactctcgcccgacaccacgaaagttccgggtcagggagctgcgttggcagaggccaggaggggcccgggattggggtctgcgggccgccctgggcgttgccattgcgctgcggtgctgtgcttgtgtgattggtttatttatttatttatttaaacggagtctcgctctgtcgcccaggctggagtacagtggcgcgaccttggctcattgcaacctccacctccca

SEQ ID NO: 62659 - DNA, 645 bp, Homo sapiens
gtagctaggactgcaggcgtgcgccaccacgtccagctaatttttgtatttttagtagagatggggtttcaccatgttggccaggctggtctcgaactcccgaccttgtgatctccctgccttggcctcccaaactgctgaaattacaggtgggagccgctgcgccttgacaatttttatttttaattgtaagatatacatcataacatctaccattttacccattttaaagtgtgcagttccgtactgttgagtacatttgtgttgtgtaatcaagctcctgaattctgtccccattaagctccaatccctcattcccctccccagcccctgctccactttctgtcctcatgaccgtgactactctaaggtgactcacagaagtggaatccaacagtgtttgtccttttgtctctggcttattttgctcagcgcataagcctccaggctcatccaggctgtagcgggtgtcaagggaccagaacttcattcctttttatggcttaataatggacccaccgccagggggtgccgtggctcatgcctgtaatcccaacactttgggaggctgaggtgggcggatcacctgaggtcgggagttcaagaccagcctgaccagcatggagaaacctcgtctctactaaa

SEQ ID NO: 62660 - DNA, 1539 bp, Homo sapiens
ggccccgcccccgctccgccccgcgcctgctattggcggaaagttccgggccgcgccgcgactggccgacacgccgcaggccccgcccccttcccgacccgctccaaggcggccccggcgctggggctgcgcggcaggcggagcggccgcgggcttgggggcttcgccggggccgggcggccggcgcccccggctgctcccgccgccgcccggacccgcgccccgccggggcagcggtggtgagagccccgactccccggacgccgcccgccgtgccatggggttcccggccgcggcgctgctctgcgcgctgtgctgcggcctcctggccccggctgcccgcgccggctactccgaggagcgctgcagctggaggggcaggtacggtccggggggctgtccccgcacttaggacggggtgcgctgcggctaggaccccccaggcgcccctcggagcgcgcagagcgctgggccggtttccccatccgcgaggcggcctcgggagggagcgggggctgcgccgggcggggacccgcccccgtctcagcgccccgtcccgtcctgtccccagcggcctcacccaggagcccggcagcgtggggcagctggccctggcctgtgcggagggcgcggttgagtggctgtacccggctggggcgctgcgcctgaccctgggcggccccgatcccagagcgcggcccggcatcgcctgtctgcggccggtgcggcccttcgcgggcgcccaggtcttcgcggagcgcgcagggggcgccctggagctgctgctggccgagggcccgggcccggcagggggccgctgcgtgcgctggggtccccgcgagcgccgggccctcttcctgcaggccacgccgcaccaggacatcagccgccgcgtggccgccttccgctttgagctgcgcgaggacgggcgccccgagctgcccccgcaggcccacggtctcggcgtagacggtgagtggcggtctggttgggacagggtgggagtcccgaagtcttaccctgcctgggcttggcgggaatgtgccttgtcggccccactgcagaaggaaaaagtgagctacaagggttggatgggcttgtcaggccacacagcctgggactgctggggagggatggcctccccgccctcccttcccgattcatctctggaaagagctggcaggggcagagtggagggaaggggaggccgggcccagcaatcctgggcctctggtccctgaacggttgggggaagagatggtggggacagaatcgaagcctccggccaaagctgtccggggctccctggcccagcggtgacctctctcccctcccccagcccaaccaacaaaagtccagtgtgcagcccggtcaccatggagacgccgctcgcctccctgcagggcaccaggcccagctcttgcttggctctcctggagcttggcgcctgaccctgaaagggatgggctctcgctattctgccccctggccctgggccagggaccccagaccacccttcctctgcccccacttcctatc

SEQ ID NO: 62661 - DNA, 1827 bp, Homo sapiens
ccaattaggtgcattcatccagtaagcctcctaggtaactgctctaggtgcagggaataatgcaggcagcaggacaggaatgggcgctgtcagctccccctagagctcagtgtacatacacccttcctttcctgggagggccgttccaggcccccaggagacaggacacgctgagctgggtggggctggggccaacgtgggcaggcctgtgagactctgcacttgggagctgggggctgtggtctgcggcatacccatgtctggaagcagcctctgtccctgcaggggctctagaccccagccacggatggctaaggaggagctaggccagggcacgcatagacaacccccgacattcacgggtgttcagccctaccctgggtgtggaggtcgtggcccagctgcctgacccagagctcggctcttccacttgcgcttcccacccccagcttcacaaggtcacctccaggaactcagtctttttgtgtgttgttttctggagaaggaaggtgatctccccactcccggggctgtctgccttccctgtagctggcaggtgccagaggcccccgcctgtgacatccggctttcctcccaccacactcgcctgagagccagcatctgtcttcttgggcctgctcaagctctcctccgtgtcagcccctcctccatgcccttctccctcagaccccaccccccatcccttcaccgcccactggggctcatcgctcaggctgtaggagggaaatggaaggatgtcctcccgggctctggctggcgctgggtgtccgagtcagcggagcgcccccagcagtctccccgaggcagagtcatgggggtgctggcgcctggacgctgtctcatcccggggagccgctttcccaccggctccctgggctccagccgccccacgcgagcccccggctggttctggggccaggaccgcccctctccaaggcagacttcccttcattccacgacaaagacgcgcagccccgtttccctggggctctagcccgtgagatcgccgggtgtatcccgactcccgccggcacgtgcgctcccccagggcagggcctgcctgtccccttccgcgggtcgccagcagccagcacaggccgcaaacggcggtccgcagagcggaccaacggagccgaccctcgcaggcttggagccggacgcggcggggcagagcccccgaggctgcagctcgccggaacccgcgggagggcagccgggctgggcggagcgcacagcgccacggaccgaccgcgcaggctctgccggccacttccggtgtcgcgcggcggctcccggcaggaggcagagggcacaccgccagccccaggccaggctgcgagggccgcggacccgagccgggaaggaccttgggcggacgagccgcgcgtcccgcagccatggagcaggacgacccggtcgaggcgctgacggagctgcgcgagcggcggctgggcgcgctggagctgctgcaggcggcggccggctcgggcttggcagcctacgcggtgtgggcgctgctgctccagcccggcttccggcgcgtgccgctgcggctgcaggtgcggggcggggccaggccgggcaggggagctcggctgccgctcagggtctcaaggtctgggcgtggccggggtgagctccgccccgccgtgtggtagttcgggccgggctgcgggcggggcgggagcggccagtggactctcgccgccacccggtccaggtgccctacgtcggcgcgagcgcgcggcaggtggagcacgtgttgtcgctgctgcgaggacgccccggaaaaacggtggatctggg

SEQ ID NO: 62662 - DNA, 1694 bp, Homo sapiens
acagcctgaaggctctgccaggagccatgcactcagggactgaggctggtcccaccgtcttcttcctgccccactgctctcacccagggatcgggttcccaacatcctgcggcactgaagttcccagtgtgcaggaaggccagtgctaacagcgcctgcaaactacccacctgcggagacaccaccaacactgaccttcacccttcacgtgaacagggggcgtgaccaccacagagaccagagttgcactgcccatcgagaggacgtgtgcttggatctgtttggagaccacctcctgctcagtgcccgggaaacaagtggatttctctctcttctccttgagaaccctggcagcccagaaagccgcctcccagctcatccctgccggaagcgctcccagcagcccgcctctcgccctgctcagctctggccccgcggggctgttggacatggacaggcaggtgcacccagaaaagggcgcctgcagcctcccgggttcaagggtagctgtccggcccaccagggcgacgttaaggacagctctactgaggagccactgcggggcgtctagcgggccgcccctactgccctcaaatgaggtggggtccccaccgcacccgtttatgcagatgcaaaggctgtggcttgggggtcctgaggcctgacaaggcgtcctgcgcaggggaaggggaagaggccccggcccgggccccgccgccctccagctgcgacccaggggtcgggttagggttagggatgtgtgggagccgcctctgctgcctcctctgggttgggcaggccggcgcgagcccgcgaccacgggaccctcccacgcagcccgcccggacaccatggggcacaggagcgggttggggggcgccgccctccctggcctcagtttccttgttggtaagaagcgggcctcagtgtctgaggccccgcgcccgggtcgatagagtccctgacggcccagaccgggctcccgggattcggatctcattcctcaggggaggaagtggggcgcagagcaatttccctccgcgcgacagggcaccgagcgcagcctcgaccccgcccgcccaggccggcccacctgagacggcccgatgaagtcatccaggtccgtcagctgcagcgccccgctgaagggcgacgccatgacggccgcactgccgccgcgcgcaggtgtcgctaaacggcgcgaaacgaagtggctggttccgccacgctgccggaaagcgcccccaggacgcatgcgcacctcgtcccggggccggcgccctctgctgacgagccccggcgctgcggctccccgcccacctcgcgggaacccgggacctaccgcttcgtccacctcccgcgcgccccaggccccgggttggggtgcagggggcgcaggggttggtcgggccagcgccgcagctccggccccggagtctctccgccttcacaaggaagcggaggggatctggctccgtccatttcctcatcctctgcgtacctgcggaccaggtgctcccggatgcaacccaagaacccggaacgcgcctggcacacaggaggcgctcagctcgtgttggggaattcaggcagggaagaaagcatggataggcacgaggtctccccttcctggggagccgctcccagggcctccagcccctttttctgttatcttggagaccagtctggaaaag

SEQ ID NO: 62663 - DNA, 960 bp, Homo sapiens
ccacgctgcctggctccatggccggcctgccgagccacgcgtgggtgcgtgtgctgtgagcacgtggtgcgcccccagcccagcatacagaggtacccgcaccgccccacccgggctccggtgcgaagccaccgagccgggtccgcagccctactgtgcacctgcatcctcagtccccgagatcagtccccagggcgtcagctggggagtcaaggagtcagcctgctccgggctgacctgaagggccctgcctgacctaagcctggagaaagagcccgttccaaacctgccccacagatcctccccacagaccctcccctccaggggatgcacgtgaatgcctctgcccgacggtgggggcggggaggggctgcagcactaccaggcccggcagccaggtctgcccgcagcgcgggttagggctggggcctcctcgctccccgcagtccgcgcagacccgcgccccgcacaggcccggtgggcaggccgaccctggctccgagcccctcccgcgcccacgcccacgccaagaccaacctgctgccgggccgtgcagtccaggcccccgatgccgtgcccggcgccggctccagccgcgcgcccgcgcgctggcgacccagagaccctggaagctccgctccggacgcctggcagcgcttccgccctgcaccgctgcgcgcgcagccccgcccccccccccggcccgcccccggcccgcccccgccgcggaagggcggctgcggcggccaatggcgagctccccaggacaggacgcgggggctgcggagcaggaactcgccccgcccacccctcgcgcagccccgcctccgccacgccaaccaatggcgcgcgccgccgggcacgccggctgctgattggcggcgcccggcacgctcggggcgggcagtgcgcgacggcggcggcggcgcgggaggttcggagcgggagctcgggctcgcg

SEQ ID NO: 62664 - DNA, 1647 bp, Homo sapiens
aggtcaggaggttgagaccatcctggccaacacggtgaaaccctgtctctactaaaaaaaatatacaaaaaaattagccaggtgtggtggcgggcgcctctagtcccaggtactcgggaggctgaggcaggagaatggcgagaacccgggaggcggagcttgcagtgagccgtgatcgcgccgctacactccagcttgggtgacagagcgagactccgtctcaaaaaacaaaacaaaacaaaacaaaacaaaaacaagtttggagccacgcggccacaagcctcttaaggacgcctggagctcccagagcccccaggagctcaaagaggcaggaagggtcctccctatagcctctggagggatcgtggcccccattaccttttcaaaatgtcacctctccccgcggtgtgaccctcgaaagctagacgtgcccaggaggcagcagcccaggccccgcaccttccctcccgctccctctggccgccgggcctcagccagcgctgctccctgacccgcctgtgccctcgccagggcccctcgccgccgcctcctgccgcctcccgatatggccaaacacccgggcgcgagccccgcgtgcaggcgccgggcctgggcccctgtggccgtcccgccagcggccgtcttctgtccctgcatttagagaagggggatggcaaagggacccgccagcggatccctcttacaggtggggaaactgaggtaagacggtcagggctggccccagggcgtggcgggccctcggggcagtcgcccagaccacccggacggccccgctcgcagccttcgcccgccccggccaacttttcaaccgaccgtcgcgcgccgtttacttccgccttgggagataatttccgggtcccggcaggaaagggtcagccgcgcacggtggccgcccgcgtgacgtcagcgctcgtcgcagccatcttggctcctggcagcggctgcccaggcctcggtcgtgggctgggcggccatgttggagtcgggcagggctctcatatccggtcactctccactggcgatgatcgattgcatttgacggacgcgacgctggtcgagagtcgctcgcgttgctcgacgttttctgcaactccaggaccgtaaaatatctcgaagacggcgaaagtcgcagacccctgcagaatcagatgatccagaaggatgcccgctgtctttttggtccatttcagttgtaaaccaagaagtagccgggacaggcctcggtgggcttcggagcgtggctcggcaaggtcgaggtcgcgcctggggggacaggtcgatgcctttctccagagatggttttgaggcctccgtatttaaagggggaaagcgggctgcggggtaaggaaggctccggtcctgtttctgagcccacggtgggaagagaaaaggaggggcggggggtggggggctggggtcgccgatgatgcgtccgcaagatgagggcaatggagagtgagatctgacctcgcgtctgtagttacctgcccaacaacacagggagaggcagtaacttgaccggctccgtcttcggcttcgttctgtccttttggcagcctgaattggggtcctgagcttttactttcacaccgtcctccacagtttcctaaatgggatctggaatgc

SEQ ID NO: 62665 - DNA, 1195 bp, Homo sapiens
acttttctcagagctctgctctgtaggctgcgcacgcgggccccgcacagctgtggggtgaagggtctccgccagtggacccggccaaccacatcccacagtgaggcgcaggcttcacttgcagatgaggttccggagctgcccccagacctccgctgggaatcttcccgaacgcagactgagctagtcgagaacactaaaggagaaactccagtctggccaccagccagtcaccttccctcagcccctgggagacgcgaaggaggctcccgggccggctcctcggattttggcaggggccgcacgcggcagggatgtggcgtgcgggcgtccagttacagtgggaaccttcaccgtcagcacagcgctgtgtcggggacagcaggagcgcctcgcctctccaggccgccccccgccccgcagccaggacgcagacccccgacctgcgcacggacgggtgaccctccacctgcccagctctcctgggaactcctgggccagggcccgggccggccccgcctcgcatagccccgagccggtcctggcaggcgcggccgtgcaacttcggggctgcgggtggaaccgggagcccaggagcccaggccggaggctcgaggcggcgacaggggtagggccgggtgcgctgtcgccagcaagccttgtcctgccctgcccgccccgccttgcccgggccccagcaggaaggagggctgcgtgggggcgccgcggccgcgagaccgcgcggaggagtctcgagggagggcgggggtcgtggtgcgcggaggtgacactggcggatgtcccgggcccgcccggcactcacagtacacgaaggctagggccttcaggagcacgatccgggtcagccagaaggtgcccgtgtggagatgggccggagagcctgcggggccacgccccggcgcgggcggcgactcaggctccggatccgagtacccagtcttccgcctcctcagcgactccgcgggcgccgccattgttgggctgtcagggcgcatgtgcggggagggcgcactcccggaggccccgcccattctcggaggccccgcccattctcggaggccccgcctctccctggccggccctgcccacggccgaaggccccacccacaccccgggaggccccgctcacagtcccggaggcaccgccccctccagccggccccgcccacgcgcg

SEQ ID NO: 62666 - DNA, 520 bp, Homo sapiens
tgggcctcggctccttacctggtagacgagggcagcagcactgcagggcaggctctgaggggcttcagggagacgcaggtgctggcctcagactccaggatgctgcggccaggccaggcgccatctgggtgcaggggcggccacagggcagctgtcgccatatcgacagcagccgtccgtctgggctcccggggccacctgcccgccgctccttcctctcctggcttattttccaaacaatttgcttaacgtgattcccggccaagctaaacatgactaatcgtgtttacccggtgatcccgcgcctcctggcaggcggggctggggcccaggaggaaggaatgcctgcatgtgctggttcagggactcaccaccctggcgtcctcccttcttctcttgcagagcctgacgcaccccagggctgccgccatggagcccctgttcccagcctccacgcccagctggaacgcctcctccccgggggctgcctctggaggcggtgacaacaggacgctggtgg

SEQ ID NO: 62667 - DNA, 593 bp, Homo sapiens
gggaggggaccggagacgaggacaagttcgcggaaactgcccgtgcgtgtcggggagagatgcgagtgcaggagcgcccagccgtaaagcacacccccgcccgcccccgcgccccatcacacacgcgcgcgcgggcacacccgggacacacacgcggcggggaaggggcacgcagcctctcgccttccacgcccgcccggtccccgcccctccgccgacccgggcccgcgtcgtagtgggggtgggggtgggggcggcggcggcgcgcgcggcagcgcgaagggggagggggagccggagcgggagggggaggggcgcggcatcggcggctcggccgcccccgcagttgggggcagggaaggacgtaggtgctccccctcccaccccgccggagcctcccgcgagcgccccctggtgcaccccacgcccggcattgttggggagcacgaaaagcggggagcccagtgcgggggcgtggagggggcgcgggcggggtccaacttcccgcacccgggggggggcggggcgccgggcggcgacagggaggggtcgctcgggcgcgcgcgtctcgggccgggggcggatcctcccca

SEQ ID NO: 62668 - DNA, 1196 bp, Homo sapiens
cctgcggcgttggtgggggcgtccccggagagccccggggcgccgggacgcgaggcggagcgggggtccgagctcggcgtgtcaccctccgagagcccggcggccgagcgcggcgcggagctgggtgccgacgaggagcagcgcgtcccgtacccggccttggcggccacggtcttcttctgcctcggtcagaccacgcggccgcgcagctggtgcctccggctggtctgcaacccatatccttcccggccggcggggggcggggggcggggggcgtggggagggtgggggcccggggcgcgggactccctcggcatgcgcccccgcgcgcccctgttggtgggacctggcgtgggccgggcgcgcgggggtgcagggcaggggctggaggaccgcgctctaatttctgagagtggcgggcttggggggccaccgggcgcctccggactcccttccccagggccggctccggacggagaaggtggaagcgaagcggtgaggcccccgcgggcttggaggggagaggagtcggggagggagggaaggtcctaactcctcgcggccccaagggtgttggccaggacgggaatttcccccttgcccacccctcactgtctgaaggtcctgcccgaggcaggcccctcgcgggggagggggaggccagaggagctggagtcaggggcgcaaagttttcagccggcgcctggtggttccgagtgcgtggggagacccgtggggcctgtgagcgccgccagggccttttccgtggagagaggcggtgacgttggttgtgaactcgctttttctggctgaactcggtggcggggctgacttaagtcatgcgcagctgaagggtagggggcagggaggcaattggcactgccaagggggagtctcatctccccagccccttccctggctggagaggaagaggcagcctcttctactctcggccagagcggcacagactgcagagaaggttccagaacagagttgggtcagggccaggggcatttgtgggatgtacacggaggtccagggggccccccagcaggtggccttgggggcgggtctccgcgtgccctgagaagggccttgcgtggtgcctgtgtcagggccgggtctccccaccggcccttctgagccggcagctggggtggccaggccgtggcttctgctccgggcctggggacggg

SEQ ID NO: 62669 - DNA, 1075 bp, Homo sapiens
cctgaaggaagctcttggactcgtgggcaacacgctccaagcacccgaacttcattcttgccggggccagctgcgggcaccctccctggcctggtggaacgctcaggggtggttctgcatactcccctcacctcccccaagggctgagagccgagggcgatgcggccccaccaggccgggctcctggagctgcagaagagacgtcccgttccggggtcaggacaggaggaatgcgggggaggggccagcctgtcaaacactccggggatggatccacagcagctctgctggctgagtccaagccacggtcgcacagtcaaggtcaggcgaggaacgcgttacctttgtttatgcagatgtcggccaggccgtccgtccagccgcctgtgccgagcccgctgtgggaagggcggggactgtccctgcctgtcctcgtcagtgggcattcccctccctggcacggaagaggagtctctcctcagtggctcatgttggcgtaacttggaacaactctaagtcacgcgggcccaggttgaatttccagggtggagattaaggagcgaccactcaccctgggcagatacaaggggtgaagtcagccggtcgcgccctgagcagtgatggacggccgcctcggtcagagatggtgggggcggggctcggggaaggagctctgctggctctcagcccctgcccggctcaggagagctggcagcaggtctgggcaccgtccccagagcactgtgcccgccgaggatgacagatggggacggagtagcagcttgccgtggtgcagggggtgtgccgccacgtggccgctggtgtccctggcctccgtgcacactcctcgcggggcggaggtgggcccgggctgacgggagaagcgggccgttggcggggccgtgagagcccccgggtttgatgagccggacggttgatgaatgtgctccacgaggcctcctttgtcctcttgctgccgcccggtcgcttgccgggagcgggagctgtgggcagagagatccttgggtgggtgtggccgccgcctgcgtttggaggccccgtgcagcgtcaaccc

SEQ ID NO: 62670 - DNA, 965 bp, Homo sapiens
ggatggggggctccatctcggggtgctggcatgaggctttcaacagctgcggtcagcacagcccacctggcccagcctggactctgcagggtggcagctggggtgtggccatggggagggagggagggaaggaaggatggggtcactgtagctctcgaagggaagcccctgccacgctcagggctgtctgggcccctccccaagcaggggcagaggtaccttccagaacacagcagaacagcgtgtgtccagcccccagctgggagaggagaggcgcccaatgttagtttaaaaaaaaatgactcagacagttcacagagccttccttttcctgctggcttccaagaattccgatctgacttaatggatcgagtcgttggtggatcgattcagacatggacgagagccaggatggccgagttggcgtggccctggcctcgaggctccccggggcccaggtctgcagccagctggcggtgggcaggcagggggccggcgggaggcccccacccgcaccttcacccccaacccccacgtccacccccccaccccccacctccacccccaccagccgggcctggccatggctccgtggtgggtctcagggctgcatggactgtgaggccagctaggtggtggctccgtgtatcaggagtcctactctacgcacaggtcaacttccacaggcccgcgtgatgtgaggccccactgcgcgcgcaggccaacgcccactgccccacgtaatgccctactgtgcgcgcgggccaacgcccactgccccacgtgacgtgaggccctactgtgcgcacaggttaatgtccacagcccttatgtggtgtgaggctctactgtgtgtgtaggtgtgcctaccaagggaagccctcctgcatgtggggtcccctgctgggttctggggagccccgggagggccactcaccttccccgcaggtccctttggtagtttt

SEQ ID NO: 62671 - DNA, 1357 bp, Homo sapiens
cacagctacacacacatcacacacccacacccggacacgcgcctcaggtccccacactgcccttacacacatgcgcccctcacacatgcatgtcccctttgcacacacgccccctcgcacacgcatgccccctcgcacacgcatgcacacaggctcactctgctgcctgtccctggctgctgtgtgcttccggccctccctgtctccccacacagatggacacaacgctccccagggtgagaagtggccgcccaggtgagcctggtgtttccccgggctgtggcaggggcaggagcagggtccgtgcctgagacagcgcaggtgatgtgattgttttggcccctccggtgggtggcaggtgggaggctctgcggggtggaggaggcgggcctcagcccacctgggtgcagcctggcggacatagaggcggaggccagggccgctctctgtggggccagagtctcccgaggccattgctcagggaggagctctgttgagatggaatgttccggcagccgggagtgagccgtccactcatgcatcagtgatttcaatcccccaggtggtggcctgtggtgggtgtgggctccccgcacccctgcgctgggggcggtgctctcccacgggcagcccagcccccgtgccctcctgtgacccgcggcgccggctggagacaaacactccatgtttggctgctgcccgggctccccacccccaactgcccgtgtgagtcacgcaagtccaggcggctggctccggccacgttcccctggccaggcccctggggagaggggctcccacatcgggggcctggctggggtgaaagctctgggcaggctgcacattgagactcagagcagactgggggttggctgggagaggccagggttgaggaccaggacagaggccaggagagctcgcagccccccgacgaggctgtcagtcactgtggcggggacccccaccctggccctcctctgacgttgcccagaccctctgttccctgcctgggatggggtgcaggtgacctctctggagctgagtcctgagtcctgggcccaacctgagagctccccaggtcaggagtcggccacagggtccatgggcactgcaggttctcaggagggcaagcccacctgtcccatctctggacaactgggtttccagggctggtacaggtacctgtgaaggaggtctgggccccacccaccacccccgcccccaccctctgtgacccgacacccccagcagcagggactggggtgggacacggtggggccccaggtggcggtttccaggaagttctgtgtcaggcatggagccctggaacccggtaccctccacccccgtgcggctg

SEQ ID NO: 62672 - DNA, 555 bp, Homo sapiens
cggcttggcctgggcacctgcacacagcagctgtcctgtctttgagaggcatccgtggggagggctcatcacctgccggcctgggctgctcgtttcccggccctcaccctcatcctctgtgagcctgggaggaggcacggatgccgcatcagcctccaggcatccctgccctctcgtaggcatccaggccccctggtggaaggcaggtctcaaggggctggagggtgccaggagttgtcacgtggccgggtgggtctggggcatgtgagggccttctgctcagcgagagtggaggccacgtggcaggaggaggagacacccccaccaacctatgcctgcccatgtgccgggtctcaattcctggtccaaagggcgccttcagtggcgactgcagacaggtgcggggctccagcgaagggaagctgccatttaaaggcaaagctgggaacgcaggctgtggtgatgactgaagtgaggttcacgtaccatgggattagccattttttttttacttgtttatgtgacgaccagcggattttaaagcgcacgggttag

SEQ ID NO: 62673 - DNA, 1254 bp, Homo sapiens
ggtggcgcatgcctgtaatcccagctactcgggaggctgaggcaggagaattgcttgaacccgggaggcggaggttgcggtgagccgagattgcgccactgcactccagcctgggtaacggagtgagaacctatctaaaaataataataataaataaaaataagcagctttagagcaggaacaaaatgaaggcaagtacacttggaaaacgcccaagcaggcaactcgaaagagaagtctgcagtttgacctttgacttggggctgtttgttttttgagacagagtcttgttctgtcacccaggctggagtgcaatggcgggatctcagctcagtgaaacctccacctgccggattcaaacgattcaggcatgcgccaccacacccagctattttttgtatttatagcagagacagggtttcaccatgttggccagactggtgtcaaactcctgacctcgtgatccgcccacctcggcctcccaaagtgctgggattccaggcatgagccctcgcgcccagcctgacttgggttcttataggttggcatgcttccagggcctcgcatcccttctcccgagattcctcccgtgagtgggctgtctgcgtgtgccatggcctgctggcgctcgggaggggagcgtgtgtggtgcgtttgccgcagtcgtgcgtgtgctcacttgaggcgctcttcatgaccagccgcaggtcccttgaaggccatagaccagttaaactctgccattttgcctcttagtgtgcctgctccagccccctcgcccagctcctgagatcttaccgggaagctgctgatcaccggtttcaggtgtttgctgtctattgggagcctgcctttccctggtgccagctgcaacaagtattatgttacacaggcagttaacaaccgcctgaccatcgcccgaaggacgactgatgctcccggtgtgtgggaggggagccctctcctgccctgcccgtgcctgaccagctgctgctgtcatgggcccagcaatcgtaagtgaccagcaggacacgctcctgtgacgaacagccccacccggtgagtttgtttcccacccgaaatctccttcctcctgaaacctgggtgggcgccgctcagcccactcggtctggctcttggtccctctcggtccttctctcttgcttcctccttcaccgtgggataccctggctcccccttggccttccgccaccacgggaagctcccgaggcctccccagaagccaagcagata

SEQ ID NO: 62674 - DNA, 3696 bp, Homo sapiens
gccccaagacaatttacttctatagaagggtgcatctcacggatggagcaatggcgagagcacacctggacaggggaggggaaggggttcttatccctgacgccggcagcccctcctgctgtgtggttcccctattggctagggttggaccacacagtctaagctaattccaattggctattttaaagagagcaggggtacgagtcggagtggcagagtgagtagtttggcaggaaggacagttatagaacaggtgactcaggatgtgtcagggcagagcaggtgacagggtgactcagggcagagcagatgaccagggaagagatgtgagctactgattagaactggtgggaaagttgtttactgaaagtagaggcaagggagcaaagaaccaggaagttaagctttaaaatggagaatcaaagaataagagagctgaacaaactgacatgctgattctttgaagagaaactcggagttcactatatttaacacagtgagctgatacagtgccactgcattccagctggcaacagagcaagactctctctccagaaaaaaaaaaaaaacagctgtagcccagacaccttcacacattctcaggacctcctaaggctgtgtcatggccaaatccttaaccctggcaaaataaacttctaaattgattgagacgtatctcaaatactttttggcttacatatcctttgtaataaatctgtaatagtaaataaagcatttccctgagtcctgtgagccactctagcaaattgttgggctcaagaggtgggtcctgggaatggcctatttgtagccaggtcagacagaaatcgtgggtaacctgtgggtaaccacagtccaatgcctggcaggtcagcgtaccaatgccaagggctgtggcagggaagcgttttatttttattattttttttaagacagagtcttgctctgttgcccaggctggagtacagtggcatgacctcggctgactgcaacctccacctcctgggttcaagtgagtctgctacctcagcctcctgagtagttgggattacaggtgcccgccaccacgcccagctaatttttttatttttactagagatggggtttcaccatgttggccaggatggtctcaatctcttgacctcgtggtccacccacctcggcctcccaaagtgctgggattataggcgtgagccactgtgcccggcctgaaattccttatagacgcatatctccccccacaaaagatggctttgcagggccatttcaaaatatagcaaagaaacataattcggaggccaggcacagtggctcatgtctgtgtctttttagttttttgtagagatgggatctcactgtgtttcccaggctggtctcaaactcctgggcacaaatgatcctcccacctgggcctcccaaagtgctggaattataggtgtgagccaccgtgtctagcctgagaaaggggaacgcttgtgtcctaaagatgggtgtattaatttcctgccactgctgtaacaaattaccacaaacatggtagtttaaaacagtggaaattatttatgtgtttaagtcctgtcttttcttattgtcatgatggctgtgccactccctgctgcctccatggccacgctgtcccctcctgtttgcgtcccctctgtggaaccctctttttttttttcaggtgaagtttcactctgtcacccaggctggagtgcaatggcgtgatctccacctcccgggttcaagcgattctcaggcctcagcctccggagtagctgggattacaggccaccacgcctggctgatttttgtagttttagtagagacggagtttcaccatgatgcccaggctagttccaaactccagacctcacgtgatttgcccgtcttggcctcccaaagtgctgggatgataggcgtgagcccccgcacccggtgagcccctcttattagaaagatgcacaggatcccggtgaacccctcttattagaaagatgcacaggatactgttcagagcccacctggatgatctcctctcagcatccttcactttttcacatcattggctacatgagacccaaaggctccgggaattaggacacggacatatctgtggggagccaccattgagcacgccaccgtggggaggggacaagcatgtacagacaccctggaagataattcagccacacttagtgaaattaggggtactcgtgtcccctcctggacagactgtgcccagagaaaattctcacacagaagaagatcaggtaccattcgaacaggagtgcatccagagacgaggtgggaggaagccacagatgttcactcaggggttcactcagcaccatcactcgattcccaaagcacggtgctgagaggaagatgcccccgaacaagaatccttgcctcaggctctgctccgggggagctgatgggagacccagacctagagcaaaccctgggaaaagtgcccagctcacgctgcattcgagttctgccagggagcacagcaatgaagggtgtgatggccccaagtggatttcacagcactggggaatccgagaggttccgtccaatcgccggatcctggcccaaggagcacgggccctggttctttcctccaggtcccgaggccagcagggtttctccttcgatggtccttctgtctgtcccccagggctccctcctcctcccccagctccgcacagcaggctgccccagctccctgccctcttcaccgggtcaccccccgcacccgtcccccggggtgggaggactactggacggccagcggccaaacctacgcatgtgacctacagcgtatttcaccacgtcaggtgaaacctgagaaccgcgggggcaaaggtagaacttttttcttttttcttttttttttcctttcatgtctagtcctgcagagataacttttattttctaagtgaaataatttttccctctcaagctctaagtctgtttgattcagtcaattgaatccagacattttcagtcaacggccagcaaggttccggctggttcgttcattcattcattcattcattcattgattcattcattcattgcacggataactcactaagcacccgccacaggtcaggcactgctccagacaccaagaatacggcagtgaacgcacaggcaaatgtccctgctctcctggatccgcaagagggcacgacccagggaacaggtttcagagccaaattaccccagcttccaaaaggttgagaaatgctgtgtagctaatgcccccctgaaacgcctgcacctgtatacaggtgcagtgaacatgcctgtgtacacccgctccagcgcacacacacttacataagcgggtgtaaaacgtgagcgatttctgtagccctgaaagcccgtctaagaagctgaagtttgtttaaaaaaaaaaaaaattttaacagtgccagggtcgcgcgggaggccgggtgtggtggctcacgcctgtgatcccaacactttgggaggctgaggcaggcggatcacctgaggtcaagagatggagaccagccctggccaacatggcaaaaccccatctctactaaaaatgcaaaagatgagccaggcctggtgggcgcctgtaatcccagctacgtgggaggctgaggcacaagaatcacttgaacccaggaggcagagattgcagtgagccgagaa

SEQ ID NO: 62675 - DNA, 2995 bp, Homo sapiens
gagggagggaatgaatgagagagggaatgagtgagggagggaaggaatgaatgagggtgggaatgaatgaatgagggcgggaatgaatgaatgagggcgggaatgagtgagagtgagaatgagtgagtgagggagggaatgaatgagtgagggagggaatgagtgagggagggaatgagtgagtgagggagggaatgagtgagggagggaatgagtgagtgagggagggaatgagtgagtgggaatgaatgagtaagtgagggagggaatgagtgagtgagggtggcaatgaatgagtaagtgagggagggaatgcgtgagagagggaaggaatgattgagtgatggagggatcgaatgaatgagggagggagggaattagtgagggagggagggaattagtgagtgagggagggaatgacggagtaggggagggaatgaatgaatgagtgagggagggaatgaatgaatgtggtcactccccgcggtccccaagcacccggacaccgtgaccttggctgcggccccgccgtcggcgaaatgcgggcgggggggccgggagagcccgggggccagcacggtcgcgcgttggcgaacggactgtcccgcgcgctcgcgggtctgggggcctcccgacccggtcctgcttgttgcgtgggcgggaggggggaccggaagcgcccctcccccacgggctcgccccgcccccgccgctcgcggtcccccacgtcccgcccgcgccccggcccagggccagcccccggtttagggagcatccacacttctcctcccgtcggtcatgctcgcattcggccttttgtacggggtcagctcattgggcggatgagaaggtgtccccgcctaccgccccgaactggccaattgcaaggggtttcacagggcgctgaactcgcgggagcgtcaccgtcctgcgacgcttcagaggatccttaggcctcagtggtctttgacccccggccccaggacctgaccccaaggaaacctccgggacctgtggctggagaggtgaccgccaggcatccggggagcctttggagatctcggcttcctttttcccccgctgcttgccggcgtgtcctcgggtggacgcgggcagcccgaaggggagtttacagacgctccctcacatcggggacgcggctcctttaagggcgtaggtgtccagggcgccgcctgactggaaagtcgccccccggccgggctcctggggcggacccggggcgcgggcgcgcggcggcggggcgcgggcaacggggagcgctcggcggcgcgggaggcgctcggggccgggcggcaggagcggcgcgcgaggcaggcgtgcagagggcagccccgcgttaggccccgccccgcgcgccccgcccgcgccagggtcctcggagctgctctggctgcgcgcggagcgggctccggagggaagtcccgagacaaagggaagcgccgccgccgccgccccgctcggtcctccacctgtccgctacgctcgccggggctgcggccgcccgaggtgagcgcgtgcgggggccgggccggggccgcggggcgggggtcgggccgaggcctctactcctgttgggcccgggcccccgactgccccgcgccccgccccgccgagccgggccccgcgccgcggccgagctttccggggagcccgagaggccccgcgctcggcgccggctcggtccgcgctgctggcgccgctgggctgcggcccgagcggccgggccgccgcaggccttcggggccggggctcccccacttcgcccccgaggtgcgcctggcgcggggccggggcagccacctgcagccggggccccgcgaggccgcgccttcctcctgcgcggggagcggcttccggggtcacggtcgccccgcggacggataggatgggccgcggggggagagtcttggattgcaacatcgctggctcgcgggggtgggggccggcgagcgggcttgttttcggtgccttaaaaccaaaacaagtgtaagttttcttgtgcctctgaagatgctccgctggcgcttgctggggccctgaacgtgagcgcctcgctggagggggagttttattctgttttggacatctctttttatcggttgaatagtagttggttctggtagttaacgtgcgtaggaggaatgtaagggaatgattagttgggcttgtgatcgtggcctgtagtcacgcttgaatcgcagaatgaagtggttttgtttgtataattggaagttacgcttagtttctctgtttgcaaagtgcctgtctttggggagttcggtttgtttccttttacaggacctaccccaagtgtttcttgctcttcaagaaacgttgcctttgggtagagaacctatgcaacggaagacgggacggatcctcagtttgccctgattgctcattcagagaggtccgttccctaggccactgggtgattgctggtgtgcgcttgtatggtgtctcagggtttgggatcttgcttcagaaacattctcggggcctggggcagatcaggtgcggccaggtaagcgtctcccgactgcaggtgcttgggtcttgcagaagggaatacctccccaagcctgggagagtttgcatttgggtgcaggagggcctttaaaggcttcttgtgccagcctgtcgtggcgaccacccgttgtggagatcagtgcggtggagttgtgggaggtgagtgctttgctcaccctcagccaggaagttgctctgaagtcggtgctgtcaaccagcagagcaaggcggtgatccgagaagctaaagctcagccggttgcgggcgcccagcaggaggacagaaggcagactttcgggccgctcctggagtgcccggccctgtccccgtttctgcagtgtctgggccttgcctggctctaatagatgagggttgtttttgtctttgcatcataaaagtttcttgctctgaagcgtttagtaactactagccgttcactaagtgc

SEQ ID NO: 62676 - DNA, 673 bp, Homo sapiens
tgtgagtgggtggagctacgagtgggcggggaatgtgggcgggcgtgagcgagtggggcatcgggggccatgcggtgagtggatgtcgtggctgggagggtggggcagggaaaggggcggtgctgagtaggtggggctgcgctgattgggcgggaagggaagggggcggtgctacgggtaggtgaggcagcgaaaggggcggtgccatgagtaggtacggcagcgctaattggagggcagggaaaggggcagtgctatgagtaggcgcggcagtgctgattgggtggggcagagaaaggggtagtgctgtaggcggtgctgagtgggcatggcaggggcggggttcataccctttgaccatgggccgggccccacaggcactggcaggtcagcagccgccaccatcaaacctgcacgctggactacagctacctgctggggctgctggaggacatgcaggcacactgggaagaggctccttcactgccccaggagcaggtgggtgcagccgggaccttcttgccagccatggcgaagggagtgctggggactggggtcgctcagtgccggtcggcgaggggcagagtcctgcccgcgtgggggtcaaagacaaatggacaaactgtatgacgtgggcgagagccagcgctctgcagaaaggagacgggagact

SEQ ID NO: 62677 - DNA, 1981 bp, Homo sapiens
gtcgatgacggcgaccccagactgcgccaccagctgtctgccagggacagcatgggataagttcaggagccagcactacccaaggtggagcatgccccggagaatggcctagctaagggattcagggacatcattccgccatccccaaacaccctcaaacggacttcacgagcaagcttttgaggcagctgcttggggcacctggagcatgtgtttattcactcaacaaacgtttattaccccaaaacctcctttatcccaggctctgcgctacgcaacggaggcaaactagacagacgttccctgcccacgtgggtgtggatgtgggtgcgacatacaagtgccactaaaccatccctgaagggaaccacgcgctggaaatgaagacgacctcgggcaggcctcccgcgcctacctgtctgcgggggacgcgtactgcttgcccacggggctcagcaccagaccgccgaatctgtggcccaggcgcaggcagcgcaccagccccaggcgggccagcttgcggcccgtgcagcgccgggggtcgcagtggcccaactcccacatggccagcgtgcagggcagcgccgccgggcccgggccgccctcgccgtcagccgcccctggctccacggaagctgcacgagagagagaagggcactcggcctcagcgtgggacccccgggcaggccctcaaaccctgacccgctctccccatcacgcctcgctcaccctgcagcgcggcgccgacctcctcggcgaaggcctccagggagcgcgtcgggaggtgccgagggcggccgccttccgcccccggcccgcgcgctgccctcctgcggcccatggcgcggacctggggtgccggggactccccaccccacggccgcgcccctcggcctcccaatgggctgtgcggctgccagcgcttgcgccggacgccacttccggtccccgtggtcacgtgaccgtcacttcacgtgaccgcgcggcggccgctgcggcgcgatggcggcggggctggcgcggctcctgttgctcctcgggctctcggccggcggtgagtggcccggccgtccgcgtccccaggccccgcgcgcgctctgcaccccggcctccccgctcacggtctcgctccccgtagggcccgcgccggcaggtgcagcgaagatgaaggtggtggaggagcccaacgcgtttgggtgagcagcctcgcgggctggcggctcgagcgggggacggcccgggcccgttccccgctgaccttgccgcttcccgtagggtgaacaacccgttcttgcctcaggccagtcgcctccaggccaagagggatccttcacccgtgtctggtgagtgaggagcgctgttggccggcgcgggggtggccgcggggagcagcaacagtggaggatggatgagtgaccctgagagttacggcccggagtctaaagcattggtttgtcagccttctaaaattaatgtggaagtacgagagaatataccagaacgttcttgtagcgaattaaattatctccagacttagtccttcctttcctttccgagaggtaactgctgttaatagtctggtgactttgcagacgcgtttctgtgcttttacgtgcgtgtctatgcaactggaaaacgtatagtttttgtaatctaatcgcttttttaaaaaatcatgctgcgcgagtatttggctgatttgtcgttgtcactcgctgtatctctcgggacgcttcatggtgatgatataggtcttcgttctttctcttggtgctcagcacgcgataggatggcactgcactccccgattgtatttaggttcttgccatttttttggccattagaaatagttctgtggagaacatgctgtgtaggtgctttggtttgccctcaggtgagcggtttcccagtgcaggattccagaagtggaattggtgggtcatgagtatatatatcatttaaacgctgaatgagtattaaa

SEQ ID NO: 62678 - DNA, 2448 bp, Homo sapiens
agcctgccttcatgcattgcaatagtaaccttcctaccaagaaaagcctcattgcatcctgaatcctgacctgcaagaaaggaggaagcttgtgcccttgcgcgtgccggtcaccgcttcccaatgggtcctttgccgggctcctaacctgctgtgccactgcaggctcagcctggctgtgccttccattcagtaagatcagccacaccagtccccagaaagctgctcggcctccaagccctgcatggaatgccccccactacatccttgcaggtgtcagcctgaaccatgtcagggccctggacagactcactgaggacaggcaccgaccccccaacccgcaggcctgcccacagccccctcatgctcccatacgggggcttgatgacgggcagggccaagcggtttgcccatagtcaggtcagccaggctcgggaacctggacctgccctctgcacccaagtcccaggatcaggatatggcagccccttcagagctcaccgcccctcacacctggcagagatccagaaactcctcatgaaaatcaaagacgcaaagaagttgggggacaggaacggaggcgccttttctccccttggagtggggtgatcccaccaggctccgtgctaagtcggcagaagcttcacccaccagctgcagagtgcgcagcatgtggaggggctaagctgccttcaatgctcacccgacaaactacggctcgcactcaactcagagggcgtcagccaccacctacctcagccaagtcacctgtgctgaagcccgggaagctgcctggagaggggacgttcagggagcgtgtgggtgcccccgagagactccggccccgcttcaaagccaagtgcccctcatccaaagagagcaccggagagggtcctggaggctccaccacccctagggtgctatctagggctcactcccagaaatcaaggggggagacggctgctgcaccgtcctggcccactttctcacccgcagcttctcccccacctcacctcactgtttcaaggttagacccagatcttctgaaacattctcaaagaaagagctgacccttgtgcagaggcaaaatctaggtgaggctggtcacctaagcgagtacagctgggtcaggccaggctgcctcagccccgggcgttaggaaaccaccggccccgctgagtcaccgcgacacagcccggctctgccgtgacacagcacattcaaggcgccgcggtcccccggggtcagggacacgcgaggacaagctacagactgctcggaactcaggacagggcgggggagccgccgacgccagggaaattcccgtaccacgcgggctgagtgcaggcgggccaggccaggacgcaggggtcggccctcccccgccccgttcccctgccctctcctgccccgctccgctccgctctcctgccccgctcccctgccctccctcggggcaccgaccccgcctagctaggggacgcaggcggcccgagcccgcgctgggaagcggcgagcgcccggcagaggcaggttccgagaaggcgacgccttcgcctcgctccgggcctctgagaagcccgggcccaccccgcggctgtcacacccggctccgtgacgcgggggacgcacctggcggggggcgcacctaagggagggcccgctcctgaccgccgagtaacgagacccgcaccttggcggcgcacggctgccacgcgctggggccgccgccaatgctgactcacggtccgcggccgccccgcgccgccgccggggattcaaacccggcccgcgccccgccccctccgcgctggccccgccccgcaacgtgactcggccccgcccccgtcgcactggccacgccccccgcgctgccctcccccaaccttccccccgactcgggcgcacccggtccccgcggctcctggctacgagctgggcgggcaagtgggcgcgggcagcgggggccagaggtcttcaggcagaaagccccagagctgccccgctgcccggctcctcctgccctgcccacctgcacctgcagctgctccgggcggactcaggtgaaacacggtcgacccaacaggggcgctcgcggggcggggcggcgtgagctggggccgctgcctgccctgcaggaccctcctccctcccaagtccgcgtgcctgcccagccccatctaaacgcggggtacggagctcgcaggtctctcttaatctgaaacctgttcctatgaagtgtaagatgaaggaaaatggaacctatcagatgggtctgaaatgatcccactaaaaatcccttaaatacagaatccgctcatttcttctattccgtgctccagtcacagtacacctacaacctgaaggaaactgtactattaacacaaggaaaaaacgacccagtctacacaccagctttgtccaaaaccctctacaacagctaataaa

SEQ ID NO: 62679 - DNA, 1325 bp, Homo sapiens
aaaaaaaagtgggaggtgaagcaaaattggtttgagtcacacaagggttacccctaaaacacacataatccctcgggaactggcctgagaataggaaatgccgccccagcatccctggtcactagaaaatttcagcgtataattacgactccctctgcaggggccaggtatggacactaaggcgtccgctgagggtcccggccgcatccccgggtggaggccccccacctccgcccaggcagcggcgccccctcgcggccgcttactcgtcgccgtcggggcacacgccggtggcttcgttgtacttggagcagtacacgtcggggctgtagttgaaggtgccgtcgcgcctgcggaggggcctgcggcgccgctggttgaggaagtgccagtggaagcaggtgaacggccggtgctgcgcgcacttgtgctgtgaaaacagggggcactgctccgtcctgaactccttcaggtacctacaaacacagacagcgccgcggctcgcttccggcagcacctccagggactcggactcgtgggcggcgggacccaccggcctcaggagcctcaacccagggtcgacccgtactcacattcccggcgggccccaggcgctgcgcccacccccatcccgactccagacgcgaccctcacccgacctcgtagcccaggcgctgaccctggtccccaagcccaagcgccaccccggaccctgggcgacccgctgtgacctcacggtcggcagccggagcagagggtcccggtccccgagcccaggcgcaacccccaaccccggggcgttcctccctccccagaggcgcgtggaccccggaaccaggtgccatcccagaccatgggcgccgcgctccgacctcaggcggaggccgccgagagcagagggtcgtggcccccccagcccaggcgctgcgcggaggccggggggcgcgggggcggcggaggcggcgcgagccccggcgggaggctccgagctgcaccgggcgcgggcggggggccgcaggccggacgggcgctgacctgtagtgggtcggcttctcagtctgcgggggggacccgctcagcgccgctgccgccgctttcgaaaccgacggcattttcagtcaaaacaatgcagcgcgcatgcgccgcgccggcgcccccgcccccggatatccccgcgcgcccccgcggccacgccccccgcggccccgcccccagcccgcagaccccggccccgccccagccccgcgccccccgcagccccgcccccggcccgcagaccccgccccagccccgcgccccgccctgccctgccctgccctgccctg

SEQ ID NO: 62680 - DNA, 2148 bp, Homo sapiens
aagggaatcatctaatcccatattataaaattaaaatttattttcatttgttgttgtgtaaaactcacatgtggaagtgttccttgcacaggccgcagcatgcaatacagtttcacacttctgccagatattctatctcagaaagcaaattacctgcaaactaacactggatgacaagtgtcaccagaagtgctttggaaacatgattatgttatacaaagacttggcaaatccaacagcatacagtgcaactgaaaccttccccaaggatctgagaagtcttgccgatggaatccttggacatcaagagccaggcgaggagcagtttccgatctgctgagattctgctccgccttcacgcgaatcagcatagccaagtgccccatccaccagccaagtccttcagtgctgaggacgcacgcatagccaggacagtcacgggcaaacgtgacatcaaatccgaagggcggctgtcggctcccttcctgccagccccagcgggcaccccgtcaagttctcgctctgtaggcagctggagtctcaggctcctcagaacgatcactgggctctggcacctctccccacacctgtctcaaccactggtccgcctcgctctcctccctcaggtagcaccagatgatcagcgccacgaggaagcagctgaggggcagcaccttccaccagggccgctgatgtccctttcccatggtatggcccaccgaccagcggtgagggttggctttgctggaggaaaactcaatggggcggtcagggtcgtcctcttcctcggcggcagggtgggcccgatcccgggaaccgggcaacggatgaaggcttcgggaagcccagcctatgagcctcagcgcccggacggccctggaagagagagagcagtaagcgctccgcccgcccgccggtgtctgccctcggccctccgagaccttgaggagctcacccggccgccggggcacacaagacacgattcattgctgccttgactcctcgactgacgccttggcgcgccgtgatagcgtcacttccgtcgccggaaaccggaaaccgggcgccataccaggcctccgctcacgactacagaacgtggtcccagtagcgcagcggaaatgacgttcggctgcgaagagctctttccgtcgcaggcccggagtgcgcgatggcatgccgggaaatgtagttctccgtccctttcgaataggaccgacaccccggtccctggccccgaagagaggcgggcgccgcgggggcggacgttgtcctcagagagttgtctgagtttgcctcggagcagttctgaaccgtcatgaaggtgcgcggggcctggttggggatccgcgccctcagccctgcccgcctgccctgggctgggcgcccgcacctctctgccggcttccccgaaggccgtggcaccgccctattttttttttttttttttttccgtttagttcttttcgtgagacagggactctctctgtcgcccaggctggagtgcagtggcgcgatctcacgtcactgcggcctctgaaaccgcctttgcaaaaattatcactgaggaaatgacagtggaagagatgagacctaaggggctccgtcgtgcttcccacccttaagctgtcctggttcattcctgggcgtgggcagagctaactttgggaaggatttcagttcatggtttcactctgaatcaaagtcaacagccctttccagaaaaaacccccgtcttgcctgaagaccagtctgcctttgcaggactaataaatcagctgcaaaattagaaattggccgggcgccgtggctcacgcctgtaatcccagcactttgggaggccgaggcgggcagatcatgaggtcaggagatcgagaccatcctggctaatacgatgaaaccctgtctctactaaaaatacaaaaaattagccgggcgtggtggcgggcgcctgtagtcccagctactcgggaggctgaggcaggagaatcgcttgaacctgggaggcagaggttgcagtgagccgagatggagccactgtactccagcctgggcgacagagcgaggctcagtctgaaaaaaaaaaagagtctgaacctccccaaattgctcctggggataacatcactattgtaaaatctaagatca

SEQ ID NO: 62681 - DNA, 1909 bp, Homo sapiens
acagggaaacaaatgtacccgcaacggttctccagaccttaacactgctcagacgcacgctgcagggtgacatgcggaacgcattccaacctctgacttgctgcttattgtgtttgcctgcacattgcaaattcaactcggtgcgaagggagactgagtacaaatactcgtcactcccaagatcacctgaaagtcgggactgatccccacacagaaagatggcagataaaggcgctcagtcattctcactgaaagacagtgacccggctgcaatcttaactgtttccatctcccagggggtcaaaaacgcaaacaaaattagttgctcgtgtaggatgacaatttttaaaagtcacctgaacagaaagccacttgcacccctttagggccagtctgggggacaccggagggaatgaacgtgcgccacggctgccccggcgcccctcagcgccccacattccgcggggtctggcgagctccgcctcgcccacgcagccctcccggccaccgagcccggcgcggcctccgaagactccagaccccaggcgcccccgccagcccggccccgccgaggagccccggggcgcgttcccgagtccaccgcgcctcggtcgcctccaggaccgagacacgcggcgccgccagaaggctcacgagggcgcgggctgcggggcgcacgagggctcagtttccccgcctgcgccctgcccggcctcacctggcgcgcagccccaggcccagccccgttcagcagcggcgtccccccgccgggccgcgccgtcctccgcagcagcggcgccgcctcctcgtcgtcccggtcccggccggaccaggacaccttcttagagacgttggccatggcccgccgcggagcgacaccggccgggaagcgccggctgcccccgtgtttgttctcgtgacccgcgccggcggccacgtgacgcgcgacggggccacgtgatgagcgacggcgaccatgtgacctgcaacggcaaccaccgaggcccggtcgcgcgggggctcctgggagccgcgctcccggcgggtcgtggcgccgcccgccctagagaatcgccgcggccctgaggaccccgttctgcccacgcgactgcaaaggcggccccgttgggctgagcgccgagtgcttgggaggcgaatggccgcccccgggacctcgggcccgggagtcggggcgagggaagcgcccggggcctgagggcaggagccggctggaggggctcccccaggcccggtcgcccgcgccgatcgtgacggagccgcggtggggaagggaggagggaggcaggggcgagggcaggcctttccttgccataggcggcggctaaagacgtgaaggatgaaattagaagtcccgaagcatgcatccgccctcgcagtaggcactcgggcgagggtcggagtggaggcttcctccaggcagccccagagggtcctcccgcctaatgagaaaagaacagaaggcgagtcctcttcaacgatcaggccccagagacagtacaggagggtcgcctctggaaactgccggctactacgcagatagctgtgaattagccaaatagccgcccggaccctgtacccgcaccagggcacagcccatcactaatcaatggtatttccataaaccaaagagaattcttgacagctttacatcagcccccaccctgtccccaccttctgggtcatttatttatttattttgagacagggtctccttctgtcgcccaggctggagtgcggtggtgcggtcacagctcagtgcagccttgacctcctggactcaagccatcctcccgcctcagcctctggagtaacagggaccacaggcctgcaccaccacacccggctaatttttgctgtggagctcacagtgtgttgcccaggctgttct

SEQ ID NO: 62682 - DNA, 1790 bp, Homo sapiens
ctgctcgaggcctgtcacctggcatatttcgtatgtactttatctgttcccccgataggtgagcaggaactttgcatcatttgttgctcagaaggcttggtgcaccaagcaggcatttaatcaatgtttgttgaatggataactgttccccagcttttcccacatccatcactgctgaaatggcgcctctttaggtgtcttcctggattgccccctccacaaagatgaagccccccacactccgctgcggtgtacagaaggcactgcatgttgtaaatgttcagtgtccggctgtccagcctggcggccacagccaaaggtagtaccgagcccttgagatggggctagtgctgcaagggaactggacttatttaacttcagttaatttacagagccacatgcgtctagcgcttaccctactggtcgcagtttttattccacgacccggcctcatttacggagctgcaattgttcagatctgacatgatctcaactgctcttttacttccttgtgtaccgtgcgtttcccttactggcctctgacccttgaaagcagagccttacatccggggaagacgagccaggcctgtcttggtaaacatctgccttagagcgaacgctcggcgttctggagagaatgtgggacccgaggcggagggaagagacggctgacatcactccagggtagggacgaccgagatgggagaaactaaggcgagaacccaccacccgggcgcagcgaacccagctcgcagccacgtggggaagcgcggccctgccctcaggccccgccccactcacgcgtcaggccccgcccaccccaccgccccccgctcccgcgtccaggctccgccccgtccccgcgcagcgcaggcgcagatgcgccctcccgcctggcgtcctccgcagattcgcgctgagaggcccgcggagacccgccccagaggctcaagaaaacccgcgggagcctcgcccggacccaggaactcgtgctcggggccaaccggctgggccgcgatcgcgtttcgtccggggccgcggcggccgtggggaatcggctgcagcgaatcggtggcgcgcggcgcctgagcgcgctgcagtcacccgggagccgggtccaggtcgggttgggggtcggggatcggggatcgggggtccggttgggtcgggttgggctccaggtctggttgggtcgggtccaggtcgggtaggagtccggtcggggtccgggtacaggtcggggtccgggcctggatcgggggcgggtccgcgtgcggctcctctagccccgaacccgtgttccccgtaagctgttggtttctaaggggcggaggaatggcgactggagccacctctcaccgctcagggagccgggagggccggcagctcccgcgggccgagtttcccgccttgggtgcgaggacgcgtggggccgcgctgtgcccggggaacactcaccagcatctctagcctccacctccctctcgcgccagtggcactcccggttgagacaactgagaatgttccctgggcacagtggcccgggttgagaagccctgcagtggctggtagcgttggggtccgagcggaggagcgaactctgggtggaaaccggcaggcactggaggggaaggaggcgggacagggttgggtgggaccagggttgaggggtgtggggtctcggggcgctcaccgaggggcttcctgagcttgtgtggattatttccgtgccccaagctgagccctgtgtccatgtcacaggtcgtcttcccgtgacgcccagatctgtc

SEQ ID NO: 62683 - DNA, 1615 bp, Homo sapiens
ccatcaaaccagcttttgggaaagaatctgttaagcccattcagctaagcggcacggggtcacagggctttgagtagccttcctcggtgacgctgagtagggaactccgggatggggctccacggtggactctcggggacaggcacccggggccaccctacaaagcctcgccctccaggccacagtccagagccttcggcctgcgcagggtcctcgctgcatccagcggacggtactgagaagccatgcgctggcggtttgatgcaacacgaccctcagggccgacccagcgagtgaccaaacatagcatgtttttgttttgcatctctcgtttgtcccgtttcgcctcgggggtgtgatggcgccgcccacctccccaccccgcccattccaaagggactctcccagctaccggaatcagccgcgattcgaggccgggcgggggcgacagccatagtccgacgagcgacctggaccccgcgccaagcccgccccagcctcgatgggactcgcgaggggccgcggggactcggcggcgccgggatcgtgggaggagacgggagggtcccgacgcccgccaccggtcacatcctcggccccaaaccccggcctggctcctaaggacctgggtcggccgccctagccctaaggccactcacctctgccaggccgctgagccgccgcgcgttgccgggacaacggcgcgccaggaacgcggaaatagccgaaggtgagcgaggcggccccgaggactcccgaagcgccccgagcggccggaaagagccgaaggcgatcgggcacgcacgtgcagctccgaggcccgagcgtcgggggccaggttattccgctctgcaagagagaagcgggacgagctttttctaggagagacggcggcgcagggccggcgtctgggtcccctttgtgtggagggcgcgctgtcacagccccgatcaaccgcggcatcctcccctcctgggcgtgttcccttcccgtgcatcccgaggcggagcctttccagcacgcggcggtctcggcccaggccttccctgggctccgcttttctagtttcggagcggagggcgtgggtcaagcgtttctgggaaagtcgatgcgctcggcagtgtcctgaggtgttgggtgactgagggcctgttccatcgccgggccccggactccacagagccaagcgaggcagggagcgcccccaagaaagcagctggcggccggacgcggggctcgcgcttgggcttccagctcttgggggctggggcgggcggatcgttggagcccaggagttcgagaccagccttggcaacaaggcgagatcctgtctctaaaaaattacaaaaattagccgggcgcggtggcgcctctagtctcggctacaggaggctgagggaggagaatcgcctgagccccgggaggcggagactgcagcgagccgagatcgggccactgcactccagcctgggcgacagagcgagtcaaaaaaaaaaaaaaagaaaagaaaaagaaacactggaatttgagccgggcgcggtggctcacgcctgcaaacccagtactttgggaggctgagacgagcggatcacttgaggtcaggagttcgagacta

SEQ ID NO: 62684 - DNA, 1451 bp, Homo sapiens
tgaaaaacacccctctgctttcttgctatgaagaaaatgaccaagtgcccagcgccgctcggctacgctaacgtagcgcagaagcacatactccacccaggaaagggtgcgcttaactgcctcagacgtgcttccacacttctcagaactcaggttcgcgcccgattccacactccgagctaccacgccgttttcttctcacgtatccgtcaacactgctgcggccaatcacagcacgggccctggcctattggctgtctgtccaccaatccaaagagacgcacagtccgcaaggtcgcgaggctggcgtcacaacactactggcgccgcgggctcgcccccgacgcccaccgggctcgtacgtgcgagcgcgcccgcccagcgctagccaatgggagcgccgttttggggagacgggcccgaagaaacattgggggtgctcgcccccgcgttcgtcgccccgccccgcgcgcccgcgcaccccggccccgcccccgcgcgccgtccgtgaggtccccaccggccgccgtagccggaactgctgctgagggcggcgggccggcttcgctagggtgagtggcggcagtatctgcgtccgcagcccccgcagccgcgcgccggcccgcggaggggacgtgccggggctagcgccgctcgaccagtcgcttccgaggcggacgaccagcccggcgttgcggcctccctgcagccggcgctcgggggccggggctgcccggcccggctggttctgcgggcacccggggaggccccgggaagccaggctgccgcccggcgttgatgaaaaaggtgaccaaggctgggcggcggggctgtcatggcgaggcccggccggggggtcctgtcgggcggcgcgggagagcgcggggggggcgtcgcttccacagcgcccggtacagccacaactggcctcagggcgaggaggcttctgcgtccccatcccgagacgcgagccggtgcggagcgggacggggctggaggagactgcgcctccgagaaaagtccggtctcgttggaggttctcgcgaaaaggaggccatccccctgcttgttggcccttagggtaaagtctggacggcgtcggtcctttcagtggcgaaaagcgcttccccgtgctcggtcggcgtcttgggtgtggagcccggcgagcgggcgagttcactctggtggccgagtttgttttgcttgggtcccgggtggcctgcgggcggacaggtccctgggcagcggggttctcagcccgagacgaggtctttgggggtttaggtttcttgagtggaaagaggtgggttgagggggaagagtgggaagtcttgccacgaaatcccttaagttggggtgtttgtcgtgggtggttttgttctttggcagagttttttttaaaactagcatgaactcgagattccctagaccaattccgacaggagaaaacg

SEQ ID NO: 62685 - DNA, 1788 bp, Homo sapiens
cagcatttttagtcactgcactttgttgttgacattttacagggcggtgggtagcaaagttgatgcaataattttattaattgttgccaagagttttaacaccattgtcttctaccgcttcttgcacctggacccggacataactgggctgtcactttcccgggtggttccaacctgttccatgcaacaggctcctttgttgcaaaagcatttttaactagtaaatccccgcagcagctcacatttcccaccctgggaagaagattcccagagacccggagctgattattctttatgtgtgttttaaaataagcaggcgggccggcggcattgggccaccatggagttccccgtgcgggcaggcgagcccgcgcttctcccgtcccggggtggatccggcctcctctgtcctcctccagggccagctctgggggccggcgcgtggggcaggtgcgcggggcccgggagccccgcgcctttcggggggcggggagggggtgggacgaggggctagggctggggctgcggcccggccggccgaggcggcgcagggagcgaggccggcgcgcagggccaggccatgagccgcggccccgccgggtaggtggctgtgggcggggcagcggcccggacccgcaaccgtgcccagacccgcgcccgcgccggggctcccatagaccccggggccggggccggggccggggccgggcagggtccgccgagctgtcgcgccctcccgccgccggcccgggcgtctggacgcgagcctcggccagggggcgtccggggaggcccgggagggtcccgggctggtgggcagggccgggggcggcggcgtgggggcggcaggggccgcggcgggctcgggcgggctcgggcgggccgggccgagccgccgagaggggatttggaacaaacaacggcggccatgttgagagcgcgtcggggccgctaaacttcccggcctgcgcccgcctcaccggccgcctcccctctcccggccgcaggatgacagtgaagttgggcgacggcggcagcggggaggacgggctcaagaagctgggcaagcgggcggccgatgaggagtccctggaaggagaaggggccggcggcgcagacgcggccgaggagagcagcggcacaaagagggacgagaagaccccccgggccggcgccgacggcccccccgcgccccccggcgcgccgcaggcgccgtccccgccgcagggcagcccccaggaccagcaccacttcctccggtccagcgtgcggccgcagagcaagaggcccaggaaggatcctccgagcgctgtggggagcggcaacgccggtggctcggggccccgcggaaaaggtagggcggcccgtccccttgggagaccccagcccctctccggggtgtgccgcgggggagaggaacccctcgccccagccgggctccaccctagctcacccatcccgcggcctacactgaggctctcaatttgggtggcacttatggggcatgtgtcccctctctccttcgaagaggctgcgactttctatatttaaactctttgaagaggcagtgagtatccttttttgggggggagtcgaagagatcccttaaagctgtttcctttccaaaggatcactgatggttttctatggttttgtgtttcaaacagcggacaatagttcggaaacgggaagagaaaaaaatacctgctgtatctctttcccagacatcaggcggtggaaatgcaccaagggagcaggcttttgaaactcattggggggaagatgggt

SEQ ID NO: 62686 - DNA, 1379 bp, Homo sapiens
cagtgggccgctgcccagagccatgtcttgactggggtccactccttggaattcaagttggtttttctctcagatcagaaactcctcacagggaggtcacatagaggtggactgagaagtcacagaggtagactgagctcacacagaggtcatggagaggtggattgaggtcacacagaggtcacggagaagtggactgagaggtcacagagaggaggactcagaggccacaggtcatggaaaggtagattgaggtcacagaggtcacgaaaaggtggactgaggtcacggagaggtggactgaggtcacacaggtcacaaaaaggtggactcagaggtcacagagttggacaggttacacagaggtcacacggtggactgagatcacggagagctggactgaggtcacacacaggttatggagaggtcgactgagaggtcacacagaggtcatctaggggtggatttaggtcacgcacaggtcacggaaaggtggactgagaggtcacggagaggtggactgaggtcacagaggtcacctagaggtgaattgtcacacagaggtcatgttgaggtggactgaggtcacacacaggtcatctagaggtggattgaggtcacacacaggtcatctagaggtggactgaggtcacacaggtcatttagaggtggattgaggtcacacagttcacggagaggtgggctgaggtcacacagaggtcatggggaggtggactgagaggtcacctagaggtggattgaagtcacacagaggtaacctagaggtggactgagaggtcacggagaggtggactgaggtcacacagaggtcacctagaggtggattgaggtcacacagaggtcatagagaggtggactgaggtcacacaggtcacagagaggtggactgagaggtcacacagaggtcacagaaaggtggattgaggtcacacagaggtcacagaaaggtggactgaggtcacacaggtcatctagagatggattgaggtcacatggaggtcacggggaggtgaactgaggtcacagagaggtcacgtagaagtggattgaggtcacacagaggtcatggggaggtggactgaggtcacaggtcatgtagagctggatttaggtcacacagaggtcacagggaggtggactgagaggtcacggagaggtagactgagaggtcatggggaggaggactgagagcttctgctctgagggcccaaagtgggaggactgcacagagctggggcagtggagagaggggtggccatctgaggggaccccaggatagtggcttttccagggatgggacatcagcttgtgccaggccagtcaccaaggcaggagggcacagcacattttctgtaaac

SEQ ID NO: 62687 - DNA, 1758 bp, Homo sapiens
taaggactgtcgtttgtgcctgttcttcagggccgcgcgcccatgcccgcagtccctggtcgggcaggtgcggcccaggtgcggccccgcggtcggctcgcgggctcccgcagaccgggcttcctcccgagggcgcggccgtcccagggcccgcccggcccgccgcccaatgcgagctcccacctccgcgagcggcgtcgccttccccaatcggctgcgggcgcggcgccgaccgttcaaagcctaagtcgtcgggggtgggcgtgaggggcggtggccgcgctgagataggctgcggagggatgattggcgtcttggcgcccaatgggcgctggcgggcggccttgagtacctgcgctgggcgggcgggaacggcgcgcggcgagctgagggtggcggcggtcgacatgttccaggtcccggatagcgagggcggccgcgccggctccaggtgcggcgcggggcacacgggaggcgggcggatagcgcgaccacgtggcgggagcgggccagcccagggcgtccaccagccgtgtggggttggggtggggttggggggcagggcgacctcacagaggccctcggggccgccgcccgcctttctgcgccgccgccagaccgaggcccgaagcccgaggggccgctcgctgaggcccgggctgtggagagctgcccgcgaccgaggccgagggcggggaggggcgcccgggctctgggaacaaagctgtgtggagggcgggctgcgctccctcgcgcctgggcgcccgcgttccgtgtggtgcgttccgtggggggtttcctgggggcggggtgtgcccgtgggtgcggcccattttgtctgtgggatgcgtgtccatgttcccgggggggtgtccctaaggggtgtgcggcgatgtgttcgtggggggtgtctggccatgcccccgctcctgtgcgtgtggccgtgtgcccgtgtccctggtgtgtgtgtggcctgtgccctgcccatggccgcgcttccactagttcatgtgagtccacttcctttggaaagtgccagggcgtctggggaagagtcagttctatctcctgggaaggtggatggcgctcctgggcttcgctgtaggaagaagtggattgggacgaagatatcctgactcagctttaatagccaggaacactgagcacacttttcttatgtttttgaacttttaaagcactctttgggtattgggactcgcatgaattagagggacagagcttacaaggtctttcgtgccacttgagcagtaaacttgcattgtgaagtttgggtcttcagatgcctgaggttttctgtatgatgagcccctctgtggcacagcctcgccagagaagtagaagagaatatgtgtgccatgactgttaagaccaatactatattgcttctcagccttttggctatgatcaagtgaagacaaatactatattgaataaatactaagtaaaagaattgctccaacttgctaaaaataaaaaccctttagattggccgggcgtggtggctcacacctgtaatcacggcactttgggaggctgaggtgggcgagtcacgtgaggtcaagagttcgagaccagcctggccaacatggtgaaacccccgtctctactaaaaatgcaaaaattagccaggcgtggtggtgtgtgcctgtagtcccagctacttggagaggctgagacaggagaatcacttgaacccagaggcagaggtggcagcgagccaagataatgccactgcac

SEQ ID NO: 62688 - DNA, 5809 bp, Homo sapiens
ctctcaaattgctgagattacagacatgcacccttgtgcccggccgaagctaggtttgctgcttgcctttttttggtctgtttggttgcttttttggttgttagagaaatgagtgtttcttattaagtgactaacattctcgttgtttccggtttatgaatttaggcccagggactcctgcatgtcctttttagcaaggatagcagaataatatatcgcatgcaagatagaatcctatctgagccatttccaggtgtatgaatctgctcatttggcccctactcagcagagtcatgtctggagctgttcctagagcactccatggaaggcaggcggtaccactttgcccgttccacatggtctcatgcccagtggggagcccggccccttgcggttagtgagccagcctctactcctggtcacagtgtgtggtgccagccatcatggctccccatgccaggttcctgcttctcatggtccttctcacggttgttgggagttttcctatctctccagtgctcttggaagacggtttatggtatattatcaagggaagcctgaaagggaaactgctagttgtgttcaccacccaacgagatctggagtcctgccttctttctacacttagtcacacagacctagccccacagccctctagttgcagggcttgattgagaaaagtatgcagaggccgagagtgtgtgtgaccgaccacatcatagccatcgaatgtttatcaattcccattcagtgtttcagtgaatcttcagtagtctctgtgttctttgttagtcacctggtttagatgttccatgaattgttcttcctcttctagcaatgatgaccaacgtctatgaattgttaatatttaccggggactgtgctaagtgctttgcatgtgtatttttcatttggtgttcgctataactaggagtaggttgttttgctcctttcacagaggaggaaacaggcttggaaaaggtcactggcatgcataaatcccaagctagtcagtagcagagctagtcggtagcagaactagtccgtagcagagctagtcggtagcagacctagccggtagcagtgctagtcggtggcagagctagcctttgaattgaggtttttctgactccagattccatgccttaaactgacttcctgaatgtatccactgggataaatttctcaaaatggaattggtagatcagatgatatatgagtttaaaatatggatagatagttccaaccggtttttcagggcattgcctggtgtttaccattcttgtgtatgtgcttatttgcaccagcagtatttatcttttagttttgcttttaaaaacaaatcttgtaggccaggtgcggtggctcacgcctgtaatcccagcattttgggaggccgaggtgggaggattgcctgagcccaggagtttgaaactggcttgggcaacatagcgaggcccaatctcccaaataaataaatgatatttttaaaaacaaaataacacagagcccttggaaatcaaaaatctagcaggaggaaaaaacatctctcgagtttatcttcaattattagtgaatttaagcatgttttcttgcttcaaagctgaatttatttttcaagtaaaatggtaatagacatatgtggtatgactacctagttatgaaggttaaaagcagaggtacattgtttagtacctattgcacgtatacgtggtaaaaatgtttgtggtttccaaaaaattcaggagtgtggtaaccttgggtgagagtgaaggaacacaggagtttctgggaacgggcactgttctcgatgactttggcagtggttacctggtgtctgccttgtagttatttgtgatagttaatgtcttacagacttttctgttatgtttcacagtttaactattttttaaaaatgagtgatgtctttggccaaaaacttcaaattgagttacttttatcttctattttaaaaagctggagtcacattaaaaaaaaaaaaagtcagccgttatagcacagccaggaacattgcagtgggggctgggggttgcacacacagttttatccgccccgtggtcctgacgtgcttgttgacacagccctgcagcattgctgagggcttactcagcaggccaggactattctaaccacgtcacctgagttaacttgtttagcctcaccagtgaccctaggtaggtatgattatttattaccttttttttgttttgttggttttttgagacaggatcttagtctgtcacccaggctacagtgcagtggcaccatcacagctcaccgcctccaacttctgagctcaggcagtcctctcacctcaaccttctgaggagcgggaccagaggctaattttaaaatatttttgtagagacaaggtctcacttgtttcccacgctagtattgaactcctggactcaagcagtcctcccaccttggcctcccaccgtgctaagattacaggtgtgagccagtgcacttggactgtttgttacctttttaaagttaagaagatggatatgaaggaaggttgacataacttgtccaaggtctcacagttagtgagcagctgagcagagactccctgacccaggcagtctggccacaggacactctccccaccgtgctgtgctgctctccctggccaggggtgtcaagcttggggactgtgggtccctgggaggtccatggctgaggttcagaaggtttatcaccctgaagtcatgtgaaaaatgtacacatttctctgcagggcgagtcccgcatatccccaggtgttctgttaccacctgcaaaaggtagacacgcccgcccgaccccccacttgctgtgctctgttatagtcctccttgtcgctgcactctgggcccctagaactggtgtcccagaaagccaccctgctttaggccccgccgcagcagtggggccctcaagcgggtctgaagacgagcaggtgcacagacccccagccgagcctcatctccacgcaagcacacgtgggctcttcatccggttgcttctgtggagcagtgtggattgttaacactaggaattaactgttgaatatgtggttttttcctgtaaccaaattgctgtaactgtacactaaccttgtgtgagaaaagtttgtagtcctgctaaaagctcctctgtctctgcctatataaatgaaaccctaatgtccctacttcagaacactgactccattcctttggagttggtgtttccaggtgggctatactcaagcattacacatgaataaactctctttaagttaaataaatcaatttacaaaatgtaatttttcgagaacagaaaatgcaaaagatcaaaactctgtaaacaaaaaaaggagaccatgttaagcagtgtggagcccctgcatttccccagtcctgtttcttcacacgtgtaggcatcccccacaggtaactgcttttcttcagataaaagcaaataagaacacttccccttttacatgaaaacactgcatgctatatggattgtttgcacccttgtgttttcactggatgatatgtatagatacctctttatcattgcatagaaaatagagttgacatgtttatttccatcccagacactgttgtaagcatttgacatatgagctacagtaactcactgagctttcttccagtcctgtgagggagttcttttattatccccattctacagatgaggactgtgggacacagaaaggccaagtaacttccataggatcacacagcaagttagcagaatgcatcttctttcctcttagattataagttcttggtgcaccagggccatgattttaatgacaccaacctccatttagcatagcactttgtcaaaagtgggtgcttggtgtctgctgagtgaagagatgatcagttggtcccacagggtagccatctttctgtggaatgttaggcacgggcatttatgctgagcatctagcctttagtcacctgctactaggaagttacctcttagacgcacattttcattatggcttatcaagtcacttatagttggcaacaaagatgttacatgtgtctaatttgctgacatatctagtcactggaagtaccagccagaatgaggtcagaagaatgactaataaatattttcaggatggcaggtttcccttgaatagggcatgttattaaattcagaactcttatctgtgtgacttaaacatttagctgtttatttttaatctactgaagaacttttcatgggttttgtgagcagacacttcaacaggaaagcatgaaatgttcagggttaaagaaattctagagggaaaatctgcagtttgatgccatctcacctctagaggccagcctagatcagctcagttctagacataagggctgcaggcaggcccctgatccagccatggttttcaggggtttcatggatcttcaggggtttcagtctgagcatcctgccctgttggcctggagctcagggctggcactcggggttcctatgagaggaggtctccaaagcactgcgggggtggggtggggtggggtccggtggacgtctggttgctcagtgttctgtgatcgtttctgcagggggtaaaggaagtggtatctttgacgaatcaacccccgtgcagactcgacagcacctgaacccacctggagggaagaccagcgacatttttgggtctccggtcactgccacttcacgcttggcacacccaaacaaacccaaggtatggactgcattcagacgtgacagcgcagcagcgggtatgccaggtgctctttccaaaaaggctccaaggcagatgcgacatgtttttagggagaatcatggtgggtgccgtagattatcctggatgcaagcattagtcatcgagtttggaagttcccctgagtcacccaggaaacagtccagccttgtgctgactgaagccgtgggggaagctcttctgtgctggtggcggacgcccactgcagacgggctgtggcggctcctcactgcagtgctgcggggcgcggagaagcggtggggagcggaacgtgccgcagacgagctgggcccttgtccgtcttccactcttcctgtttcaccttgcagaggaaaagtgacagttcttttctgatgggcttttccccgcacagtcaaggtcctcggctggttacctgtggagattgtcagcacttgactgaagcgtagctgacgcctctgacccagtaatggcatcagtaggataagacaagtggcctggaaaggagaggaatgcctacacgatgcgacctcgggcatggccttagcagggattgatcagagctgcagcctccctgggctatggtggagggcttgcctaaggccagtctcggctttcgtgaggaccagagcctgcactaccctagcttggacatttgtttgaatggtggcagaacatttctagggtttactgcagccaccgttcatcagtaagaaagaccaggatttattactaacataattagcgatattttttcatctattcacttttctaccttttttgtggttaaaagatatggtctggttccttaaagtggaaaattcttaaccatttctggagttacttaacgcctagaaaactgctgcatgtttattggtttatatgctggaagatggcccattgcagaattaaaatggaaatgtagacagaaaggagaggacatgagtggatgagggcattgatcgcggccagcctggtttggattgccctacatctctcttgtgctggcatctctgcagcgacatctctttccagtgtatagagtct

SEQ ID NO: 62689 - DNA, 2064 bp, Homo sapiens
gagccgagatcgcgccatcacactccagcctgggcgacaagagcgaaacaccgtctcaaaaaaaaaaaaatcggtgcaattaataacccagtggatgggttaaacagattgcacgtagctgaaaagtaaccgaaaatctggactggcgcggtggctcacgcctgtcatcccagcactctgggaggtcgaggcgggcggatcacttgagatcagaaatttgagaccagcctggccaacatggcgaaaccccgtctctactaaaaatacaaaattagctggtctgtaatcccagctactccggaggctgagggagaagaatcacttgaacccagaaggcggagcttgcagtgagccaggatcgcgccaccgcactccagcctgggcgacagagcaagactccatctcaaaaaaaaaaaaaaaaaagaaaatctgaagcagtcagtgcagtagggagaagtgggcgaaaggaaggaggccacgctgctgggtttcaggatgagatgggcgttgagggtgcattcacagaatcccgggaggagccagctgagcggggaaggcatcaggagaggggaggcactgagcggggcgcggtgctgtagggaacggaggctcatcagggcggccgggattgaggcgcaggcgctgagccttcacctaagtccgccgaagtgtgcagagcctggagacgggatcgaggtcaccggaagcccacggttgcggggacatgatcaagctacagcgcgctgggggaagcgaccactgccgccccgcggatcccaccggcctggccgggagctccctctgcccggctcacccgcgcttccggcccgaagcccggcttcctctgacgtcacggcccctgcgccccctggcggcgcggctgcggcgggacgcgcgggcaccgccccctccggctggagggcgggacttccggtgagtgagtgacgggcgcagcctcggcagcggcggcggcggagccctgaggcgacagcagctgcgggaggcgacgggctgcggcctgcggaacctgaggcagctggggagggccgggcgcgccggccggatagcgagccgcgctggcggcggcggtggccgcgatgatggagatccagatggacgagggcggcggcgtggtggtgtaccaggacgactactgctccggctcggtgatgtcggagcgggtgtcgggcctggcgggctccatctaccgcgagttcgagcgcctcatccactgctacgacgaggaggtggtcaaggagctcatgccgctggtggtgaacgtgctggagaacctagactcggtgctcagcgagaaccaggagcacgaggtggagctggagctgctgcgcgaggacaacgagcagctgctcacccagtacgagcgtgagaaggcgctgcgcaggcaggcggaggaggtgcgtgggccgcgggacccgcccgcatccccgtcccggacccccagccagccccgggccccggacccaacacccgtcccgaccccagaccccgctccggcaccccggaccgcgggacccctggacccccagaccccgccccgagacccgcctggaccccatatcccccgccccgggacttccccaccccctctgcccgccgtgagacacctccctagagcactcccccgcctgccccgggaccccaccccgactcccggggacccccttttccgcccaggcctgggccctggccccctcctccgtgcccccagccctgaatcttcagccccaaacccgatgtgcctggcgtcatccccggggagctcagcttcaaagccaggcctcactctcccctccccacccacctctgcatgacaattgcctttgctttcgtgcgtgtgttcagtcaaaaccgtttcccgaccccaagtgctacctctgttggctgccattctaaacccatctagaaaaggaatcttttggtgttcttagggggctgcagccgtctgtggatgatgttggagacctttcccttgtccctaatcccgtattttgaaggtctgtgacacgggtgaattgggtggttgatgtaaacacagaacaaggc

SEQ ID NO: 62690 - DNA, 472 bp, Homo sapiens
attaatagcatgtgtgtgttcttcatatgctagttagccacagttaattcaaaatcacttatttttattttttgtaccgccgcacaaaaaagtcatgcattttctcagctgtggagtgtttgtttttcttccttttccttaagttgcatgtgatgcccataacacagactcttcctgctgcctcctgctccctgcctgcccctcccgcctctgtggttttctgccctctcagtaactgcacagaatgagtcacctcttgggcagagccccagtggtttcaacacaaagacctttttagaagctgctgctataggaagaagcgtcgaggagcctagtatccgggtgggagagtgggtagagttattatagggaacacagctgtggccactacccatggatcttccagatcccaaaagatgaaatccaccacccggtttatattcccatcttctgagaaactcttttgtcttca

SEQ ID NO: 62691 - DNA, 3837 bp, Homo sapiens
aggacagtgtcctggcacgtttccaggcgagccgcgcaggctcctggagcagctcctcgggcaggaaaccctgtacgccagggattggagaggcctgcgccaccctccatgcaacgtccagacaggtggatgttcagcagcccgtccaaagggatgctccaagcgctgtggggtggggccagaagcccgcccacctgggccctggaggaggctggagtgtgagagcctctgtgacgcgcatctgccgggctactcatacagccagtgcccagcgctgtcctcccagcagaggagctcgtctgcgcggaaccagagagcgatctcgcggcgggcactctccaccgagtcgctgccgtgaatcaggttcctgcgcggaagaggcgcgtgtgagcgtgggaaagagacctccggcacgggtaccacgcaggctgaacagggggaggccggacggggctgggaccgtccccggggcgggccttacttgccaacctcgatgcagaaatccccgcggatggtgccgggcggggcgtcggccgggttcgtggctccgatgagcgcccgcgaggtgcgcaccacgtccagcccctgccatacctgtgcggaggaacgggcgcggtatcacgcgggggtgggggtcccggagccgcccgcccgcttcccggatactcaccatggccaccaccggcccggaggccatatacttgacaaggcggccgtagaacgggcgttcacgcagctcggcgtagtgctcacgcagcagctcctcggaggcctgcggaagggtcaggccgcctgcgcccgcacccggcacctaggcgtccccaggtccccgctccccttccccccacaccgcgcccccgctcgctcaccgcgcccccacctgcaccagcttcagcgccaccaacttgaagcccttcctctcgaagcgccgcacaatctcgcccaccagccgccgctgcacgccgtccggcttcacggccaggaaggtgcgttcgtgtgcgccggtgcaggctgcggggcaggcggggacgggccgtcaggccggcccagcaccggccacccgcccccggcccgcgccgcgcggctcacccgcggggaagaggttagcgaagatggtcagcaccaggcagatcatgatggcggtgcgggagcgggatccgcggggcggggcggtggcgcccggggcggggcctgcgcttaaagaggcctggtcggggcgctgcggcctccgcggggaggctgcttcacttgcaccccggaacccggcagccgtggggggccggagggcagctgcggaggccaagtctcctccagcagctcggacactaactgtatcccccacaacccgcccaggtggttccacccacgcggcgccctgctccgcaccgcccgaaccccgccccccccgcgcccccccggccagggccacgaccacagcgtcagcccttctctccccggtcctaaagacagagcgcaaagacaccacgaccctgggtacttcttttctctttattccctttcatagcttctgccgggatccaggcagagagagcactaatgggggaaagggagcgagcgcttcccgctttccccagcgtgggccctcggagttgggtgtgggggcagcagggccagaggaaaggcacaggtggcgatttgccccagccctcccccctaagatgcagaccctcagaacacgtcgcggaaggtgagctccctgctccgagaggcagactcgggtgtaacgcaaagacggtttctttcatcaataaggtccccactgcctcacagcccctaaggccacccgctggttctggcattctagacgggggtgcccttggcccttcctttgtcttcctgttttgcagggtaatcccagggttccatgcgtatcctctgcacattcagcatgggctcctcggtgcttgtgtctccatttttctgtcgttctgcgataatcatggcccggaggagaggcgggtacggcacggaggccaggctgtcttccggcgccggcgtgaacgcggtgaaggcctcctcctcgtgcttgggcaccagccgccagtcatggtacatgacgtgttcgatctcccgcgcctcgctctcagtcttccctgatgaagaaaaagaggcgtctgcacacacttgctgtgccgtcggcggtcggcatcgaactgccgggcacccgctctcccgagccttacctttgaaggtcaggatgccccaggccttcccgtggtccaagttctgcaaagccagaaggaagcggggtcagctcgcaaagctctcggcccccgaggtcaggaggtgggagcctcagccacgcaaacctgcagggaggaggggaggcggggagaccaggcggctgcaggggcggggtgcggacggggtgcacgcacctgcgccgtgtagtcgggccgcacccgcgtgaggcgccagtagcacggctcgtcgtgctgccacagccaggacttgcgcgtgaccaggcggcccaggccgaagagcgggaggcggccgagcagctgcaagaggcggctctcgcggcgcacgtcggcccaggcccggaccggcagccggcgtccagagaacggccgcgtcaaggtctcgtagtccaccgcgtagagctgggagtcgcgcggcctgttcagttgctcccgcagggcgcgcacgcggcgggccagctccgcgatcagccgcggacgcaccttcttccgcgccatggcgggtccgcgtcctcagcggtccggccggaagtcaccggaagaggccggtgtcccaggctaaagtgttcggtcgcggccggaagcgaggaagaggtcggtccggccatggcgcgggttggacccgggagggcgggggtctcttgccagggccggggccggggacggggcgggagcggtcagcggcgacctccaacctgggagatctcagactccgacgctgaggactccgccggctcggaggccgccgcgagagcccgggacccagcgggtgagcgcagggcggctgccgaggcgttgcggctgctgcggccggagcaggtcctgaagcgcctcgcggtgtgcgtggacacaggtgcggcggagggcacgggcgatactcggggtaggaaaggcctttctccgccaggcggcgccctctgtccgactgggcggggcgcgcgtgccgaggggcctggggccgggcccgcctcccagtcgggggtttgtgccgaatggagactccccggtccggccacccgcccaggtagggcgctcgcgagggtggaaggaagcagtgaccgcgctcctctcccccggtcccagccatcctggaagacgccggtgccgacgtcctgatggaggccctggaggccctgggctgcgagtgccgcatcgagccccagcgcccggcccgcagcctgcggtggacccgagcgagtcccgacccctgcccccgcagcgtgagtggtcgcgggttcccgagggccagccgcgagttggctgttttgcttccatgatttcagccctggagctgtccctgaggcagctgccctgggccgtgcgcgtctcgcggatgggtaaagcaaggatggagaacgggaagtggaggtgcccaagccgttctgctggtatagagccgagctggctggagaaggttccgtctcgattcaggctgtggtctggattcctgccagccacagagacctggcctgagcttggccttggcaggaaagggaacactgggcttctgtagagcaggcctgtcagggcctgggcttggctggggccacgaaccgctttgctgctggactgcccaggcagggcccctggggcacccggggttgagacaggcagc

SEQ ID NO: 62692 - DNA, 2809 bp, Homo sapiens
tagtggagaatttctgttgaatgaaccaaaagcaactgccaacctctccatgcaccatgtgtttcagaggagaaagcacagtgaagaatgcagtgtgttctgaggtcctgtcacccctgaggctgtgtgtgtcctttgccaaattaaagagtcttactgaatgcggtgcatccaggagacaggcccaggtttggactggtcctctagcctcagaagcatctttttctccgactgattccgtgttcaggtaatgtctgcctgcctgcctagggcatctccacaccttaggccagccacgtccgcctcgcccgctggaacctacctgcccatcagagtcgtagccccagttagtggagcctgctagagccacggcccgggcatctgcgtctcggcgggctgcactcaggacgaagtgccaggccctgctgttccgggggcgtctggccatggtggaaagaatctagaagaaaacacaggctctgggcaaaggaagactcacagcactcccagccctgagcttccaggctgggccacggacccactcaaagtggggactgcaggggccgcaccggtgcccagccagggctccagaacgcttcaggagcccgtacctcactccaggatctgagcagctcaataaaacccaggtagatcctgtgaaacgccacccagacacccatgactccggaatgcgaatcccagcccctctctccggttccacctcacgaacctggctgccccgcccgcctgtcccgcaggcatctaaaacctccactcgctcctcctctgtcgtccggtttgacaaatggcatctccggcctcccagttcctcatgccagaagcaccgtgaccgctccccgacaccttcccctcacgcccggcccgaccgccgcacccgcctgcatcctcctcccgccaccgtctcctgggccgcgcagctcgccttcccctccgctcgctaccgccagggctcctcgtgaaacacaaatcttaaaacctgctcagcgctggccgctgttatggtataaaatgcaaaaggctgcgagggccaggtctgcgcttcccaggccacctgcctggcacctccctcgccagctccggggttcccgcctagccttccagggccgacccctgcgccgggctcgcggctggcaacgcccgctgggccccgggtggggttccagggaggccggggcggatcgcggcgcccggaccgccgaaccctgcccagccccaggcgagcgcgtgtgcagcgggagccgccctccccggcggcagcccggcctggctgttccctcccgcgggcgcgcgggttccggagtcggcggcaccggggaagcctctctcgggcgcggccctccggagaggaacaaaggcggcgccctggccgcgctgctaccgccgcgcccgcaaggtcagcgcgcccgcccagagcccgagacgtcggcccgtgccccgccactcacctgcagcccccgctgcgcgctccgccggcccggccctgacccactttccgccccggagcgagacgtaaacaatccccgccccctgcgcccattggctccggcggcgaggggcgggcacacctgtctcggagcttcgggagagggggcgggagtcgggtgacaaagctattgccgagaggtttcaggaactgtcagtcctaatccaacgttcctattggtcagttcccaagcggttggagacaaagctcgcgcgcacattggacccgggtgggaggtggtaccgcaggccgcgttgaccggaaagtaggtccgtgtcatcgtctgcgccggaacctgcgggaccggatcgagagctcctccggcaagctgattggctgggacagcaggattaggcctgtcaagaagagccacgggcgggcacgcactgcccattggttggaaggcccttcgctctagctgggaggctgacggcccgcgggcgtaagcggactgcagccgcgagctcctggaggcggcgggatggaggcggcggccggtgagtggcgggccagggtgcggagccgctccagggcctcgcttggggccccgccgcgtcccttcccggggcggcctcgctgcgtcgcgcgcctccggtgcgaccatcaccggccggcgtggctgggccgggccagaggccgcggcgcgggcattttctaaacagggtcgtttcccgcgtgctcctgcttcgatgtggaagctccgtgatctcggagggcctgagtcgtggagttgggggagcttttaaagttaactttgttgagcaccgcgttgtaggcgggcgcggtggcgcctgtgggccccgctatcctggaggtcgcggttgcaactgcaccgcagcccgggcaagagcgagaccctgtctctaaataaatcacacgcgcgcagtcatgaaagtaagacggacgccagaatctcacatgcttttaagttctttgtggaagtggcgctctcagtgttcagaaaagtgtaagttgcgcgggacagaattcacaccagtggggacgatccgttcgccagatcagcgccgtgggccctcctgagtagtgggagccgcatttatcttctaagagacctcgagtccgataccaaaaggaaaacattcctcggacagcaaggtcttgcagcacaactctgacagattagaaaccgagtgctggagtcttttgtttttgagacggagtctcgttctgtcgcccaggctggagtgcagtggcgcggtctcggctcactgccagctccgcctcccgggttcacgccattctcctgccgcagcctcccgagtagctgtgactacaggcgcccgc

SEQ ID NO: 62693 - DNA, 2040 bp, Homo sapiens
gttgggagtggcctgagccagctctggagctcagctcaggcttgggggtggccgaagctgcaaggggtcaccccacagagacaatggggtgtgagccaacgtctcctgcctgggccgggcccacaacgcgggccgtgcggggcacttcccgccgctgtgctgggagctgaagggtccggcctgcacctggccctcctcccctgtgccgccgccagcgcccttagggtggaggacgggacagagacccctggtgccaggcacagctgtgtccccctgccaaccccagcagccgcatttccgactgtgggctccccagagtcccccgcagacccccagagctgagccccccagagcttccttgggggctaccccggcctctccccagcgggctcagggtcacagactggccacccctagagtgggtggcggggcactcgggggcctcacctttcctcagggccatcctgcatgcagggcaggctgcaggcaggcagcgagggagggtacgtctgctgtgccggccacccctgccctctggatttccccactgcggggcagcccgcgcctgtcacctggctggcccaacccagctggccctggctctgttaaccccctcgtgccgggcggccggcatcagcccggagccctggggtgcagacagtgcagggggtgagggagcttcagtcggggcccgaggtagccgtaatgcggccctgggggctgacggccagtgcccgggccccctgcagggctgactggggagggctgggcagccaggttggggtggggaccccttgcagcagcctgggaggggctggggcttgaggccggtttggggagcccagggttttaccaggtcctgttgcgggcagggggctcctcgggcagctcctggggtcttgagcccacccctggcctgagtagccagccgtgtggggctaaggggctgccgccccttccccgtgccccacccagccatccacccgccctcccgggggttccctacagcctgggtgggagctgccgtttgggcttcaggcccacggtgctgtccagggcccaagctcaccctgcctctcccgtgaccccaggggcgctggtgtctggccactgccccgcccccagcctcttctaggaatgcctggcagggctgcaggcgcctgtttgcttttgccctgcgccatcctcggggagtgtgtgggggtggcctggccatgggagccaggtcttgtgcctcagacaagcctcacctgccccttgctgtcccccaaggctctggtgagggcctggccgccccacagtcaccgcttgtgtgcagagaggccacaggaatgtgtgcccagccatgtccaaggccacccctgggctccgtctccacctgcctccagaggcccctggttcccctccacctgctcaaaccacttcccaaccagtcgctctctcccccagggcctgagcaggtgcagcccctcccctccaggtccctgcaggcccctcccctggctgtcagtggggcctgcccaccagtccctcggcagtgggaaagtgtgcagggaagcagccggaaggggtgcaggcgggggcacagccagggctcggggagaccacagttttccagggccctaccccatcctcagctccggcctcacctggcaggccccgtgcagagctgtgggaagccgccggcccactgtcatcgtcttccctttatcgagaattgatcattttccaggtggcgtctcggctcctcttctgagaaattatagatccacggggagaaagtccacacccagaaagacccacgatccgtttactcagcagaaaacgcagactcagcaggggcctggggcctgaggccagcagacccgggcggcctcctctcaggagaggtccccgtgggggccccggcctccgtcaggccgcgcaccccacctgggagccccacacattccaggtgggaagggagaatctgtccctgttctcttcctttgggaggggccgggtgtcgcgggcgggcagagcctcaccagggttgcggca

SEQ ID NO: 62694 - DNA, 4470 bp, Homo sapiens
gcagaggttgcagtgagccgagattggccactgcactgcccaggcgaagaaaatgtcatttacaactggtgctcagcctcccctggagaccatcacagcctcctgaagaagctgacaacccagggaggtgcctttatttctgaggaaagacgcagctggtgccaacaccagcagaaaccgtattccctttccatatcactcagcccagcactgcctggcaaatgttcccggcttgctgttttgtaactgtaatactttgtacaaacaggtcaaggacctgcagcctggggcctggaccaagtccagaaacatgttcggtttggccccaaaaacaaaaaaaaattgagatatggtctcactctgtcccctaggctacagtgcagtggtgcgatcaagggtcactgcagcctcgacctcctggactcaagcgatcctcccacctcagcctccaaagtgactgagactacagttgtgtgccaccacgcccggctgattttgtttagtttttgtagcgatgaggtctcaacatgttgccaggctggtctggaactcctggactcaagcgatcctcccgcctcggcctcccaaagtgctgggatgacaggcgtgcgtcactgcacttcttttttaaatcaggaagtttcacagcatcttgcttcccttgaactgggcggcaccaaatacgggggctggggcctcccttagaatggggtacgcacgccctgccgatgcacacagtcccgctggaactctctgcctggacccttatgaatgtccctaaaactgtaattctgaggacctcaaaatccatgtcctttccttagcaatggcgacattctaccccctgcagagccttgacagctttcggcgagatctggaaaccgccagggacgcctccctgtctgcgcctccgcccgcccagtgccctgcgctgcgcacccgcccggggcgctggcctggcccggccgcgcgaccacctcgggcgaatgacacgccgggtccccagacgggggctccggcgccgggcgggcagctccaccaccgcaggcggcgccgcgagaccgcggtccttgcagcggggcagcaggtgcggggtgggccaggcgtcccggggccctgcccgctgcgcctcagagccgcgccccaggctctcctcggcgccggcccgggcaggacgcgatgccctggaggcgtcaggggcgcggccggcccagcccgagcgtggaggccgcggcggacgcaggcctggccctgcttacctagcgctttccgcacccgcggccccgcgcccgctccgcgccagcctcagcgcctgcgccgcctccgctcgagcccggcagcgcggccttaggcacctgcgcaacagacaccgcgtcagcggtcgccaaacgacggcccggcgccgcccgctgcccgccccgccaggcccgcgtcccccggcccgcaccgccccgccgcacccaccgaggcctcggcgggcgcaggcggctcccagcgcggcgaggctgcggcggccgagcagccctcggcccaccaccatgacccgggccgggctggactgccgagctgcccaggactgcaaaacaccggcgtcggcgcgtcgcagccaatcagcgcccgcctcgcgctgccctcagccaatcagcgtccacctcgcaccgtccgccaaccaatcaacgcgctcgcgctcaacttgttttgtccgcgagccccgactgccacgggccgggagacgggcctgggagcggcggcggcggcccgagagctgcgccgggagagctgtgccgcgagcctccgcctcttttttggcaccgcacagtggatccctggaggccgagcgccacgccgcccgggtacccggcagatcgcgaggtggaacgggccgtcgctgcgggggacagcgttccgaggcagttggtcctctccgggatgccgtaggcatcagctgaccggcccagcccacgtgactacaggggcacttgatgggaatcatggcagcatccaggccattgtcccgcttctgggagtggggaaagaacatcgtctgcgtggggaggaactacgcggaccacgtcagggagatgcgcagcgcggtgttgagcgagcccgtgctgttcctgaagccgtccacggcctacgcgcccgagggctcgcccatcctcatgcccgcgtacactcgcaacctgcaccacgagctggagctgggcgtggtgatgggcaagcgctgccgcgcagtccccgaggctgcggccatggactacgtgggcggctatgccctgtgcctggatatgaccgcccgggacgtgcaggacgagtgcaagaagaaggggctgccctggactctggcgaagagcttcacggcgtcctgcccggtcagcgcgttcgtgcccaaggagaagatccctgaccctcacaagctgaagctctggctcaaggtcaacggcgaactcagacaggagggtgagacatcctccatgattttttccatcccctacatcatcagctatgtttctaagatcataaccttggaagaaggagatattatcttgactgggacgccaaagggagttggaccggttaaagaaaacgatgagatcgaggctggcatacacgggctggtcagtatgacatttaaagtggaaaagccagaatattgagttatttcttaacaagtttcgagagagaagggagcaagacaagagcaagcaacggctattaaatgtcacaatcctttaattagaaaccatttattggccggacgcggtggctcacgcctgtaatcgcagcactttgggaggccgaggcgggcggctcacgacgtcaggagatccagaccatcttggctaacagggtgaaaccccgtctctactaaaaatacaaaaaattagccgggcgtggtggcgggcgcctgtagtcccagctactctggaggctgaggcaggagaatcaattgaacccgggaggcggagcttacagtgagctgagattgcgccactgtactcctgggcaacagcgagactccgtctcaaaaaaaaaaaaaaaaaaagaaaccatttattttaaaaatgattagattgctatgcctcaactcatagaagatgaacccttcaagaaaacgtgaagtagaacgggtgggccagaaatgaaaacaggcaagtaaagtatttcttcggaaaacattttatcaaaccaaatgttaaaaagactttccttttgtaaaactggattagagaagacttttcagtgggttatctctaggatgatcagtagttcagcacttaaaaactgcagagaaaactgaaagttatgttccagataactttccgttgtttaccaaattttcttagatttggtcatcatcaggaagcatttgtaaaaataaaaatctccacaaattactggcccatctcggacttgctgaatcaatttgataggattaatctccagtgaagctgtgtttacagggcattccaagtgattcttatcaggaaatgtgaaaaacactcctgtacataatcggttaatttaaaattttacttaataagtgaacaagtaatgaagatttcacctgtttacttagggtatctacccagacccatcgattctgagttcgggagatgattttgaaattactgttttccaaataaaggtgctcccttctaagtggcttacaagggtaatttttttccccccagtaatgacgaggagggatatttcctccttgtggggcttcagaccttagtctttgacctttggccttctgagcactgtgctgtgttaacacagttaatcagcaactgtacttcccaaccggagataaggaggctttgtggaagttgaatagcctgggactgctgcttttgctcttgcctgcaccctcctctgaaaaaacatccaggcaagatgcacagcatagctgtcaatgcctggaggagtcctttgggcttcggcaggggttcctgttcgcgttcacatcatctgctggcccctgaagaaagcctaggacatctgattgagtagtaacggtccccatgtattgaacacagtactgttaggcaccatgccaagcagtttattctgtatttccacgtgttatgtaaccagcaaccaagccataagcttagtatgatcactaccatccccattactcagatgaagacagatctagaggctgcgaaggctggctaaagtcactcagcttagtggcagagccgagatgtaacccagctcccccaagaccagaacgtgaagttttgaccacaatgcaggctgcatcttgtaagtagatacataagaagaatcagacacttaggtatgctgcaaccccatgcttaaattataatatagtatgaggaagtgccataattggatttctttattaagtatcatgctatcttaactacttttagtattattttttcattgcttggcaatgcatgtaattacagaagagtcagaaaatagagatta

SEQ ID NO: 62695 - DNA, 896 bp, Homo sapiens
acacccggctaattttgtatttttagtagagacagggtttcaccatgttggtcaagctggtctcgaactcctgacctcaagtgatccacccgcctgggcgtcccaaagtgctgggattacaggcatgagccaccgtgcccagctataccatacaattatttaacttgcttatttcactgtatattgtgaccatctttttccttgttagctgacacatttctgcagtacaactttcatggattgcataagattctgaagtcaagcctccatttttggaccttgagattgtctctaatgatttgctagtatcagcacatgtgctgttttttcctttggctaggttcccataagtggaagagttggatcaaagggcgtgctcatgctggaagtgtattattagtctgctaccaggtacacggttcagctgagatatagctaccaagttgacagactattaaagtcaaagttataaagtagaagcagtgctcacatgcagccctagtaggtggcacaagccagcaccgagtacagtgcccctggggtcagtgttcaccacagtggtagaacaagctttgtcacaaacattgacatcagcattgcaggtgtaggcacacaaagtccttagatgcaagaatcaaaaacagagacaccaagtccgacaattcctgatattgctaaaatcatagtaatcctagcattcagaagataacgtttttccacgttttgaatacatttaaacctatgaaaaagtttaaaaaccaatacaatgaactccatatgccctttaatagtttcaacaattaccagcattcactatgtttgtcctctggtcctacgtctctcccttcctccccgccatatatgtgtatatatgcagacatgcacctctctctctc

SEQ ID NO: 62696 - DNA, 1900 bp, Homo sapiens
ctcgtgatccgcccacctcggcctcccaaagtgctgggattacaggcatgagccaccacgcccggcctcagtgggacatttaaggatttaaatatatattagcatcaagcttacctcaaaaaatacagcaaaaatctacgtaaacacctcatattgagcatttgattatactgtgtgaagggaaaggtagtgatttttttttttttgagacggagtctcgctctgtcgcccaggatggagtgcagtggcacgatctcagctcactgcaacctctacctcccaggttcaagcgattctcctgcctcagcctcccgagtagctgggactacaggcatgtgtcacctcacccagctaatttttttgtatttttagtagagatggggtttcactgtgttagccaggatggtctcgatctcctgacctgatgatccacccgcatcagcctcccaaagtgctgggattacaggcgtgagccactgagcccagcccgggaaaattattgattttaaacacacctctacatagtaaaactacatgagggcagaggtggcatcttacgtatttttatgtatgtatttcataactgaaaaccataaatatcagatgaacgaaatggtggtttgtccctcaacatcatcactctaaaaggttctattgtagaaaaattgtaagctacaccaaacagattgacttcactttataatccagggcctctttaactctgggaatgcccacacccacccgctccagttcaaggacgtgtctcatgacacctgaatttcaggcagcctgtggagttagtcaaatatgattttgaattgcaacaccactagtttgtagtcgtgtgttttaacattactaaacattaatttcctcatccttaaattgtggataacatccacctggcagtgaaaagtagaaacagtgtatacaagatgcctcgatgttcacaggctcacagtcaatgatggccctgcttgtcaatattatccaatgtaccagtttttgtattcaaggcctttcagtgccagaagaaacatttgggaattaagctgtgtcaagtttttcattcgttctttggcctggtctgatgtggctcacaatgcagtgtcactatctaaaacacttgccgaactgtgacaaattcattcactcattcaaccattcaactaatatttatttacagcccaaagtgccagacatgtgagtcgagaggatgagtcagacatttgactcagtggctgaatattctgtacaaacacaactacctacacaccaagggatttctccacatttttaccccttagcatctcttggtgggacatggtatcctattatctctctgaattcccttatttgtctgctaccgttagaggtatatggtaatagacgttagtgtctgcccacaaaaaatatgacttgcttctctacctggtcactttaacagatacaaaattaacatgaactaaagagctcaatctgagaattcagagatgacttcattcaacaactactgtctcttttaccctacaattttgttttgttttgttttttgagacagagtcttgctctgtcgcccaggctggagcgcagtggcgcaatctcggctcactacaagctccgcctcccgggttcacgccattctcctgcctcagcctcccgagtagctgggactacaggcactcgccgccacgcctggctaattttttgtatttttagtagagacggggtttcaccgtgttagccaggatggtctcgatctcctgacctcgtgatccacccgcctcggcctcccaaagtgctgggattacaggcttgagccaccgcgcccggccctttttttttttttttttttttttttgacagagtcttgctctgttgcccagaccggagtgcaatg

SEQ ID NO: 62697 - DNA, 1060 bp, Homo sapiens
aaaaaaaaaaaaaaagaaacaaccccaaactgtaattatgataaacaacaccgatctcatttatggagtaggaaatcaagctggagaggtggggtcagcctaggtcagagcaggcaaggactgtgggaacctctgagggagggacctggtctggttattattttgcagagaggactctggttgggggaaggcagccaggagctgcctgggttgtagcggggagaggtgggcggaggaaagaggcctgggatgtggaaccctaggatctagccctgagggcgggccaggtccgggcagcctgggtcccacgcagctgccctgaagaaggggctgggggcgtcctgcctccacccgcgcccccaaccacgcctgccgttcccaccggccgcgccacccccgcccccgcccctggctctgtcctccggtgaccctggaaggggcacccgtggctgcgactgcactccctgtagcggtcacttcgtgaagcccggcaaaccccctgcagctgcccctggcaccctcagacgaccagaggcctcggcctgggtccccagcaccggcccaagggcgggcgtggccgaggcggtttctctgcgcggacgctcgctgcctccgccgcaacccccgcggccacccggggaactgcagcgccgtcaggccccccgccgcgcctgcgcacgcagaccacccggcctggcagcaccgagcgagcgtgccccctgctggtcagtcctgcgcacggtcccgcgcccgggcccgggaggccgcctcgagggccggggcttgcacgtggcctcggcgccttcgccgaccctaccggacgccccctcctcccacctgccgacccgtccgcgggtaggagcctcccgggagctgcccacggcccccacccccaccaggggccacagccccaccagggccaggctctgcgcggcacctgccactgagagagcggaaagcggtggttgagcaagggtctgaagtatggtctgttcccccatacgggccgcagacgcttcctggtggctgctctgagccaggcctgggccccggcgaggga

SEQ ID NO: 62698 - DNA, 3520 bp, Homo sapiens
tgggaggccaagacaggagaattgcttgaaccaggaggcagaggttgcagtgagctgagatcgcgccactgcacaccagcctgcacgacagagcaagactccatctcagaaaaaaaaaaaaaaaggatgaggattcatcaagctattattgtgtgccaggcccaggtgcacgtgacacgcagctgtcctcacagccctgctaccaccgccactctgcagaggaggaggcaggctctgagcggctaagaagcaaggccacagtcctagccagtgggagacacagccgcacagactggggcctcaggctctgcctgccccgcccctgactctagcctctgggaaaggccaggcctctgaggaaaaccatttgccacattctcacgctgaagcccctttttgggacagtcatgatcaaccaagcgaggaagcggaacaccagctcctttgcccctgcgctgcagccacctttctgggggatcctggacagttcccaggcagcgtgacttggtggccccataccttgtcatggtaagtggacaagcacaaacactgggccccccagcctgggctcaaaggccaacaggcctggccccagctgtgcaaagcaagctcacctttagggacaaacttcagcgagctgctgaatattcagaatcgggactgccccggcttggggccgtcgttcaggaactcgtggcccaacccattgccacacttgccacaggacacctggaaagatcacaaggcagctgggtgagcttctggccatgatacagccacagtgaaggcccttactggggctggcagatggtgtttcttcccacacgcctatttcccaagctgaccgccgacataagaggttgacctttgtcctggagcccgtacaggaaacctgtcctgtttcccacatttgcaccagaaggccaggctctcccgatagcctggggtggcagctccctggcagaggcaacaggcctggaatagacgcctctaagcccctggagctgtggggcaagcagagggaggaaggtgggactggctctctgctctccctggccgcccccgtccctcccccacccctgtggcctctcaccttcaaggcttcagatctattgtgctccggacgcttggccacgctgtcggcgtgaatggtctcggtgaacgccggccatggagacgagtgtgcatacttcgagcggctggagaacagctcatagccacacttggcacacacgtaaacgcctgtggtggaaggagaggcaaatgtggagtcatcagctcccgcctttccggggtcaagctcccaaatccaccaacccaggcaaagacagcgctgcccccgttccgagggtaggctgtgctccttccccaggcacccgccacgggaggcgctgtgctgagctcacgtttagtagatgtgccagagaccaggggagtcacctttcacaattatctccttgattcttctcatagccccgtgacggggcatatcctaacatttccatctttgcttggtgatgcagacactcagctacaagtgtgtgcagcgtgaaggaacctgggtagtccaatgaggacacggagctccccctcgcccccctagttcccccaggaacatagagggcaggggccctgatgtggcccaaccacctggtccctctcctttctcaagtggtcctccctgctgcccaacgaggccctaagctggatacccaggcactgctctgctctccaggcaggaagagaacagtcccagagaaaaggcctccaggccacacaggagcccaggaagaaagagggctggggacaacagatttcagcctacccacaaaggatccctttggagtggagggggtgggaaagttgcaaaactgacttgcagaactgttttaaggactgaaaacaggaacctccaggggtgctgagtcacctctcacccatcacctggggacagcctcccctggagactgtaaactacccagccttttccaggaactggagaaaaaagcaaagagaagccagcagctgctgtggaagtggagtttctggcttggcagagcagcctgaggacaactgggatctaaagccagagagtcttgctgggggaggctttgccgggatggtcctgtgtcacagcccaacccgctacaggggtgccacccagcagatccgcccaaggagaccagtgcactcagacttgcctgtggatgtgtttttaccaaattagtccactaccaggcgagcccagcccagaagggattcatcagggccagtgtggagggctggccatgccccaaaccaccccatcctgcctgcctggtcaaacttcacgggctgttggcaggtgcctggtggcactcctggttccccaatttggagtccctgggcaggtggggaggcacctgggccggcacattaggatctgaaggggacattctatgcttgccagactcctcccagagatcccggactcgggggaatgggaagggccagggtaacacctgcgggatgacccgcgaaggggcgccccggccacaggagctggccctggacaagaacctggcctctccgaagccccgaccctaacccgaattcccccagcgccatcactttggagtgtagggggtagggaaggggtaccacccccacgtatcccgatcccttagacccacccccgaaacggcacgttcacactcgaggcctgccccctccaggacggtgagccccaaggccccctctcctcgggtaccccactctcctcgcccccaggctccccactcctccgcagtccttttgacccctgttcgcttctccccggcagccacattcgcccccattcccggcttgggagagacatcacccccggacgacggcggcgcccccgctaatgcgcgccccccgccgcgctgccctcccagcgagaggccgcaggaccaaccaggttcaaagtgattctggaaaacctcgcccccgaagaagctgcagaacgacatggcgccaccggaaccgcagcgcgcttgccgctgccaactgaccaaaggctgccgacccgacgaccgccggtacccgcgtccacctccccgcccctcccgaggaccaatcgctccccggagggcgaatcccggcttccgcctccgggaggccccgcccctcctcagggctggtccaatacgatcttcccagctggccccgcccacgttgactccttgggaccactcctgggccacttccccaaggccccgccccccggtgccagtccaatcgcatctccccagcaggccccgcccatggaaactcccagggaccacccctaggccgcttccccaaggccccgcccctgccgcccctcgcgccctggtggctaggggcgcacatggggcctggccaggtgggcgacggcgcgaatccgtagggtcgtgtccccccagtccagtccctggtactaagcccggagctgccggaggtcatgcagcctttccgcgcccaggtgaaaccgcctttgcaaaatgatgactgaaac

SEQ ID NO: 62699 - DNA, 1349 bp, Homo sapiens
gaagtctgtagggactaggcaatccaggaaagcttcctggaggagtagggtgtttggaatcgcgtgctatttgttcactttgtcgtgtgcgctctaacggcctgtgttctccatcacagtttatcttattccctgctgcactcagcacagtgcctggcgcgcagtgggaaccgaatgaccccctcctattccttatgtcagttgccttttgtctgtttctttcatcgtaagcaggaatctgtccggttcgcggctgcttcccaggcgcccagaccagcgaccagcaccgcgtaggcgctcggcacagaccgagaacggaggccccacgcgggggcgccctgcggcgaggcgggtcccggccgcgcccggcggagccggggaactacaagtcccatggtgcatcgcggcgccagcgcgcagacgcagccgccctcggcgtcctctgtagcgggcgacctaggccgcgggacccggacggaggtagaggccagggcagcgcgtccgggagcggagtccgcgcccgccgccgccatgccggacagctgggacaaggatgtgtaccctgagcccccgcgccgcacgccggtgcagcccaatcccatcgtctacatgatgaaagcgttcgacctcatcgtggaccgacccgtgaccctcgtgagaggtacgaagccccagcccggggctccctcgccggcctctggggacccctggatcccacaccctgcctggatcctccaatgcctccggggtcccgtctgcctgagaccgccccccgctgcaccccggggacaactccccacccccggagacctccgagctccgtcgcctcctttggcctcccactgcaccccggacctcacctcccaggatcccttactctcccctgcaccccgggatgccccgcttcttcccaggactcttccctccctgccgcacccagcgcccactgccccaggaccccgcactgctctccgccccccgccgccccgggcacccctccactgcaccgctggcctcaggcctctctcaaatgtctctctgccggatgaccaagtgtcggggtgatggccgagatgcccaaattcagcatctctggaacgaaccgggaaaatgcccagttcagtttttgttgtttttttttttcctgagacagtctcactctgttgcccaggctggagtgcagtggcgcgatctcggctcactgcaacctctgccccaccccgggttcaagcgattctcctgcctcagcctccccagtactaggattacaggcgcaccaccaccacgcccagctaatttttatatttttagtagacacggggtttcaccatgttggccaggctggtctc

SEQ ID NO: 62700 - DNA, 2338 bp, Homo sapiens
ttaccctatttctgcatctcaatcgtttcttcctatttgccctttttctcttgtttggtgagatgtggctttccactcagatttccttttgctttgtccagctttggcctagccatgaccaccgtaccttgctagggcgaacgctcacatgacaaatatgccattagcctttccccactgcacccgctggatgcagatgacagctgtcccgtacacgcggactatgacagtttgctaacccttacagtgtcctcccacaacctgaacttcatcatcctctcggatggcatgaaccaagcgctgcttctctttcagttctttcgaaatgaattcgctgcgaatgtgggaagatgcgctgaaatgccttttgtggctctggcttcgctcaggtatccatccaacctctaagtggaatcctctcctcagccagcccgcaacacaacctcaacctctcacgcgagacgctgggccctttaatgcgagtcaatggcagatgctaatcctccaaccccagcccaaatgactccggggtcgcacttgctcaacgccccaacgaccgacgcgtaccttaataggcagggagaagagatagatctcctccagggacttgatcttcatgtccttgaccaagcggcccaacttggtgacgggcatccactaaagggagaaaaggcgccagtgaccaggaccgctctccggcgccgcccaggggcccgaccccgagcgtggctgatacctacctccttatcctcggccttgcctccgcgagctccgcggcctcggccccggccccgtccacggccgcgaccccggccccggatgccactgccgaaacctccgcggaagccaccgcggttccccatcccagggccaccagggcccccgggcccccccgctgcaccggcgtcatccgccatttgctgggaaaagcgacaagaaggaactagtcagtgtggcctacgcatctggcagccccccgcgagacccagacaagggctcccgcccaggagcgcggactcgggagcctagacccgacccgatgtccgcggattcccgccgcccacgcagaggcccgctgcagcgaccaacaggactcacgtgttttgtcggaaaagaagaacgagacctactgggaagcagcttttatagcacgccaagcgccgcgagatctccgcagccccgccccaagcgggagcgggccgagctcctataagacaacctgtgattggctccgcggtgccccgccctcaccgggctctgagtgctcttgcccgtccggccccagccgcggcccgggaatctacgtcacccgaaaagcgactataaacgccggcgcctccgtccccagccgcggctcgggaatccacccgaagagtggctataaacgtccgcgcctccattgcgctctcctcttcacttaggtaggtcctgccgcgttgaccactggcgtctcgctggtggtcttcgagaccggcgttggttgaaaatcgcccccggctttggccgtggccgcgggtgagattcggcgcccagagcccccgggggcctcagctcaccgcgcgctgccccatgtgcggcggtgaaacccaggccccgacaggcgctgccgcctcccccccgggtgcggtcgctcgcgaggtctggcccctgactcctgaccccgactgcagacccctaaccttgttctttctccgcaggacactggtcctcccacgcctgacaccgacgtcgccaggaccgcggggttgggggaacttggctgtcccacgtctttcaaataaagctgttttgtctaactcactgcatgcgggtgttcttggggccccgactcgcctatcagcctggcggcaagtgcatatgttcacgctgtggcggggagaaccctagcgagatgcctcctcttctttcctggctttggacacaagggtaggatatgggaggttggcaggtgatgtgtaaggtccgacgcctcttaagtggaggagccagactacgaacagtcttgtggccatgcgcatctcaagtgaactacactggcaggtaaaatgccttggtccaaagggctccaggtggagccagcagagcactagcaaggatgggaagctcagaggcttccagtggcttccttgtgagaccaggtgagattctaaaggatttgaccaactaggcctagatgaactcagcgcccccgtggtgctaggctggagtggatcagacacctggtttgggaggctgggccccctgctctggggcggcaggttacccgggagtttagttgtcactgccgtggagctagcacctgagtatcagatcctaagtgaagacccccagtgagtca

SEQ ID NO: 62701 - DNA, 2003 bp, Homo sapiens
cctgcagccacccggcttgttgctactcaatgcttggcacccccagtcctaggcctgtgccctggctgttctcaacaccattcgttccacagggctccctgcttcgcgaacttgtgtctgctcaggcgtcaccttctcaatacagcctcctccttcctcccttccgctccctcccttctgtttttttttctttctttctttctttttttctgagacggagtctcacgctgtcacccaggctggagtccagtggcgcaatctcagctcactgcagcctccgcctccggggttcaagcgattctcctgcctcagcctcccaagtagctgggattacaggcatgtgccaccacgcccagctaattttttttttctgtttttagtagagacggggtttctccacgttggtcaggctggtctcgaacttccgacctcaggtgatccacccgcctcggcctcccaaagtgctgggactactggcgtgagccaacgcgcccggccctcctcctttttccatcgcgctcagcaactatcactcgtcgcccgttctgtttcttctctggtgtccgccaagtgccgattacagtgctttgcacacagaaggtgctcaatacatgaatgcctttgagattacccggtttattcatttacctacgttatttatcaagagccacactgcgagcccaggggcagggtcaggttgacggctctacgcacggaccgcacccgacagctggtacccccacatcccagaacgccgaaaagcaggagtaaacgctggctacaaatgcctttttatactggtatcaaagagccaggccaccagcgatgccacatccgccggtctacccccaccgacccgcgaagcaccctcacagctcacggccctccctccaggccggaaacgtctccgcccgcttccgcttcccgatgcagccgccactgcccgaagcaaagatggcgccaagtgcgcggcgccggcggggacgtcacagtggtcgcgcgcggtgacgccatcgcagcgcgccgggagtgtggcgttctgtgaagagttcggtgctaacctccctcacgcggcggtggctgccgggaccctagcaggtttcagctggagcggcggcggcggcaacatggcagagaccgcggccggagtgggccgcttcaagaccaagtgagcccggagctctggggccgtgcggggagggagctgggtttgcagccggcatagcggaggcgcgcgtggggtgggcacgcattggggtccgtggaggcgagaggctgtgtgtgcgccggcccgcggggtcgcggaggctgcggtgatactaggcgggagagccggccccggctgctctcggggaggacggcgatcggagcccggccgccgggagcagcagcgtgggctcatcgagaagccggctatggggtggagtggggaccagaagtcccgatgaggggaggagagggctgagcctaggtcggggctggtcccgggaggcggcgggggcgaagaaccacctctgagcagtcggcctggggacctttcatccgcgatccgtcttctccagggagcagggagaatgcaggagaggggcgggtccgcagaagcccaggaggccctgagtgctgtgccccgtcactccccaagcctttgccgaacagcagtgctggtgcccccgccctggcagcgcagcctcatgggattatcgtttccactggcggctgtggggctttggttgtgccaagcactggtaaaggaaagtcccaggctggcagcaccgtcgtgggagggtcaactgggtgcgggggctgaggggccgctttcgttttggcagtcaggcttccagaagcgcagtgagccaggccttgacatctgggaagagaagcccaggccgcgtacagggaatagggggaagataggaaacccgtcccagaggctgggacaggagcagtggggtgcactgtgggccatgagaaggaaagaaagcagaggcaagggtggcagaggc
